(19) United States
(12) Patent Application Publication
(10) Pub. No.: US 2005/0064454 A1
(43) Pub. Date: Mar. 24, 2005

(54) Cancer gene determination and therapeutic screening using signature gene sets

(76) Inventors: Paul E. Young, Gaithersburg, MD (US); Meena Augustus, Burtonsville, MD (US); Kenneth C. Carter, Potomac, MD (US); Reinhard Ebner, Gaithersburg, MD (US); Gregory Endress, Florence, MA (US); Stephen K. Horrigan, Potomac, MD (US); Daniel R. Soppet, Centervile, VA (US); Zoe Weaver, Chevy Chase, MD (US)

Correspondence Address: Alan J. Grant, Esq.;c/o Carella, Byme, Byrne, Gilfillan,, Cecchi, Stewart & Olstein, 5 Becker Farm Road, Roseland, NJ, 07068, US

(21) Appl. No.: 10/843,641

(22) Filed: May 11, 2004

Related U.S. Application Data
(63) Continuation-in-part of application No. 09/873,367, filed on Jun. 5, 2001, now abandoned.
(63) Continuation-in-part of application No. 09/954,531, filed on Sep. 18, 2001, now abandoned.
(63) Continuation-in-part of application No. 09/954,456, filed on Sep. 18, 2001, now abandoned.
(63) Continuation-in-part of application No. 09/962,436, filed on Sep. 25, 2001, now abandoned.
(63) Continuation-in-part of application No. 09/962,832, filed on Sep. 25, 2001, now abandoned.
(63) Continuation-in-part of application No. 09/964,824, filed on Sep. 27, 2001, now abandoned.
(63) Continuation-in-part of application No. 09/967,768, filed on Sep. 28, 2001.
(63) Continuation-in-part of application No. 09/968,007, filed on Oct. 2, 2001, now abandoned.
(63) Continuation-in-part of application No. 09/969,347, filed on Oct. 2, 2001.
(63) Continuation-in-part of application No. 09/969,708, filed on Oct. 3, 2001.
(60) Provisional application No. 60/209,473, filed on Jun. 5, 2000.
(60) Provisional application No. 60/209,531, filed on Jun. 5, 2000.
(60) Provisional application No. 60/236,842, filed on Sep. 29, 2000.
(60) Provisional application No. 60/236,891, filed on Sep. 29, 2000.
(60) Provisional application No. 60/244,867, filed on Nov. 1, 2000.
(60) Provisional application No. 60/245,084, filed on Nov. 1, 2000.
(60) Provisional application No. 60/233,133, filed on Sep. 18, 2000.
(60) Provisional application No. 60/234,009, filed on Sep. 20, 2000.
(60) Provisional application No. 60/234,034, filed on Sep. 20, 2000.
(60) Provisional application No. 60/234,509, filed on Sep. 22, 2000.
(60) Provisional application No. 60/234,567, filed on Sep. 22, 2000.
(60) Provisional application No. 60/233,617, filed on Sep. 18, 2000.
(60) Provisional application No. 60/234,052, filed on Sep. 20, 2000.
(60) Provisional application No. 60/234,923, filed on Sep. 25, 2000.
(60) Provisional application No. 60/235,134, filed on Sep. 25, 2000.
(60) Provisional application No. 60/235,637, filed on Sep. 26, 2000.
(60) Provisional application No. 60/235,638, filed on Sep. 26, 2000.
(60) Provisional application No. 60/235,711, filed on Sep. 27, 2000.
(60) Provisional application No. 60/235,720, filed on Sep. 27, 2000.
(60) Provisional application No. 60/235,840, filed on Sep. 27, 2000.
(60) Provisional application No. 60/235,863, filed on Sep. 27, 2000.
(60) Provisional application No. 60/235,082, filed on Sep. 25, 2000.
(60) Provisional application No. 60/234,924, filed on Sep. 25, 2000.
(60) Provisional application No. 60/235,077, filed on Sep. 25, 2000.
(60) Provisional application No. 60/235,280, filed on Sep. 25, 2000.
(60) Provisional application No. 60/236,028, filed on Sep. 28, 2000.
(60) Provisional application No. 60/236,032, filed on Sep. 28, 2000.
(60) Provisional application No. 60/236,033, filed on Sep. 28, 2000.
(60) Provisional application No. 60/236,034, filed on Sep. 28, 2000.
(60) Provisional application No. 60/236,109, filed on Sep. 28, 2000.
(60) Provisional application No. 60/236,111, filed on Sep. 28, 2000.
(60) Provisional application No. 60/237,172, filed on Oct. 2, 2000.
(60) Provisional application No. 60/237,173, filed on Oct. 2, 2000.
(60) Provisional application No. 60/237,278, filed on Oct. 2, 2000.
(60) Provisional application No. 60/237,294, filed on Oct. 2, 2000.
(60) Provisional application No. 60/237,295, filed on Oct. 2, 2000.
(60) Provisional application No. 60/237,316, filed on Oct. 2, 2000.
(60) Provisional application No. 60/237,598, filed on Oct. 3, 2000.
(60) Provisional application No. 60/237,604, filed on Oct. 3, 2000.
(60) Provisional application No. 60/237,606, filed on Oct. 3, 2000.
(60) Provisional application No. 60/237,608, filed on Oct. 3, 2000.
(60) Provisional application No. 60/237,425, filed on Oct. 3, 2000.

(30) Foreign Application Priority Data
May 30, 2001 (WO) PCT/US01/10838

(51) Int. Cl. C12Q 1/68

(52) U.S. Cl. 435/6

(57) ABSTRACT

Processes for assaying potential antitumor agents based on their modulation of the expression of specified genes, or sets, of suspected cancer cell genes are disclosed, along with methods for diagnosing cancerous, or potentially cancerous, conditions as a result of the expression, or patterns of expression, of such genes, or sets of genes. Also disclosed are methods for determining functionally related genes, or gene sets, as well as methods for treating cancer based on targeting expression products of such genes, or gene sets, and determining genes involved in the cancerous process.

[0001] This application is a Continuation-in-Part of U.S. application Ser. No. 09/873,367, filed 5 Jun. 2001, which claimed priority of U.S. Provisional Application 60/209,473, filed 5 Jun. 2000; 60/209,531, filed 5 Jun. 2000; 60/236,842, filed 29 Sep. 2000; 60/236,891, filed 29 Sep. 2000; 60/244,867, filed 1 Nov. 2000; and 60/245,084, filed 1 Nov. 2000,
[0002] and of U.S. application Ser. No. 09/954,531, filed 18 Sep. 2001, which claimed priority of 60/233,133, filed 18 Sep. 2000; 60/234,009, filed 20 Sep. 2000; 60/234,034, filed 20 Sep. 2000; 60/234,509, filed 22 Sep. 2000; 60/234,567, filed 22 Sep. 2000;
[0003] and of U.S. application Ser. No. 09/954,456, filed 18 Sep. 2001, which claimed priority of U.S. Provisional Application 60/233,617, filed 18 Sep. 2000; 60/234,052, filed 20 Sep. 2000; 60/234,923, filed 25 Sep. 2000; 60/235,134, filed 25 Sep. 2000; 60/235,637, filed 26 Sep. 2000; 60/235,638, filed 26 Sep. 2000; 60/235,711, filed 27 Sep. 2000; 60/235,720, filed 27 Sep. 2000; 60/235,840, filed 27 Sep. 2000; 60/235,863, filed 27 Sep. 2000;
[0004] and of U.S. application Ser. No. 09/962,436, filed 25 Sep. 2001, which claimed priority of U.S. Provisional Application 60/235,082, filed 25 Sep. 2000, and 60/234,924, filed 25 Sep. 2000;
[0005] and of U.S. application Ser. No. 09/962,832, filed 25 Sep. 2001, which claimed priority of U.S. Provisional Application 60/235,077, filed 25 Sep. 2000; 60/235,280, filed 25 Sep. 2000;
[0006] and of U.S. application Ser. No. 09/964,824, filed 27 Sep. 2001, which claimed priority of U.S. Provisional Application 60/236,028, filed 28 Sep. 2000; 60/236,032, filed 28 Sep. 2000; 60/236,033, filed 28 Sep. 2000;
[0007] and of U.S. application Ser. No. 09/967,768, filed 28 Sep. 2001, which claimed priority of U.S. Provisional Application 60/236,034, filed 28 Sep. 2000; 60/236,109, filed 28 Sep. 2000; 60/236,111, filed 28 Sep. 2000;
[0008] and of U.S. application Ser. No. 09/968,007, filed 2 Oct. 2001, which claimed priority of U.S. Provisional Application 60/237,172, filed 2 Oct. 2000; 60/237,173, filed 2 Oct. 2000; 60/237,278, filed 2 Oct. 2000; 60/237,294, filed 2 Oct. 2000; 60/237,295, filed 2 Oct. 2000; 60/237,316, filed 2 Oct. 2000;
[0009] and of U.S. application Ser. No. 09/969,347, filed 2 Oct. 2001, which claimed priority of U.S. Provisional Application 60/237,598, filed 3 Oct. 2000 and 60/237,604, filed 3 Oct. 2000,
[0010] and of U.S. application Ser. No. 09/969,708, filed 3 Oct. 2001, which claimed priority of U.S. Provisional Application 60/237,606, filed 3 Oct. 2000, 60/237,608, filed 3 Oct. 2000, and 60/237,425, filed 3 Oct. 2000
[0011] the disclosures of all of which, including all sequence listings and drawings contained therein, are hereby incorporated by reference in their entirety.

### FIELD OF THE INVENTION

[0012] The present invention relates to methods of assaying potential anti-tumor agents based on their modulation of the expression of specified sets of genes and methods for diagnosing cancerous, or potentially cancerous, conditions as a result of the patterns of expression of such gene sets.

### BACKGROUND OF THE INVENTION

[0013] Screening assays for novel drugs are based on the response of model cell based systems in vitro to treatment with specific compounds. Various measures of cellular response have been utilized, including the release of cytokines, alterations in cell surface markers, activation of specific enzymes, as well as alterations in ion flux and/or pH. Some such screens rely on specific genes, such as oncogenes (or gene mutations).

### BRIEF SUMMARY OF THE INVENTION

[0014] In accordance with the present invention, there are provided characteristic sets of gene sequences whose expression, or non-expression, or change in expression, either an increase or decrease thereof, are indicative of the cancerous or non-cancerous status of a given cell. More particularly, such genes whose expression is changed in cancerous, as compared to non-cancerous cells, from a specific tissue (in particular, any of those disclosed herein) are genes that include one of the nucleotide sequences of SEQ ID NO: 1-8447, or sequences that are substantially identical to said sequences.

[0015] Such a change in expression may be an increase or a decrease in expression or activity of the gene or gene sequences disclosed herein.

[0016] It is another object of the present invention to provide methods of using such characteristic, or signature, gene sets as a basis for assaying the potential ability of selected chemical agents to modulate upward or downward the expression of said characteristic, or signature, gene sets.

[0017] It is a further object of the present invention to provide methods of detecting the expression, or non-expression, or amount of expression, of said characteristic, or signature, gene sets, or portions thereof, as a means of determining the cancerous, or non-cancerous, status (or potential cancerous status) of selected cells as grown in culture or as maintained in situ.

[0018] It is a still further object of the present invention to provide methods for treating cancerous conditions utilizing selected chemical agents as determined from their ability to modulate (i.e., increase or decrease) the selected characteristic, or signature, gene sets as disclosed herein, where said genes include, or comprise, one of the sequences of SEQ ID NO: 1-8447, or sequences substantially identical to said sequences, or characteristic portions of said sequences.

[0019] In another aspect, the present invention relates to a process for identifying an agent that modulates the activity of a cancer-related gene comprising:
[0020] (a) contacting a compound with a cell containing a gene corresponding to (such as a gene that encodes an RNA at least 90% identical to the RNA encoded by or complementary to) a polynucleotide comprising, or having, a sequence selected from the group consisting of the gene sequences of SEQ ID NO: 1-8447 and thereby identifying said gene as being a cancer initiating or facilitating gene. Said genes may, for example, be oncogenes, cancer facilitating or promoting genes, or cancer suppressor genes. Said agents may increase or decrease gene expression.

[0021] The present invention also relates to a process for identifying an anti-neoplastic agent comprising contacting a cell exhibiting neoplastic activity with a compound first identified as a cancer-related gene modulator using an assay process as disclosed herein for determining gene modulating activity and detecting a decrease in said neoplastic activity after said contacting compared to when said contacting does not occur.

[0022] In a further aspect, the present invention relates to a process for identifying an anti-neoplastic or anti-tumor agent comprising administering to an animal exhibiting a cancerous condition an effective amount of an agent first identified according to a process as disclosed herein and detecting a decrease in said cancerous condition thereby identifying such an agent, said decrease including the death of the cancerous cell or cells.

[0023] The present invention also relates to a process for determining the cancerous status of a cell, comprising determining the level of expression in said cell of at least one gene that corresponds to a polynucleotide comprising, or having, a sequence selected from the group consisting of SEQ ID NO: 1-8447 wherein an elevated expression relative to a known non-cancerous cell or a reduced expression relative to a known cancerous cell indicates a cancerous state or potentially cancerous state. Such sequence identity may include 100 percent identical as defined herein and any number of such genes may be used.

[0024] In an additional aspect, the present invention relates to a process for determining a cancer initiating or facilitating gene comprising contacting a cell expressing a test gene (i.e., a gene whose status as a cancer initiating or facilitating gene is to be determined) with an agent that decreases the expression of a gene that encodes an RNA at least 90%, preferably 95%, identical to an RNA encoded by (i.e., a gene corresponding to) a polynucleotide comprising, or having, a sequence selected from the group consisting of SEQ ID NO: 1-8447 and detecting a decrease in expression of said test gene compared to when said agent is not present, thereby identifying said test gene as being a cancer initiating or facilitating gene. Such genes may, of course, be oncogenes and said decrease in expression may be due to a decrease in copy number of said gene in said cell or a cell derived from said cell, such as where copy number is reduced in the cells formed by replication of such cells.

[0025] The present invention also relates to a process for determining a cancer suppressor gene comprising contacting a cell expressing a test gene (i.e., a gene whose status as a cancer suppressor gene is to be determined) with an agent that increases the expression of a gene that corresponds to (i.e., encodes an RNA at least 90%, preferably 95%, identical to an RNA encoded by or complementary to) a polynucleotide comprising a sequence selected from the group consisting of SEQ ID NO: 1-8447 and detecting an increase in expression of said test gene compared to when said agent is not present, thereby identifying said test gene as being a cancer suppressor gene. The sequence identity may include identical sequences, as defined herein, and such a process includes embodiments wherein the increase in expression is due to an increase in copy number of the gene in said cell or a cell derived from said cell, such as following cellular replication.

[0026] In another aspect, the present invention relates to a process for treating cancer comprising contacting a cancerous cell with an agent having activity against an expression product encoded by a gene corresponding to a polynucleotide comprising a nucleotide sequence selected from at least one of SEQ ID NO: 1-8447. Such a process includes an embodiment wherein the cancerous cell is contacted in vivo. The agent may include an antibody.

[0027] The present invention also relates to a method for producing a product comprising identifying an agent according to the assay processes of the invention wherein said product is the data collected with respect to said agent as a result of said process and wherein said data is sufficient to convey the chemical structure and/or properties of said agent.

[0028] The present invention further relates to a process for treating a cancerous condition in an animal afflicted therewith comprising administering to said animal a therapeutically effective amount of an agent first identified as having anti-neoplastic activity using one or more of the processes of the invention.

[0029] In a further aspect, the present invention relates to a process for protecting an animal against cancer comprising administering to an animal at risk of developing cancer a therapeutically effective amount of an agent first identified as having anti-neoplastic activity using one or more of the processes disclosed herein.

### SEQUENCE LISTING ON CD-ROM ONLY

[0030] The sequences disclosed herein as SEQ ID NO: 1-8447 in the sequence listing are contained on compact disc (CD-ROM) only, which accompanies this application and the contents of said CD-ROMs are hereby incorporated by reference in their entirety.

### DETAILED SUMMARY OF THE INVENTION

[0031] The present invention relates to methods of assaying for potential antitumor agents based on their modulation of the expression of specified sets of genes and methods for diagnosing cancerous, or potentially cancerous, conditions as a result of the patterns of expression of such gene sets and for determining cancer-inducing or regulating genes, and gene sets, based on common expression or regulation of such genes, or gene sets.

[0032] In accordance with the present invention, model cellular systems using cell lines, primary cells, or tissue samples are maintained in growth medium and may be treated with compounds that may be at a single concentration or at a range of concentrations. At specific times after treatment, cellular RNAs are isolated from the treated cells, primary cells or tumors, which RNAs are indicative of expression of selected genes. The cellular RNA is then divided and subjected to analysis that detects the presence and/or quantity of specific RNA transcripts, which transcripts may then be amplified for detection purposes using standard methodologies, such as, for example, reverse transcriptase polymerase chain reaction (RT-PCR), etc. The presence or absence, or levels, of specific RNA transcripts are determined from these measurements and a metric derived for the type and degree of response of the sample to the treated compound compared to control samples.

[0033] In any of the methods of the invention, the cancer is one or more of colon cancer, lung cancer, ovarian cancer, pancreatic cancer, thyroid cancer, stomach cancer, prostate cancer, kidney cancer, esophageal cancer and/or breast cancer.

[0034] Also in accordance with the present invention, there are disclosed herein characteristic, or signature, sets of genes and gene sequences whose expression is, or can be, as a result of the methods of the present invention, linked to, or used to characterize, the cancerous, or non-cancerous, status of the cells, or tissues, to be tested. Thus, the methods of the present invention identify novel anti-neoplastic agents based on their alteration of expression of small sets of characteristic, or indicator, or signature genes in specific model systems. The methods of the invention may therefore be used with a variety of cell lines or with primary samples from tumors maintained in vitro under suitable culture conditions for varying periods of time, or in situ in suitable animal models.

[0035] More particularly, certain genes have been identified that are expressed at levels in cancer cells that are different than the expression levels in non-cancer cells. In one instance, the identified genes are expressed at higher levels in cancer cells than in normal cells. In another instance, the identified genes are expressed at lower levels in cancer cells as compared to normal cells.

[0036] In accordance with the foregoing, the present invention relates to a process for determining the cancerous status of a cell, comprising determining the level of expression in said cell of at least one gene that corresponds to (i.e., encodes an RNA at least 95% identical to the RNA encoded by or complementary to) a polynucleotide comprising a sequence selected from the group consisting of SEQ ID NO: 1-8447 wherein an elevated expression relative to a known non-cancerous cell or a reduced expression relative to a known non-cancerous cell indicates a cancerous state or potentially cancerous state. Such sequence identity may include 100 percent identical as defined herein and any number of such genes may be used.

[0037] Thus, the present invention also relates to a process for identifying an anti-neoplastic agent comprising contacting a cell exhibiting neoplastic activity with a compound first identified as a cancer-related gene modulator using an assay process as disclosed herein for determining gene modulating activity and detecting a decrease in said neoplastic activity after said contacting compared to when said contacting does not occur (i.e., comparing expression when said agent is present versus when said agent is not present).

[0038] In preferred embodiments of the present invention, such cancer is pancreatic cancer, such as a carcinoma, preferably adenocarcinoma.

[0039] In a further aspect, the present invention relates to a process for identifying an anti-neoplastic agent comprising administering to an animal exhibiting a cancerous condition an effective amount of an agent first identified as having such activity using a process as disclosed herein and detecting a decrease in said cancerous condition thereby identifying such an agent.

[0040] It should be kept in mind that the anti-tumor or anti-neoplastic agents identified by the processes of the invention include both novel agents whose structure and anti-tumor activity were not previously known prior to identification of their activity by the processes herein as well as non-novel agents, whose structure was known but whose therapeutic value as anti-tumor agents was not appreciated prior to identification by the assay processes of the invention.

[0041] In accordance with the foregoing, the present invention relates to a process for screening for an anti-neoplastic agent comprising the steps of:
[0042] (a) contacting a compound with a cell containing a polynucleotide comprising a nucleotide sequence selected from the group consisting of SEQ ID NO: 1-8447, or a sequence at least 90%, preferably at least 95%, identical thereto, under conditions wherein said polynucleotide is being expressed, and
[0043] (b) determining a change in expression of at least one of said polynucleotides,
[0044] wherein a change in expression is indicative of anti-neoplastic activity.

[0045] In particular embodiments, such change in expression may be an increase or a decrease in expression or activity. Of course, decreased expression of cancer initiating or facilitating genes is highly desirable, as is an increased expression of cancer suppressor genes.

[0046] More particularly, the present invention relates to a process for screening for an anti-neoplastic agent comprising the steps of:
[0047] (a) exposing a known cancerous cell to a chemical agent to be tested for antineoplastic activity;
[0048] (b) allowing said chemical agent to modulate the activity of one or more genes present in said cell wherein said genes include or comprise one of the sequences selected from the group consisting of the sequences of SEQ ID NO: 1-8447, sequences substantially identical to said sequences, or the complements of any of the foregoing;
[0049] (c) determining the expression of one or more genes of step (b);
[0050] (d) comparing the expression of said genes in the presence or absence of exposure to said chemical agent;
[0051] wherein a difference in expression is indicative of the ability of anti-neoplastic activity.

[0052] Thus, in one aspect, the present invention relates to a process for identifying an agent, such as an organic compound, that modulates the activity of a cancer-related gene, comprising:
[0053] (a) contacting a compound with a cell containing a gene that encodes an RNA at least 90%, preferably at least 95%, identical to the RNA encoded by (i.e., a gene that corresponds to) a polynucleotide comprising, or having, a sequence selected from the group consisting of SEQ ID NO: 1-8447 and under conditions promoting the expression of said gene; and
[0054] (b) detecting a difference in expression of said gene relative to when said compound is not present
[0055] thereby identifying an agent that modulates the activity of a cancer-related gene.

[0056] Such sequence identity includes embodiments wherein the RNAs are at least 97 or 98% identical in sequence as well as cases where the sequence is the same, thus where a gene encodes an RNA with the same nucleotide sequence as an RNA encoded by one of the sequences of SEQ ID NO: 1-8447.

[0057] In one embodiment of such processes, the sequence is selected from SEQ ID NO: 1-8447, and said difference in expression when said agent is present is a decrease in expression. Here, the gene used encodes an RNA like that encoded by (or at least 90% identical to) one of the sequences found to be expressed at an elevated level in cancer cells. In another such embodiment, the sequence is selected from SEQ ID NO: 1-8447 and said difference in expression is an increase in expression. The latter sequences encode RNAs found to be expressed at higher levels in normal cells, as opposed to cancer cells.

[0058] In specific embodiments of the present invention, said chemical agent to be tested modulates the expression of more than one said gene, especially where it modulates at least two said genes, more especially where at least 3, or at least 5 of said genes, or even 10 or more of said genes in said signature set, are modulated. In a preferred embodiment, this may include more than 10 (such as 20, 50 or even 100) or even all of said genes are modulated.

[0059] In one embodiment of the present invention, said gene modulation is downward modulation, so that, as a result of exposure to the chemical agent to be tested, one or more genes of the cancerous cell will be expressed at a lower level (or not expressed at all) when exposed to (i.e., contacted with) the agent as compared to the expression when not exposed to the agent (i.e., when said agent is not present).

[0060] In a preferred embodiment a selected set of said genes are expressed in the reference cell but not expressed in the cell to be tested as a result of the contacting or exposure of the test cell with the chemical agent. Thus, where said chemical agent causes the gene, or genes, of the tested cell to be expressed at a lower level than the same genes of the reference cell, this is indicative of downward modulation and indicates that the chemical agent to be tested has anti-neoplastic activity (or activity in reducing expression of such cancer-related genes).

[0061] In a separate embodiment, exposure of said cells to be tested to the chemical agent, especially one suspected of having anti-neoplastic activity, may result in upward modulation of said genes of the cell to be tested. Such upward modulation is interpreted as meaning that said genes are expressed where previously not expressed, or else are expressed in greater quantities, or at higher levels, when exposed to the agent as compared to non-exposure to the agent. Such upward modulation may be taken as indicative of anti-neoplastic activity by the tested chemical agent(s) of the gene, or genes, so modulated, resulting in lower neoplastic activity on the part of such cells, such as where increased expression of the gene, or genes, results in decreased growth and/or increased differentiation of said cells away from the cancerous state.

[0062] The genes useful in the assay processes include as a part thereof at least one of the sequences selected from the group consisting of the sequences of SEQ ID NO: 1-8447, or sequences substantially identical thereto. Such sequences also include sequences complementary to any of the sequences disclosed herein.

[0063] The genes identified by the present disclosure are considered “cancer-related” genes, as this term is used herein, and include genes expressed at higher levels (due, for example, to elevated rates of expression, elevated extent of expression or increased copy number) in cancer cells relative to expression of these genes in normal (i.e., non-cancerous) cells where said cancerous state or status of test cells or tissues has been determined by methods known in the art, such as by reverse transcriptase polymerase chain reaction (RT-PCR) as described in the Example below. In specific embodiments, this relates to the genes whose sequences correspond to the sequences of SEQ ID NO: 1-8447. Also specifically contemplated are genes whose expression is higher in normal as opposed to known cancer cells (as determined by other means, such as uncontrolled growth, change in antigenic surface proteins, genetic mutation, and the like) such that the decreased expression in cancer cells may be indicative of, or contributory to, the realization of the cancerous state. In specific embodiments thereof, this relates to the genes whose sequences correspond to the sequences of SEQ ID NO: 1-8447 disclosed herein. As used herein, the term “correspond” means that the gene has the indicated nucleotide sequence or that it encodes substantially the same RNA as would be encoded by the indicated sequence, the term “substantially” meaning about at least 90% identical as defined elsewhere herein and includes splice variants thereof.

[0064] The sequences disclosed herein may be genomic in nature and thus represent the sequence of an actual gene, such as a human gene, or may be a cDNA sequence derived from a messenger RNA (mRNA) and thus represent contiguous exonic sequences derived from a corresponding genomic sequence or they may be wholly synthetic in origin for purposes of tecting. As described in the Example, the expression of these cancer-related genes is determined from the relative expression levels of the RNA complement of a cancerous cell relative to a normal (i.e., non-cancerous) cell. Because of the processing that may take place in transforming the initial RNA transcript into the final mRNA, the sequences disclosed herein may represent less than the full genomic sequence. They may also represent sequences derived from ribosomal and transfer RNAs. Consequently, the genes present in the cell (and representing the genomic sequences) and the sequences disclosed herein, which are mostly cDNA sequences, may be identical or may be such that the cDNAs contain less than the full genomic sequence. Such genes and cDNA sequences are still considered corresponding sequences because they both encode similar RNA sequences. Thus, by way of non-limiting example only, a gene that encodes an RNA transcript, which is then processed into a shorter mRNA, is deemed to encode both such RNAs and therefore encodes an RNA complementary to (using the usual Watson-Crick complementarity rules), or that would otherwise be encoded by, a cDNA (for example, a sequence as disclosed herein). Thus, the sequences disclosed herein correspond to genes contained in the cancerous or normal cells used to determine relative levels of expression because they represent the same sequences or are complementary to RNAs encoded by these genes. Such genes also include different alleles and splice variants that may occur in the cells used in the processes of the invention.

[0065] The genes of the invention “correspond to” a polynucleotide having a sequence of SEQ ID NO: 1-8447 if the gene encodes an RNA (processed or unprocessed, including naturally occurring splice variants and alleles) that is at least 90% identical, preferably at least 95% identical, most preferably at least 98% identical to, and especially identical to, an RNA that would be encoded by, or be complementary to, such as by hybridization with, a polynucleotide having the indicated sequence. In addition, genes including sequences at least 90% identical to a sequence selected from SEQ ID NO: 1-8447, preferably at least about 95% identical to such a sequence, more preferably at least about 98% identical to such sequence and most preferably comprising such sequence are specifically contemplated by all of the processes of the present invention as being genes that correspond to these sequences. In addition, sequences encoding the same proteins as any of these sequences, regardless of the percent identity of such sequences, are also specifically contemplated by any of the methods of the present invention that rely on any or all of said sequences, regardless of how they are otherwise described or limited. Thus, any such sequences are available for use in carrying out any of the methods disclosed according to the invention. Such sequences also include any open reading frames, as defined herein, present within any of the sequences of SEQ ID NO: 1-8447.

[0066] Further in accordance with the present invention, the term “percent identity” or “percent identical,” when referring to a sequence, means that a sequence is compared to a claimed or described sequence after alignment of the sequence to be compared (the “Compared Sequence”) with the described or claimed sequence (the “Reference Sequence”). The Percent Identity is then determined according to the following formula:
Percent Identity=100 [1−(C/R)]
wherein C is the number of differences between the Reference Sequence and the Compared Sequence over the length of alignment between the Reference Sequence and the Compared Sequence wherein (i) each base or amino acid in the Reference Sequence that does not have a corresponding aligned base or amino acid in the Compared Sequence and (ii) each gap in the Reference Sequence and (iii) each aligned base or amino acid in the Reference Sequence that is different from an aligned base or amino acid in the Compared Sequence, constitutes a difference; and R is the number of bases or amino acids in the Reference Sequence over the length of the alignment with the Compared Sequence with any gap created in the Reference Sequence also being counted as a base or amino acid.

[0068] If an alignment exists between the Compared Sequence and the Reference Sequence for which the percent identity as calculated above is about equal to or greater than a specified minimum Percent Identity then the Compared Sequence has the specified minimum percent identity to the Reference Sequence even though alignments may exist in which the hereinabove calculated Percent Identity is less than the specified Percent Identity.

[0069] As used herein, the terms “portion,” “segment,” and “fragment,” when used in relation to polypeptides, refer to a continuous sequence of residues, such as amino acid residues, which sequence forms a subset of a larger sequence. For example, if a polypeptide were subjected to treatment with any of the common endopeptidases, such as trypsin or chymotrypsin, the oligopeptides resulting from such treatment would represent portions, segments or fragments of the starting polypeptide. When used in relation to a polynucleotides, such terms refer to the products produced by treatment of said polynucleotides with any of the common endonucleases, or any stretch of polynucleotides that could be synthetically synthesized.

[0070] As used herein and except as noted otherwise, all terms are defined as given below.

[0071] In accordance with the present invention, the term “DNA segment” or “DNA sequence” refers to a DNA polymer, in the form of a separate fragment or as a component of a larger DNA construct, which has been derived from DNA isolated at least once in substantially pure form, i.e., free of contaminating endogenous materials and in a quantity or concentration enabling identification, manipulation, and recovery of the segment and its component nucleotide sequences by standard biochemical methods, for example, using a cloning vector. Such segments are provided in the form of an open reading frame uninterrupted by internal nontranslated sequences, or introns, which are typically present in eukaryotic genes. Sequences of non-translated DNA may be present downstream from the open reading frame, where the same do not interfere with manipulation or expression of the coding regions.

[0072] The term “coding region” refers to that portion of a gene which either naturally or normally codes for the expression product of that gene in its natural genomic environment, i.e., the region coding in vivo for the native expression product of the gene. The coding region can be from a normal, mutated or altered gene, or can even be from a DNA sequence, or gene, wholly synthesized in the laboratory using methods well known to those of skill in the art of DNA synthesis.

[0073] In accordance with the present invention, the term “nucleotide sequence” refers to a heteropolymer of deoxyribonucleotides. Generally, DNA segments encoding the proteins provided by this invention are assembled from cDNA fragments and short oligonucleotide linkers, or from a series of oligonucleotides, to provide a synthetic gene which is capable of being expressed in a recombinant transcriptional unit comprising regulatory elements derived from a microbial or viral operon.

[0074] The term “expression product” means that polypeptide or protein that is the natural translation product of the gene and any nucleic acid sequence coding equivalents resulting from genetic code degeneracy and thus coding for the same amino acid(s).

[0075] The term “fragment,” when referring to a coding sequence, means a portion of DNA comprising less than the complete coding region whose expression product retains essentially the same biological function or activity as the expression product of the complete coding region.

[0076] The term “primer” means a short nucleic acid sequence that is paired with one strand of DNA and provides a free 3′-OH end at which a DNA polymerase starts synthesis of a deoxyribonucleotide chain.

[0077] The term “promoter” means a region of DNA involved in binding of RNA polymerase to initiate transcription. The term “enhancer” refers to a region of DNA that, when present and active, has the effect of increasing expression of a different DNA sequence that is being expressed, thereby increasing the amount of expression product formed from said different DNA sequence.

[0078] The term “open reading frame (ORF)” means a series of triplets coding for amino acids without any termination codons and is a sequence (potentially) translatable into protein.

[0079] As used herein, reference to a DNA sequence includes both single stranded and double stranded DNA. Thus, the specific sequence, unless the context indicates otherwise, refers to the single strand DNA of such sequence, the duplex of such sequence with its complement (double stranded DNA) and the complement of such sequence.

[0080] In carrying out the assays of the invention, relative antineoplastic activity may be ascertained by the extent to which a given chemical agent modulates the expression of genes present in a cancerous cell. Thus, a first chemical agent that modulates the expression of a gene associated with the cancerous state (i.e., a gene that includes one of the sequences disclosed herein and present in cancerous cells) to a larger degree than a second chemical agent tested by the assays of the invention is thereby deemed to have higher, or more desirable, or more advantageous, anti-neoplastic activity than said second chemical agent. Alternatively, where first and second chemical agents modulate expression of more than one of said genes, but where the second modulates expression of, for example, five said genes, whereas the first modulates expression of only three of said genes, especially where the three form a subset of the five, then the second chemical agent is deemed a more potent anti-neoplastic agent than the first. Such anti-neoplastic activity, as determined using the assays of the present invention, may necessarily include combinations of the foregoing possibilities, which are in no way to be considered limiting.

[0081] In utilizing these gene sequences for the assays according to the invention, the genes whose activity is to be determined with and without the presence of the compound to be evaluated for anti-tumor activity may be any one, or several, or any combination of the gene sequences disclosed herein as SEQ ID NO: 1-8447. However, how the gene sequences are employed in such assays depends on the pattern of gene expression disclosed for the signature sets. For example, a sequence that is expressed in cancerous cells but not in normal cells will identify a potential anticancer agent by that agent's ability to decrease expression of the sequence, or sequences, in tumor cells. Conversely, a sequence, or sequences, expressed in normal but not tumor cells will identify a potential antitumor agent by its ability to increase expression of those genes in the tumor cells. The same relationship holds true where the sequences are expressed in both cancer and normal cells but are expressed at a higher level in one than in the other, and vice versa. Based on the expression patterns disclosed for the gene sequences and signature sets disclosed herein, it should be readily apparent to those skilled in the art how to conduct assays for potential antitumor agents using the signature gene sets. The same holds true where the sequences, or signature gene sets, are utilized to determine the cancerous state of a cell or use of an agent to treat a cancerous condition.

[0082] Thus, in one aspect, the present invention relates to a process for screening for an anti-neoplastic agent comprising the steps of (a) exposing cells to a chemical agent to be tested for antineoplastic activity, and (b) determining a change in expression of at least one gene of a signature gene set, or a sequence that is at least 90%, preferably at least 95% identical thereto, wherein a change in expression is indicative of anti-neoplastic activity. Such change in expression is intended to mean a change that includes any activity of the gene, and may be an increase or decrease thereof. In addition, such change in activity may be a change in expression or other activity of at least 1 such gene, such as 5 or 10, or more of the genes of a signature set, even as many as half of such genes or even of all of the genes of a particular gene set.

[0083] The gene expression to be measured is commonly assayed using RNA expression as an indicator. Thus, the greater the level of RNA (such as a messenger RNA) detected the higher the level of expression of the corresponding gene. Thus, gene expression, either absolute or relative, such as where the expression of several different genes are being quantitatively evaluated and compared, for example, where chemical agents modulate the expression of more than one gene, such as a set of 3, 4, 5, or more genes, is determined by the relative expression of the RNAs encoded by such genes.

[0084] RNA may be isolated from samples in a variety of ways, including lysis and denaturation with a phenolic solution containing a chaotropic agent (e.g., triazol) followed by isopropanol precipitation, ethanol wash, and resuspension in aqueous solution; or lysis and denaturation followed by isolation on solid support, such as a Qiagen resin and reconstitution in aqueous solution; or lysis and denaturation in non-phenolic, aqueous solutions followed by enzymatic conversion of RNA to DNA template copies.

[0085] Normally, prior to applying the processes of the invention, steady state RNA expression levels for the genes, and sets of genes, disclosed herein will have been obtained. It is the steady state level of such expression that is affected by potential anti-neoplastic agents as determined herein. Such steady state levels of expression are easily determined by any methods that are sensitive, specific and accurate. Such methods include, but are in no way limited to, real time quantitative polymerase chain reaction (PCR), for example, using a Perkin-Elmer 7700 sequence detection system with gene specific primer probe combinations as designed using any of several commercially available software packages, such as Primer Express software, solid support based hybridization array technology using appropriate internal controls for quantitation, including filter, bead, or microchip based arrays, solid support based hybridization arrays using, for example, chemiluminescent, fluorescent, or electrochemical reaction based detection systems.

[0086] In one embodiment of the present invention, a set of genes useful in evaluating, or screening, or otherwise assaying, one or more chemical agents for anti-neoplastic activity in the assays disclosed herein will have already been shown to have differences in the ratios of steady state RNA levels in cancer cells, or tissues, relative to normal, or non-tumorous cells or tissues, or will have exhibited differences in the expression ratios in tumor samples compared to normal samples between genes in a given subset of the set of genes disclosed herein, or will have gene expression that has increased from undetectable levels to detectable levels, or vice versa, as the case may be, especially where sensitive detection methods are employed, or conversely will have decreased from detectable levels to undetectable levels with such procedures, especially sensitive procedures.

[0087] The genes, and gene sequences, useful in practicing the methods of the present invention are genes that are found to be selectively expressed in, or not expressed in, cancer cells as compared to non-cancer cells, or in which expression is down-regulated or up-regulated, as the case may be, in cancerous cells as compared to non-cancerous cells. Thus, these may include genes, or sets of genes, expressed in cancer cells but absent from, or inactive in, non-cancerous cells, or may include genes, or sets of genes, expressed in non-cancerous cells, but not expressed in cancer cells. Alternatively, the genes useful in practicing the present invention may be more expressed, or less expressed, in a cancerous cell relative to a non-cancerous cell. Such genes are generally those comprising the sequences of SEQ ID NO: 1-8447, with some exhibiting elevated expression in a cancerous versus non-cancerous cell and other exhibiting elevated expression in a non-cancerous versus a cancerous cell.

[0088] In accordance with the foregoing, the present invention further relates to a process for determining the cancerous status of a test cell, comprising determining expression in said test cell of at least one gene that corresponds to, or includes, one of the nucleotide sequences selected from the sequences of SEQ ID NO: 1-8447, or a nucleotide sequence that is at least 90%, preferably at least 95%, identical thereto, and then comparing said expression to expression of said at least one gene in at least one cell known to be non-cancerous whereby a difference in said expression indicates that said cell is cancerous.

[0089] In a particular embodiment, the present invention is directed to a process for determining the cancerous status of a cell to be tested, comprising determining the presence in said cell of at least one gene that includes one of the nucleotide sequences selected from the sequences of SEQ ID NO: 1-8447, including sequences having substantial identity homologous to said sequences, or characteristic fragments thereof, or the complements of any of the foregoing and then comparing the pattern of said gene presence and/or absence with that found for a cell known, or believed, to be non-cancerous, or normal, at least with respect to its genetic complement.

[0090] With respect to genes that correspond to at least one of the sequences of SEQ ID NO: 1-8447, up regulation of expression in cancer cells (as compared to non-cancer cells, which may lack said genes, or said gene expression, altogether) is indicative of a cancerous, or potentially cancerous, condition.

[0091] In specific embodiments, the present invention relates to embodiments wherein the genetic pattern is the modulation of expression of more than one gene, preferably 3, 4, or 5 genes, and even includes patterns where there is a modulation of expression of as many as 10, or more, genes. Thus, where a genetic pattern is the modulation of expression of 5 genes in a cancerous cell as compared to a non-cancerous cell from the same tissue type, such as a cancerous cell, versus a non-cancerous colon cell, such a pattern indicates a likelihood that such genes (i.e., the modulation of expression of those 5 genes) is an indicator of cancerous status and thereby provides a means of diagnosing a cancerous, or potentially cancerous, status. The absence of a specific set of genes from cancerous cells where said genes are present in otherwise normal cells, especially those of a similar type, is also indicative of a correlation with the cancerous state and thus can likewise be used as a means of diagnosing the cancerous state in other cells suspected of being cancerous.

[0092] For example, by way of non-limiting example, with respect to colon, especially colon adenocarcinoma, this would include SEQ ID NO: 1-333 (expressed in normal colon cells but not in colon cancer cells), SEQ ID NO: 334-522 (expressed at elevated levels in colon adenocarcinoma but not expressed in normal colon cells), SEQ ID NO: 523-837 (expressed at reduced levels, more than 2.09 fold, in colon adenocarcinoma but not in normal colon cells) and SEQ ID NO: 838-1067 (expressed at elevated (at least 2.1 fold) levels in colon adenocarcinoma but not elevated in normal colon cells). Thus, for colon the above groupings of sequences represent four signature gene sets for colon. For example, SEQ ID NO: 334-522 would represent a signature set or signature gene set for colon. The same is true for each of the organs and tissues listed below with their respective signature sets or signature gene sets.

[0093] In the same way as for colon, other gene sequences are indicative of the cancerous or normal state of other organs and tissues. Thus, as disclosed herein, these would include SEQ ID NO: 1068-2459 for breast, wherein SEQ ID NO: 1068-1255 represent genes expressed in infiltrating ductal carcinoma of the breast that are not expressed at detectable levels in normal breast, wherein SEQ ID NO: 1256-1459 represent genes expressed in breast carcinoma that are not expressed at detectable levels in normal breast, wherein SEQ ID NO: 1459-1664 represent genes expressed in infiltrating lobular carcinoma of the breast that are not expressed at detectable levels in normal breast, wherein SEQ ID NO: 1665-2067 represent genes expressed in normal breast that are absent or not expressed in infiltrating ductal carcinoma of the breast, and wherein SEQ ID NO: 2068-2459 represent genes expressed in normal breast cells but absent or not expressed in infiltrating lobular carcinoma of the breast that are not expressed at detectable levels in normal breast.

[0094] This further includes SEQ ID NO: 2460-3027 for stomach, wherein SEQ ID NO: 2460-2773 represent genes or gene sequences expressed in stomach cancer that are not expressed at detectable levels in normal stomach cells, and wherein SEQ ID NO: 2774-3027 represent genes or gene sequences expressed in normal stomach cells cancer that are not expressed at detectable levels in stomach cancer cells.

[0095] This further includes SEQ ID NO:3028-5303 for lung, wherein SEQ ID NO: 3028-3119 represent genes or gene sequences expressed in lung adenocarcinoma that are not expressed at appreciable levels in normal lung cells, wherein SEQ ID NO: 3120-3322 represent genes or gene sequences expressed in normal lung cells that are not expressed at appreciable levels in lung adenocarcinoma, wherein SEQ ID NO: 3323-3570 represent genes or gene sequences expressed in non-cancerous lung tissue that are not expressed at appreciable levels in malignant lung samples, wherein SEQ ID NO: 3571-3777 represent genes or gene sequences expressed in malignant lung samples that are not expressed at appreciable levels in non-malignant lung cells, wherein SEQ ID NO: 3778-3836 represent genes or gene sequences expressed in both normal and malignant lung adenocarcinoma but are up-regulated by at least about 2 fold in lung adenocarcinoma, wherein SEQ ID NO: 3837-3980 represent genes or gene sequences expressed at appreciable levels in normal lung samples but are not typically expressed in lung squamous cell carcinoma, wherein SEQ ID NO: 3981-4215 represent genes or gene sequences expressed in normal lung tissue but not ordinarily expressed in neuroendocrine carcinoma of the lung, wherein SEQ ID NO: 42164634 represent genes or gene sequences expressed at appreciable levels in lung neuroendocrine carcinoma that are not expressed at detectable levels in normal lung, wherein SEQ ID NO: 4635-4877 represent genes or gene sequences expressed in lung squamous cell carcinoma that are not expressed at detectable levels in normal lung, and wherein SEQ ID NO: 4878-5303 represent genes or gene sequences expressed in normal lung and lung adenocarcinoma but are down-regulated or under-expressed in lung adenocarcinoma relative to normal lung tissues.

[0096] This further includes SEQ ID NO: 5304-5886 for thyroid, wherein SEQ ID NO: 5304-5408 represent genes or gene sequences expressed in thyroid papillary carcinoma that are not found in normal thyroid tissue, wherein SEQ ID NO: 5409-5602 represent genes or gene sequences expressed in normal thyroid cells that are not expressed in thyroid papillary carcinoma and wherein SEQ ID NO: 5603-5886 represent genes or gene sequences expressed at a level at least about a 5 fold higher level in thyroid papillary carcinoma relative to normal thyroid cells.

[0097] This further includes SEQ ID NO: 5887-6147 for esophagus, wherein SEQ ID NO: 5887-6015 represent genes or gene sequences expressed in esophagus adenocarcinoma but not in normal esophagus from the same patients and wherein SEQ ID NO: 6016-6147 represent genes or gene sequences expressed in normal esophagus but not in esophagus adenocarcinoma samples from the same patients.

[0098] This further includes SEQ ID NO: 6148-6472 for ovary, wherein SEQ ID NO: 6148-6371 represent genes or gene sequences expressed only in malignant ovarian carcinomas, wherein SEQ ID NO: 6372-6424 represent genes or gene sequences expressed only in normal ovarian tissues and wherein SEQ ID NO: 6425-6472 represent genes or gene sequences expressed only in metastatic ovarian cancer.

[0099] This further includes SEQ ID NO: 6473-7473 for kidney, wherein SEQ ID NO:6473-6615 represent genes or gene sequences expressed in normal kidney but not in clear cell carcinoma of the kidney, wherein SEQ ID NO: 6616-6685 represent genes or gene sequences expressed in clear cell carcinoma cells but not in normal kidney cells, wherein SEQ ID NO: 6686-6973 represent genes or gene sequences expressed in normal kidney cells but not in renal cell carcinoma of the kidney, wherein SEQ ID NO: 6974-7156 represent genes or gene sequences expressed in renal cell carcinoma but not in normal kidney, wherein SEQ ID NO: 7157-7229 represent genes or gene sequences expressed in normal kidney but not in Wilm's tumor cells, and wherein SEQ ID NO: 7230-7473 represent genes or gene sequences expressed in Wilm's tumor but not in normal kidney cells.

[0100] This further includes SEQ ID NO: 7474-8131 for prostate, wherein SEQ ID NO: 7475-7833 represent genes or gene sequences expressed in prostate adenocarcinoma but not appreciably expressed in normal prostate cells, wherein SEQ ID NO: 7834-8071 represent genes or gene sequences expressed in normal prostate cells but not expressed at appreciable levels in prostate adenocarcinoma and wherein SEQ ID NO: 8072-8131 represent genes or gene sequences for ribosomal proteins that are highly expressed in prostate adenocarcinoma but are not expressed at appreciable levels in normal prostate cells.

[0101] This further includes SEQ ID NO: 8132-8447 for pancreas, wherein SEQ ID NO: 8132-8358 represent genes or gene sequences expressed in normal pancreas but not in pancreas adenocarcinoma and wherein SEQ ID NO: 8359-8447 represent genes or gene sequences expressed in pancreas adenocarcinoma but not in normal pancreas.

[0102] The gene patterns indicative of a cancerous state need not be characteristic of every cell found to be cancerous. Thus, the methods disclosed herein are useful for detecting the presence of a cancerous condition within a tissue where less than all cells exhibit the complete pattern. For example, a set of selected genes, comprising sequences homologous under stringent conditions (i.e., at least 95% identical) to at least one of the sequences of SEQ ID NO: 1-8447 and wherein the signature set is comprised of genes expressed and/or up-regulated in cancer cells relative to normal cells, as disclosed above for the signature gene set (or sets) used for practicing the invention, may be found, using appropriate probes, either DNA or RNA, to be present in as little as 60% of cells derived from a sample of tumorous, or malignant, tissue while being absent from as much as 60% of cells derived from corresponding non-cancerous, or otherwise normal, tissue (and thus being present in as much as 40% of such normal tissue cells). In a preferred embodiment, such gene pattern is found to be present in at least 70% of cells drawn from a cancerous tissue and absent from at least 70% of a corresponding normal, non-cancerous, tissue sample. In an especially preferred embodiment, such gene pattern is found to be present in at least 80% of cells drawn from a cancerous tissue and absent from at least 80% of a corresponding normal, non-cancerous, tissue sample. In a most preferred embodiment, such gene pattern is found to be present in at least 90% of cells drawn from a cancerous tissue and absent from at least 90% of a corresponding normal, non-cancerous, tissue sample. In an additional embodiment, such gene pattern is found to be present in at least 100% of cells drawn from a cancerous tissue and absent from at least 100% of a corresponding normal, non-cancerous, tissue sample, although the latter embodiment may represent a rare occurrence.

[0103] Conversely, where the signature set (including sequences from SEQ ID NO: 1-8447) is expressed or up-regulated in normal cells versus cancerous cells, as disclosed herein, expression in the normal cells but not in suspected cancerous cells may confirm a cancerous state in a suspected cancerous sample where the cells would show lower than expected expression of genes corresponding to one of these sequences.

[0104] Although the presence or absence of expression of one or more selected gene sequences may be indicative of a cancerous status for a given cell, the mere presence or absence of such a gene pattern may not alone be sufficient to achieve a malignant condition and thus the level of expression of such gene pattern may also be a significant factor in determining the attainment of a cancerous state. While a pattern of gene expression may be present in both cancerous and non-cancerous cells, the relative level of expression, as determined by any of the methods disclosed herein, all of which are well known in the art, may differ between the cancerous versus the non-cancerous cells. Thus, it becomes essential to also determine the level of expression of one or more of said genes as a separate means of diagnosing the presence of a cancerous status for a given cell, groups of cells, or tissues, either in culture or in situ.

[0105] In accordance with the invention disclosed herein, a determination of an anticancer agent using the signature gene sets described herein is based on patterns of modulation of such genes so that increase or decrease in expression of a gene due to the presence of such a potential agent may or may not be meaningful. Thus, the more genes in a gene set as disclosed herein that are affected by said agent the more likely said agent is an effective therapeutic agent.

[0106] In addition, different agents may have different abilities to affect the genes of a signature gene set. For example, if a potential therapeutic agent, say, agent A, causes a gene or group of genes of a characteristic or signature gene set, or even all of the genes of said gene set, to exhibit decreased expression, such as where a lower amount of mRNA is expressed from said gene(s), or less protein is produced from said mRNA, but a second potential agent, say, agent B, while modulating the activity of the same or related genes causes said expression to be reduced to half, such as where only half as much mRNA is transcribed or only half as much protein is translated from said mRNA as for agent A, then agent B is considered to have twice as much therapeutic potential as agent A.

[0107] Such modulation or change of activity as determined using the assays disclosed herein may include either an increase or a decrease in activity of said genes or gene sequences. Thus, where a gene is expressed in cancer cells but not in normal cells, or is up-regulated in cancer cells relative to normal cells, of the same organ or tissue type, an agent that down-regulates said gene or genes, or gene sequences, or prevents their expression entirely, is considered a potential antitumor agent within the present disclosure. Conversely, where an agent causes expression of a gene or genes, or gene sequences, expressed in normal cells but not in cancer cells, or where said agent up-regulates a gene or genes, or gene sequences, that are expressed in normal cells but not in cancer cells, or are up-regulated in normal cells but not in cancer cells, of the same organ or tissue type, said agent is considered to be a potential antitumor agent within the present disclosure.

[0108] The present invention also relates to a process that comprises a method for producing a product comprising identifying an agent according to one of the disclosed processes for identifying such an agent (such as the therapeutic agents identified according to the assay procedures disclosed herein) wherein said product is the data collected with respect to said agent as a result of said identification process, or assay, and wherein said data is sufficient to convey the chemical character and/or structure and/or properties of said agent. For example, the present invention specifically contemplates a situation whereby a user of an assay of the invention may use the assay to screen for compounds having the desired enzyme modulating activity and, having identified the compound, then conveys that information (i.e., information as to structure, dosage, etc) to another user who then utilizes the information to reproduce the agent and administer it for therapeutic or research purposes according to the invention. For example, the user of the assay (user 1) may screen a number of test compounds without knowing the structure or identity of the compounds (such as where a number of code numbers are used the first user is simply given samples labeled with said code numbers) and, after performing the screening process, using one or more assay processes of the present invention, then imparts to a second user (user 2), verbally or in writing or some equivalent fashion, sufficient information to identify the compounds having a particular modulating activity (for example, the code number with the corresponding results). This transmission of information from user 1 to user 2 is specifically contemplated by the present invention.

[0109] In accordance with the foregoing, the present invention further relates to a process for determining the cancerous status of a cell to be tested, comprising determining the level of expression in said cell of at least one gene that includes one of the nucleotide sequences selected from the sequences of SEQ ID NO: 1-8447, including sequences substantially identical to said sequences, or characteristic fragments thereof, or the complements of any of the foregoing and then comparing said expression to that of a cell known to be non-cancerous whereby the difference in said expression indicates that said cell to be tested is cancerous.

[0110] In specific embodiments of the present invention, said expression is determined for more than one of said genes, such as 2, 3, 4, 5, or more such genes, considered as a set, and even as many as a set of 10 such genes. A set of genes, for example, 5 such genes, may be found to be expressed at certain levels in cancer cells but are found to be expressed at lower levels (or not expressed at all) in non-cancerous, or normal, cells. Conversely, a set of, for example, 5 such genes may be found to be expressed in normal (i.e., non-cancerous) cells but expressed at lower levels (or not expressed at all) in cancer cells. Thus, by determining the set or pattern of genes expressed in cancer cells but expressed at lower levels (or not at all) in non-cancer, or vice versa, a method is achieved for diagnosing cancerous conditions wherein said genes are selected from those that include one of the sequences, or fragments of sequences, including complementary sequences, selected from SEQ ID NO: 1-8447. Using the methods disclosed herein, a diverse number of cancers can be readily detected using the methods of the present invention.

[0111] In accordance with the invention, although gene expression for a gene that includes as a portion thereof one of the nucleotide sequences of SEQ ID NO: 1-8447, is preferably determined by use of a probe that is a fragment of such nucleotide sequence, it is to be understood that the probe may be formed from a different portion of the gene. Thus, for each gene of the signature set of the present invention, the nucleotide sequence disclosed with respect to a specific sequence ID number may be only a portion of the nucleotide sequence that encodes expression of the gene. As a result, expression of the gene may be determined by use of a nucleotide probe that hybridizes to messenger RNA (mRNA) transcribed from a portion of the gene other than the specific nucleotide sequence disclosed with reference to a sequence ID number as recited herein.

[0112] The present invention further relates to a process for determining a cancer initiating, facilitating or suppressing gene comprising the steps of contacting a cell with a cancer modulating agent and determining a change in expression of a gene selected from the group consisting of the gene sequences of SEQ ID NO: 1-8447 and thereby identifying said gene as being a cancer initiating or facilitating gene.

[0113] Thus, some or all of the genes within the signature gene sets disclosed herein as SEQ ID NO: 1-8447 are found to play a direct role in the initiation or progression of cancer or even other diseases and disease processes. Because changes in expression of these genes (either up-regulation or down-regulation) are linked to the disease state (i.e. cancer), the change in expression may contribute to the initiation or progression of the disease. For example, if a gene that is up-regulated is an oncogene, or if a gene that is down-regulated is a tumor suppressor, such a gene provides for a means of screening for small molecule therapeutics beyond screens based upon expression output alone. For example, genes that display up-regulation in cancer and whose elevated expression contributes to initiation or progression of disease represent targets in screens for small molecules that inhibit or block their function. Examples include, but are not be limited to, kinase inhibition, cellular proliferation, substrate analogs that block the active site of protein targets, etc. Similarly, genes that display down-regulation in cancer and whose absence results in initiation or progression of disease are valuable therapeutics for gene therapy.

[0114] In accordance therewith, the present invention relates to a process for determining a cancer initiating or facilitating gene comprising contacting a cell expressing a test gene (one whose status as a cancer initiating or facilitating gene is to be determined) with an agent that decreases the expression of a gene corresponding to a polynucleotide having a sequence selected from the group consisting of SEQ ID NO: 1-8447, and detecting a decrease in expression of said test gene compared to when said agent is not present, thereby identifying said test gene as being a cancer initiating or facilitating gene. Such genes may, of course, be oncogenes and said decrease in expression may be due to a decrease in copy number of said gene in said cell or a cell derived from said cell, such as where copy number is reduced following cellular replication.

[0115] The present invention also relates to a process for determining a cancer suppressor gene comprising contacting a cell expressing a test gene (one whose status as a cancer suppressor gene is to be determined) with an agent that increases the expression of a gene that encodes an RNA at least 95% identical to an RNA encoded by (i.e., corresponds to) a polynucleotide having a sequence selected from the group consisting of SEQ ID NO: 1-8447 and detecting an increase in expression of said test gene compared to when said agent is not present, thereby identifying said test gene as being a cancer suppressor gene. The sequence identity may include identical sequences, as defined herein, and such a process includes embodiments wherein the increase in expression is due to an increase in copy number of the gene in said cell or a cell derived from said cell, such as by cellular replication. Such increase in expression may also include the induction of expression in a cell, especially a cancer cell, where such expression is not detectable in the absence of the agent.

[0116] It should be noted that there are a variety of different contexts in which genes have been evaluated as being involved in the cancerous process. Thus, some genes may be oncogenes and encode proteins that are directly involved in the cancerous process and thereby promote the occurrence of cancer in an animal. In addition, other genes may serve to suppress the cancerous state in a given cell or cell type and thereby work against a cancerous condition forming in an animal. Other genes may simply be involved either directly or indirectly in the cancerous process or condition and may serve in an ancillary capacity with respect to the cancerous state. All such types of genes are deemed with those to be determined in accordance with the invention as disclosed herein. Thus, the gene determined by said process of the invention may be an oncogene, or the gene determined by said process may be a cancer facilitating gene, the latter including a gene that directly or indirectly affects the cancerous process, either in the promotion of a cancerous condition or in facilitating the progress of cancerous growth or otherwise modulating the growth of cancer cells, either in vivo or ex vivo. In addition, the gene determined by said process may be a cancer suppressor gene, which gene works either directly or indirectly to suppress the initiation or progress of a cancerous condition. Such genes may work indirectly where their expression alters the activity of some other gene or gene expression product that is itself directly involved in initiating or facilitating the progress of a cancerous condition. For example, a gene that encodes a polypeptide, either wild or mutant in type, which polypeptide acts to suppress of tumor suppressor gene, or its expression product, will thereby act indirectly to promote tumor growth.

[0117] In accordance with the foregoing, the process of the present invention includes cancer modulating agents that are themselves either polypeptides, or small chemical entities, that affect the cancerous process, including initiation, suppression or facilitation of tumor growth, either in vivo or ex vivo. Said cancer modulating agent may have the effect of increasing gene expression or said cancer modulating agent may have the effect of decreasing gene expression as such terms have been described herein.

[0118] In keeping with the present disclosure, the present invention also relates to a process for treating cancer comprising contacting a cancerous cell with an agent having activity against an expression product encoded by a gene sequence selected from the group consisting of SEQ ID NO: 1-8447. More specifically, the present invention relates to a process for treating cancer comprising contacting a cancerous cell with an agent having activity against an expression product encoded by a gene sequence selected from the group consisting of SEQ ID NO: 1-8447. Such a process includes an embodiment wherein the cancerous cell is contacted in vivo. Such treatment includes treatment of a patient, such as a human being. The agent may include an antibody that reacts with a polypeptide encoded by such a gene.

[0119] Thus, some or all of the genes within these signature gene sets represent individual targets for therapeutic intervention, based at least in part on their pattern(s) of expression. For example, genes within the signature gene sets that encode cell surface molecules and are up-regulated in cancer as compared to normal cells. The proteins encoded by such genes, due to their elevated expression in cancer cells, represent highly useful therapeutic targets for “targeted therapies” utilizing such affinity structures as, for example, antibodies coupled to some cytotoxic agent. In such methodology, it is advantageous that nothing need be known about the endogenous ligands or binding partners for such cell surface molecules. Rather, an antibody or equivalent molecule that can specifically recognize the cell surface molecule (which could include an artificial peptide, a surrogate ligand, and the like) that is coupled to some agent that can induce cell death or a block in cell cycling offers therapeutic promise against these proteins. Thus, such approaches include the use of so-called suicide “bullets” against intracellular proteins.

[0120] The process of the present invention includes embodiments of the above-recited process wherein said cancer cell is contacted in vivo as well as ex vivo, preferably wherein said agent comprises a portion, or is part of an overall molecular structure, having affinity for said expression product. In one such embodiment, said portion having affinity for said expression product is an antibody, especially where said expression product is a polypeptide or oligopeptide or comprises an oligopeptide portion, or comprises a polypeptide.

[0121] Such an agent can therefore be a single molecular structure, comprising both affinity portion and anti-cancer activity portions, wherein said portions are derived from separate molecules, or molecular structures, possessing such activity when separated and wherein such agent has been formed by combining said portions into one larger molecular structure, such as where said portions are combined into the form of an adduct. Said anti-cancer and affinity portions may be joined covalently, such as in the form of a single polypeptide, or polypeptide-like, structure or may be joined non-covalently, such as by hydrophobic or electrostatic interactions, such structures having been formed by means well known in the chemical arts. Alternatively, the anti-cancer and affinity portions may be formed from separate domains of a single molecule that exhibits, as part of the same chemical structure, more than one activity wherein one of the activities is against cancer cells, or tumor formation or growth, and the other activity is affinity for an expression product produced by expression of genes related to the cancerous process or condition.

[0122] In one embodiment of the present invention, a chemical agent, such as a protein or other polypeptide, is joined to an agent, such as an antibody, having affinity for an expression product of a cancerous cell, such as a polypeptide or protein encoded by a gene related to the cancerous process, especially a gene sequence corresponding to one selected from the group consisting of the sequences of SEQ ID NO: 1-8447. In a specific embodiment, said expression product is a cell surface receptor, such as a protein or glycoprotein or lipoprotein, present on the surface of a cancer cell, such as where it is part of the plasma membrane of said cancer cell, and acts as a therapeutic target for the affinity portion of said anticancer agent and where, after binding of the affinity portion of such agent to the expression product, the anti-cancer portion of said agent acts against said expression product so as to neutralize its effects in initiating, facilitating or promoting tumor formation and/or growth. In a separate embodiment of the present invention, binding of the agent to said expression product may, without more, have the effect of deterring cancer promotion, facilitation or growth, especially where the presence of said expression product is related, either intimately or only in an ancillary manner, to the development and growth of a tumor. Thus, where the presence of said expression product is essential to tumor initiation and/or growth, binding of said agent to said expression product will have the effect of negating said tumor promoting activity. In one such embodiment, said agent is an apoptosis-inducing agent that induces cell suicide, thereby killing the cancer cell and halting tumor growth.

[0123] In alternative embodiments of the foregoing, the present invention relates to a process for treating a cancerous condition in an animal afflicted therewith comprising administering to said animal a therapeutically effective amount of an agent first identified as having anti-neoplastic activity using an assay process as disclosed herein according to the present invention, such as a cancer-related gene modulator as identified according to the processes of the invention. Such processes also include the ability to protect against development of a cancerous state by using agents identified by the assay processes of the invention. Thus, the present invention specifically contemplates a process for protecting an animal against cancer comprising administering to an animal at risk of developing cancer a therapeutically effective amount of an agent first identified as having anti-neoplastic activity using one or more of the assay processes disclosed herein for identifying such agents.

[0124] The processes of the present invention take advantage of the correlation of changes in mRNA expression profiles of these signature gene sets with potential (depending on the form of cancer) changes in DNA copy number of the chromosomal regions wherein these genes are located. Of course, the precise nature of the change in mRNA expression (e.g. a signature set of genes that are up-regulated at the transcriptional level) may also indicate a change in the DNA copy number for the genomic regions in which these genes are located (e.g. an amplification of the genomic DNA region that contains the involved gene or genes).

[0125] Many cancers contain chromosomal rearrangements, which typically represent translocations, amplifications, or deletions of specific regions of genomic DNA. A recurrent chromosomal rearrangement that is associated with a specific stage and type of cancer always affects a gene (or possibly genes) that play a direct and critical role in the initiation or progression of the disease. Many of the known oncogenes or tumor suppressor genes that play direct roles in cancer have either been initially identified based upon their positional cloning from a recurrent chromosomal rearrangement or have been demonstrated to fall within a rearrangement subsequent to their cloning by other methods. In all cases, such genes display amplification at both the level of DNA copy number and at the level of transcriptional expression at the mRNA level.

[0126] At least some of the genes that are contained within signature gene sets disclosed herein (SEQ ID NO: 1-8447) display changes in their mRNA expression profiles (depending on the precise reading frame involved) within cancer samples due, in part, to changes in their DNA copy number as a result of specific chromosomal rearrangements in those cancer cells. The utilities that follow from this are (i) that the genes contained within these signature gene sets offer a time saving shortcut to the identification of novel chromosomal rearrangements, amplifications, or deletions that are associated with cancer, and/or (ii) represent key genes affected by such chromosomal rearrangements, amplifications, or deletions and, therefore, play a key role in the initiation or progression of the disease. Genes within the signature sets that identify changes in the DNA copy number (based upon their changes in expression at the mRNA level) afford an entry point into other forms of diagnostic assay for the initiation, staging, or progression of cancer to be conducted in tissue samples at the DNA level (e.g. if gene X identifies a novel chromosomal amplification associated with cancer, then that specific chromosomal region defined by gene X would serve as the basis for a diagnostic assay for cancer, where genomic DNA is extracted from tissue samples and evaluated for the presence of the specific amplification), and also the rapid positional cloning of genes that play vital and direct roles in the initiation or progression of cancer.

[0127] In one embodiment of the present invention, said change in expression may be determined by determining a change in gene copy number, wherein said change in copy number is an increase in copy number or wherein said change in copy number is a decrease in copy number. For example, copy number of a sequence expressed, or over-expressed, in a cancerous cell may be decreased due to the presence of an anti-neoplastic agent as identified according to the assays procedures of the present invention.

[0128] A change in gene copy number may be determined by determining a change in expression of messenger RNA encoded by a particular gene sequence, especially where said sequence is one selected from the group consisting of the sequences of SEQ ID NO: 1-8447, some being expressed in cancer cells but not expressed at detectable levels in normal cells and others being expressed in normal cells but not at detectable levels in cancer cells. Also in accordance with the present invention, said gene may be a cancer initiating gene, a cancer facilitating gene, or a cancer suppressing gene. In carrying out the methods of the present invention, a cancer facilitating gene is a gene that, while not directly initiating or suppressing tumor formation or growth, said gene acts, such as through the actions of its expression product, to direct, enhance, or otherwise facilitate the progress of the cancerous condition, including where such gene acts against genes, or gene expression products, that would otherwise have the effect of decreasing tumor formation and/or growth.

[0129] The present invention also relates to a process for treating cancer comprising inserting into a cancerous cell a gene construct comprising an anti-cancer gene operably linked to a promoter or enhancer element such that expression of said anti-cancer gene causes suppression of said cancer and wherein said promoter or enhancer element is a promoter or enhancer element modulating a gene, or genes, corresponding to a sequence, or sequences, selected from the group consisting of the sequences of SEQ ID NO: 1-8447.

[0130] The signature sets or signature gene sets disclosed herein are useful in identifying genetic regulatory elements within the promoters of the genes contained within the signature sets that are specific to normal tissue and/or the corresponding cancer. Each signature set is a collection of genes that share a gross common pattern of transcriptional regulation in cancer vs. normal (e.g. a signature set of genes that are transcriptionally up-regulated in cancer).

[0131] In one such embodiment, analyzing and comparing the DNA sequences of the promoter regions of all the genes contained within the signature set serves to identify conserved stretches or motifs of sequences within subsets of genes that represent cis-acting elements that specifically drive a form of gene expression (e.g. increased transcriptional expression in cancer). The identification of such cis-acting regulatory elements is then available for use in driving the cancer-specific expression of suicide genes or toxins via genetic therapy using technology already well known in the art.

[0132] In separate embodiments, said anti-cancer gene is a cancer suppressor gene or encodes a polypeptide having anticancer activity, especially where said polypeptide has apoptotic activity.

[0133] In additional embodiments, such insertion of the gene construct into a cancerous cell is accomplished in vivo, for example using a viral or plasmid vector. Such methods can also be applied to in vitro uses. The methods of the present invention are readily applicable to different forms of gene therapy, either where cells are genetically modified ex vivo and then administered to a host or where the gene modification is conducted in vivo using any of a number of suitable methods involving vectors especially suitable to such therapies, such as the use of special viral vectors, including adeno-associated viruses and adenoviruses, as well as retroviruses and specially constructed plasmids to accomplish such therapies. The use of these and other vectors is well known to those skilled in the art and need not be described further.

[0134] The present method also relates to a process for determining functionally related genes comprising contacting one or more gene sequences selected from the group consisting of the sequences of SEQ ID NO: 1-8447 with an agent that modulates expression of more than one gene in such group and thereby determining a subset of genes of said group.

[0135] In accordance with the present invention, said functionally related genes are genes modulating the same metabolic pathway or said genes are genes encoding functionally related polypeptides. In one such embodiment, said genes are genes whose expression is modulated by the same transcriptional activator or enhancer sequence, especially where said transcriptional activator or enhancer increases, or otherwise modulates, the activity of a gene sequence selected from the group consisting of SEQ ID NO: 1-8447. In specific embodiments, the sequences may be subsets of these.

[0136] Thus, the signature gene set disclosed herein also find use as the basis for small molecule assays for therapeutics based upon changes in expression profile. In one such embodiment, small molecule screens serve to identify changes in expression of genes within a signature set and thereby provide a tool for the identification of specific functional pathways and a means of assigning defined functions to novel genes.

[0137] In accordance with the foregoing, monitoring the transcriptional expression of the genes contained within the signature sets disclosed herein forms the basis of an assay for small molecule therapeutics. For example, in situations where a signature set of genes that are transcriptionally up-regulated in cancer cells compared to normal cells, such screens facilitate the identification of small molecules that down-regulate the expression of the genes of the signature set within cancer cells. While such therapeutics make a cancer cell “look” more normal, based upon the expression of the genes within the signature set, what actually happens when such screens are put into practice is that all genes within the signature sets do not respond identically to each small molecule within a chemical compound library. If an average signature set contains 200 different genes, for example, and the expression of all 200 genes is monitored in response to a library of some 50,000 chemical compounds, and subsets of genes within the signature set consistently change their patterns of expression in response to particular chemicals (e.g., 10 of the genes always change expression in a coordinated way, such as down-regulation of one gene within the group of 10) then it always causes the down-regulation of the other 9 specific genes as well.

[0138] Such subsets or subgroups of genes within each signature set that change their expression in a coordinated way in response to chemical compounds represent genes that are located within a common metabolic, signaling, physiological, or functional pathway so that by analyzing and identifying such subsets one can (a) assign known genes and novel genes to specific pathways and (b) identify specific functions and functional roles for novel genes that are grouped into pathways with genes for which their functions are already characterized or described. For example, one might identify a subgroup of 10 genes within a signature set (5 known genes & 5 novel genes) that change expression in a coordinated fashion and for which the 5 known genes are involved in apoptosis thereby implicating the other 5 novel genes as playing a role in apoptotic cellular processes. Therefore, the processes disclosed according to the present invention at once provide a novel means of assigning function to genes, i.e. a novel method of functional genomics, and a means for identifying chemical compounds that have potential therapeutic effects on specific cellular pathways. Such chemical compounds may have therapeutic relevance to a variety of diseases outside of cancer as well, in cases where such diseases are known or are demonstrated to involve the specific cellular pathway that is affected.

[0139] It should be cautioned that, in carrying out the procedures of the present invention as disclosed herein, any reference to particular buffers, media, reagents, cells, culture conditions and the like are not intended to be limiting, but are to be read so as to include all related materials that one of ordinary skill in the art would recognize as being of interest or value in the particular context in which that discussion is presented. For example, it is often possible to substitute one buffer system or culture medium for another and still achieve similar, if not identical, results. Those of skill in the art will have sufficient knowledge of such systems and methodologies so as to be able, without undue experimentation, to make substitutions that will optimally serve their purposes in using the methods and procedures disclosed herein.

[0140] The present invention will now be further described by way of the following non-limiting example but it should be kept clearly in mind that other and different embodiments of the methods disclosed according to the present invention will no doubt suggest themselves to those of skill in the relevant art.

### EXAMPLE

[0141] SW480 cells are grown to a density of 10⁵ cells/cm² in Leibovitz's L-15 medium supplemented with 2 mM L-glutamine (90%) and 10% fetal bovine serum. The cells are collected after treatment with 0.25% trypsin, 0.02% EDTA at 37° C. for 2 to 5 minutes. The trypsinized cells are then diluted with 30 ml growth medium and plated at a density of 50,000 cells per well in a 96 well plate (200 μl/well). The following day, cells are treated with either compound buffer alone, or compound buffer containing a chemical agent to be tested, for 24 hours. The medium is then removed, the cells lysed and the RNA recovered using the RNAeasy reagents and protocol obtained from Qiagen. RNA is quantitated and 10 ng of sample in 1 μl are added to 24 μl of Taqman reaction mix containing 1×PCR buffer, RNAsin, reverse transcriptase, nucleoside triphosphates, amplitaq gold, Tween 20, glycerol, bovine serum albumin (BSA) and specific PCR primers and probes for a reference gene (18S RNA) and a test gene (Gene X). Reverse transcription is then carried out at 48° C. for 30 minutes. The sample is then applied to a Perkin Elmer 7700 sequence detector and heat denatured for 10 minutes at 95° C. Amplification is performed through 40 cycles using 15 seconds annealing at 60° C. followed by a 60 second extension at 72° C. and 30 second denaturation at 95° C. Data files are then captured and the data analyzed with the appropriate baseline windows and thresholds.

[0142] The quantitative difference between the target and reference genes is then calculated and a relative expression value determined for all of the samples used. This procedure is then repeated for each of the target genes in a given signature, or characteristic, set and the relative expression ratios for each pair of genes is determined (i.e., a ratio of expression is determined for each target gene versus each of the other genes for which expression is measured, where each gene's absolute expression is determined relative to the reference gene for each compound, or chemical agent, to be screened). The samples are then scored and ranked according to the degree of alteration of the expression profile in the treated samples relative to the control. The overall expression of the set of genes relative to the controls, as modulated by one chemical agent relative to another, is also ascertained. Chemical agents having the most effect on a given gene, or set of genes, are considered the most anti-neoplastic.

[0143] In carrying out the methods of the invention, it is to be expected that not all cells of a given sample of suspected cancerous cells will express all, or even most, of these genes but that a substantial expression thereof in a substantial number of such cells is sufficient to warrant a determination of a cancerous, or potentially cancerous, condition. The sequences disclosed herein are represented by SEQ ID NO: 1 to 8447 although different genes more or less relevant to different organs and tissues and some may be up-regulated in cancer and not normal cells while others are up-regulated in normal cells but not cancerous cells. The sequences presented herein may be genomic, synthetic or cDNA sequences and may also be represented as RNA sequences. The sequences of the sequence listing herein are mostly cDNA sequences but can be used to locate genomic sequences.

The application's sequence listing, which the Patent Office published only in electronic form, follows.

SEQUENCE LISTING (8447 sequences)

SEQ ID NO: 1 - DNA, 447 bp, Homo sapiens
  misc_feature (1)..(447): n=a,t,g or c
tttttttgcttttccccctctatctcaaatgcctcactccgggacaaatattccttcttagcactacttaacataaataaatcaattttggctcttcaaagtcattctgcatataatcctgtcacccttataggagcctactgtacattctcattgtgaaccaatctctctttacattcacaatattatgatgcnttcacngggaggggctcttccccaaggtaaatgtagctcatttaanaaactacagtggggctctgtgatctatgtacacatgtatgtcacatatttgaccatttaaaaaacacagaaacccttgagactttctgtaaaattttgggatcataaaatatattaaaaagcagaccaaaggcaaggcattctggttctctgacgtcccccggtctagtttaattcattttcccagtattggggaaaagcagggca

SEQ ID NO: 2 - DNA, 405 bp, Homo sapiens
  misc_feature (1)..(405): n=a,t,g or c
aaatatggaacgcttcacgaatttgcgtgtcatccttgcgcaggggccatgctaatcttctctgtatcgttccaattttagtatatgtgctgccgaagcgagcaccgtgcttagttattctaagtgagggccccaggatccacctgcctaggcttcccaaagtgctgggattacaggcgtgacccaccgcgcccagccaagttttggtttcctcaactggaggtaatattacatattttacttatacatatgcataagtaaacaaagagggttgttttgagggtcaaataaattgatggatgttaacgctctnctggtaaattataaagcactatacaaatacaaggcattattgttaataatagagcttaattacacctgtcctcatttgatctctcanagacc

SEQ ID NO: 3 - DNA, 364 bp, Homo sapiens
  misc_feature (1)..(364): n=a,t,g or c
gttttaaaacatttctttattagtatatagacagtaaagcatgaaatagatacaaacattacttataaaaatgttttgaaagaacatttgaaaaatagatgaatgtcttctagccagttaatagcagagaaagaatttagttttggtagctcataagtcagtaaccgtatgccatgtctccagaagtaaaatccgtctgttttccagaaaaatgtgatgtagngaattntcattttatgtgttattttgcactcattaatgtaaattttagatttaaaaaaatcaagtttatttgctttctaagaaaatggnctccttncccattcgccagtagnttaatatatgttctacggtgtgggtgtgt

SEQ ID NO: 4 - DNA, 158 bp, Homo sapiens
ttttttttttgcaagaaacacatggggatggttttatttttataattggttaaaaaagtttctcaaagtgaagtttaggagtgagttttagtgttttgtaatttgaagaaaagtgtcttaaaattcaaagataccaatggaaagataaaagtttgggg

SEQ ID NO: 5 - DNA, 271 bp, Homo sapiens
gatttttcaaaattaacttttttattaatttaaaaatccagaaatacagtgactacataaataagtaccataattaggtacatgtcctgtgagaacagtgaaagggtaatactgttatgttactcttacttgtttacatgagttaactagaaaatggctacaactgctaaatgatgcttatggtctttgttgttccaagtgtttatgatacaaataaatacacaagaagaaccacatccattcttctctactaactacaggcagcttgggg

SEQ ID NO: 6 - DNA, 486 bp, Homo sapiens
  misc_feature (1)..(486): n=a,t,g or c
ttccaagaagaacatttttctgtttattcttagaatgtgaattttttttttcaactcagggccaagtacaaacttttgatttttgaaattttttcaactcagggccaagtacaatcttttgatttaaaaattttttttcatgaacaaaccatcagtagttattaaggagcccaagaaataggagatgtgaaagcaggatttctttgtgtttcctttgaatgttgttattttgagtattatcattatcaggtagaggaagaaaggtaggctgggaagtaggtccttatgatatcttgactatggatcccagatttacatttcacctngtcacagagcacacataatttaagataaacatgtcaagaatgacataaaccagaggtaaacaccaaggagctttacatttggaaccngaaaataaaaattagaaaaattattaccccatattaataaccaaaaaattacttaaactcctaggnccccngg

SEQ ID NO: 7 - DNA, 502 bp, Homo sapiens
  misc_feature (1)..(502): n=a,t,g or c
cacatttttccatctaatttttatttggagaaaataatttcagtatgaaattattctaataaaattattctaacatacaattaggagataattattttattcatcacaaaatttactacttttacacttagagaccagtgaacgtatgtaccattaccttttgaaagacagaatgtctcctcatattgttttcttactttctagacataacaagcaccttgccatcacactgaaaagatcataaaatatatagtgttgacttaaaaatcagtatgatatctgagactggttttaataaaaggaagaatcattgaatttgagtactgaagttgaaaactagccatatttggttataaattcctcttaaaaaattagtagtttctactttggattnttccttcnggatggatttcaccccttaatttagaagtcnaaataccttcaaatttttccctccntaaaatngttaatttgccacacagactaggggaatangggaacg

SEQ ID NO: 8 - DNA, 590 bp, Homo sapiens
  misc_feature (1)..(590): n=a,t,g or c
atatgcttgcaggttatatcttagtgcaattcagtcccaaatactttaattttgaaaagaaaaaaaaacatacatttttgaatgtaaaatacccctacagatataaacaggggcgtttcccctcttaatactttggttttcaatacagtcagtggtatagcaaagactacacatacccaacttatatttaagttgcaagcacatgctgtataagctactttttttaaacagtccccttgcaaactctaccccccttaacatcacaatagtaaacaatttagtgcatcaatcgtttaaaaaatctacagctaaacagacctaactctttcaaatttatctataacattcctttatctgtagcatacattttaactgggctaacagattataaaaactagaattaaattatatactagaaacccagagcattccacatttgacaatgaccaaaagccaaaaaatataaaataaaaataaaacaaaccaaaaataatggggcgtttcccttttaaaaaataaattttagctgcntctcggnaatanccaatttaggncccaagtggggcgccatctattaaaggnacattagg

SEQ ID NO: 9 - DNA, 496 bp, Homo sapiens
  misc_feature (1)..(496): n=a,t,g or c
tttttttttttttttccagttctttcttttttattctgcagttttctatcagtgtcgggtcccccactccagccagtggtgtggggaagggaagacatctctagggacacgactacagaccaggcagtgagcctagcaaccatacatcgaaggtgtcgccagcctcagtgccggtggncgtctgcaccaggaatagctaaagccgacgacatctagccacctcgagcgccagggaagacgctccggtanaaaccgcggcctcaggcggactcccgctccagctccgcgctgctggtggcatttccggggacccaaagtgggtggccttcgtcttgcccccgcagtggcagcacacggtccacaggtacttgagcgtccgccagagcaagatgatgaagaggccccgaagaaagtcaccatggaaggaggccaggaaagcccaccaaatgcgttngncccggntgtcgaanggaacctccatggtcancgggatgat

SEQ ID NO: 10 - DNA, 449 bp, Homo sapiens
caaaaataatgcttaaaagagacttctagaaacagtgggactacatcaggaccagaagacagtgacacaaggactgcaaatgttaagactaggagtagcttttcacatggagcttttatgtagaggacgtctccttctgttgattcctacagccgagacaagatgtgatcacaggagactccaaaatctcaaactgggcttgagtaacaccctagataaacatcaggaaccccactgaggctgaagtactgaaactgtggcccatgtgaaaaagaggtgcaagtgccaaagattcatgcagagcctgctggaacagagggtggtggcggcgggttagtccacacttacacaccagcaggtatgctggggaaagggccccccaggtggagtgcctgacatagggctcgctccagaggcgtctgactcagaagctcctgagagaggtgtca

SEQ ID NO: 11 - DNA, 367 bp, Homo sapiens
tatagactcattttcaggttattaaatgtaagagaaacagatacccctcttttttaaagtaggtaaatcattgatgatttatattaccaatttttagaagtaattttctagtaagcttgtggcatcagaaaatactagaagatttttttagttaaattagttagaacatttatgaatgaatataataaatattttttcagaataaaatatggaccctttgtgtttactaatagataaagccagatagtaattttttgtttttaaggccacaaaatatggcctttgttaaagaacactaaagttagaaatctaaagttagagcaactttttaatggctatttcctattattgtaagtgttaaaacccc

SEQ ID NO: 12 - DNA, 650 bp, Homo sapiens
  misc_feature (1)..(650): n=a,t,g or c
tttttttttttcctttaaatccctaatgttcacaagtcatcatgtggaactaaaatcacacacaaaggcaaatcatgaggaaacgttaaatatttcaaaatgcccacgaggcgtgccagaaacagtgctgtatctatagcacagaatcgttggaggccaaagctaaagcagtaggggctactgcaacttctagctctttactgctgcttttttgtttgtttgatagagggggattcaggtgagggggttcggtctctcaggaagttaggccataatttctgcaggttcagtgattaacttggatccatcccatgctgtcttgaactgttcaggaatgggaaattctctataatcaccatcctgagggataagtatgttcatttcagatgacttggcgctcacgatctcacagtctaatgcatcttcactgaggtatatgtggcaaccttctgtcttattaatggaaattgttggcactctccccattacctggatttgaatgtcctgggagttgatcacttccacnatgcccaccacattggcnaacaccagccgagtttttacagtggccattatcctcgtgccgaatttggcccgaggccaattcctatngggcggattaatcgaaccagcaactgttccggngaatg

SEQ ID NO: 13 - DNA, 490 bp, Homo sapiens
cttgttccaatcgttcctcttctttacgcttggcttctaattcttcttcctcttcttcctcctcctcctcctcttcagggttttcttttacttctatatgaactgtgtttccttctactttttctgtctcctcatcactggccatagcttcccaatcatccaatccagcatcctcagtatcttcttcttcttctggttcaacaggaggtggtgtctcttccttttctggtactccttgttccataacttctacagcagcacataattccattgattcagacacttctttactttctagctgctgtggtatttttttcctctttttatcttcataaattggcctcttctttggcaaagagtcttttgatggcacttcaacaccctgagcttgtagcagtttaagagtagcttcggctctggctctggcttctctctgggatttagttaaaagtttccctctttttcaagcgttctttcttctttctcgtgg

SEQ ID NO: 14 - DNA, 429 bp, Homo sapiens
tgggggtgactgtcctggtgaggggagcctgtttcaggacttgaacacgtgcacggctcgcaccacatactgccggcagatgggacactcactcatgcgcttgccgacttggtgcaggtaaccatgtgcccacactccagtaggacacagtcgatgacggcatccatgcagatgcgacacaggctgtcgtcttcctcatcctgcagctgcagccgctcgccataggacttttggttttcttcattctctttgtataaccggtttactttctctaccagttcccatttttcacaacagccagaatagttgacaaaattccgagccagaatttccttcagctggcgcacgcttcattccttccacatcatcaaggcttgacaagtcagacagttgaagctctcactctctccttggagagcccggggttcc

SEQ ID NO: 15 - DNA, 384 bp, Homo sapiens
taaaatttgtaactcctttttttttaatttcacaaaagttttcacaaggacaacgttatagaagaaaacccccagcagtggctaggtcatgcagaaccattaattgtcataccttggcccattctattcatccttgttgcactttagagagagaagtaagctatgtgagttttacaatgcttttaaactgtcatatttcctgttgagcactttaactggcacattcttatagttataaatgttctgagggcgtaactttataacctcctttgcaaagaatgcatgaagagctcttcatgatccaatactaggggatacatatatatagttatatatatagttatatatatataattatatagttatatatatataattatatat

SEQ ID NO: 16 - DNA, 572 bp, Homo sapiens
ttttttgacattgttctactgttttattgactcgttgcatttacaagttttgctaatgatacacagtctacacttactaataaattatactcacagtgtttttagtgatgtgactttgtttcaatattttataataaaagattataggagtaattacagacaatgatagaaaagtttgaggcatcgtgacaaaatagtgcaaaagcctaagttatccaaaagatgtagtgatcataattataaagactgtgtagtgtccctgggaaatgcttacaatgagataccaagcagtcaaaacggaatctaaccacgcacctgtacagtagttacaaaggtattacaaagcttgtctctgcatgaacacagtaaagaagtcacacatacacaaacgactacaatggtgttctggtattgcgactgtttgttttttcttctttaaatattattttgctttattgttgtaatgttatttttgtaataaataaattcagagagaacatcctactattagacaaggaaaatgccagaaatctgagatattttccctcttatggccgtattatattggttac

SEQ ID NO: 17 - DNA, 431 bp, Homo sapiens
ttttatatttaaagtaggaacattttattgtaaataaattacacctctataatgtttgttttaaaaaatattagatacatcagctggaaatcacttggttttaacaaaaaattttctctgtaatcttatttattctagcacttttcttgtcttcaaaagcaatgcaaaacttcactgtagctaagcctatgttagactcttacaaattcctaaatagtagaattagttcaatgagtaattcttataaataattctagatttactttacctacatgaataactgatttgctacatagagccacattaatgcttagtataaatcatacaacatgatgaacatgctcacgtatatttaaatataaacatatttggaccttaaaaagtaagtacatcctaggagatgatcccattccgggagttagccaatggtc

SEQ ID NO: 18 - DNA, 379 bp, Homo sapiens
attactataccatttatttgatgaattaatcaatgttcaaatggaagaggttttgacaatgtcactatgtttgatgtttatacctgccctgaatgcttgctcagaagagaaacagatttcccagtattttttataacttactttcccattgtcttcaattaatttgctattatcccaagtagacagacaacttcagtagtagccatctccctacatttttagatcactgaaaaaaatggatgagcaacccatgaaaataactagcttactgaaatgcttgtcttttaaagaaaagttgggattatttaaaaaaaaaaatggcccaggaccagttagctaggagatctgggagagagaagtcattgccttggttctgaca

SEQ ID NO: 19 - DNA, 425 bp, Homo sapiens
gtaataatccttttacataaataccaaaaatcatggcataacaactccccaaaaaggaaaggtataaaagaaatgaatgaggagaaagctaataaagaaaagtaggcaagatgtctcagattctccctggggtagatcttctcagggcgataaagaaaacgtcttcccaaaaaacccctttagacagaatctgagatggcttaaaatagctgctccagggcaaagcaatgcctgcttaaccaggaataacatactacttctaagtcctgtatagaggtgctcctgcggcagaaccagctcgtctaccatctgactaggtaccacaagagtttttgcttttttattttaaagaaaaagatctgcccatcacctatatttttatttatctcatgggattttcgtattttcctgggaatgcaggcact

SEQ ID NO: 20 - DNA, 552 bp, Homo sapiens
  misc_feature (1)..(552): n=a,t,g or c
gagacagagtctaccctgtcacccaggctggatggagtgcagtggtgtgatctcggctcactgcaagctccgcctcctgggttcacacttttctcctgcctcagcctcctgagtagctgggactacaggcgcccgcaccacgcccagctaattttttttgtagttttagtagagtcggggtttcaccgtgttaaccaggatggtctcgatctcctgcccttgtgatccgcccgcctcggcctcccaaagtgctgggattacaggcgtgagtacccacgcccggccttcttgtgtcttctttactgtgactgggtcgtttttaagaaaggttatcagctttgtgtttggtttcccacagttgataaaaatctatcaaaaacattataatttgcaaggaaaaaggtttttcaatggctgcaggaaccagaaagaaatagcatttcttatctgtataaacacaaacatttaaagctagtcacaccgcagtaaaatccaatacagtatgcaaaagttctataaaaatgaacaagagatacacgtttactttcattn

SEQ ID NO: 21 - DNA, 365 bp, Homo sapiens
tttgtgactcaaagatgagatttttatttaaaaatcattcaaaggtgaaacacagcaacagcaatataatgaagtttaaagtccctgtcctcaatgaatgtacaatgcagttgggaacaaaaacaatgattattaaagtgctagttaagtcttatttttaaagagaccctatcttgtccaggatgcagtgctgtggctattcacagacgatcatatcacactccaccctcgaactcctgggctcaagctatcctaccacctcagcctcctgagtagctgggactgtacataggcatgcaccactgcacctggctcataagacttgataatttataaaataattctacagcctcttccttactctt

SEQ ID NO: 22 - DNA, 546 bp, Homo sapiens
  misc_feature (1)..(546): n=a,t,g or c
aatctccccctattgttttgccaacagtaatttaagtttgtgtggaacatccccgtagttgaagtgtaaacaatgtataggaaggaatatatgataagatgatgcatcacatatgcattacatgtaggaccttcacaacttcatgcactcagaaacatgcatgaagaggaggagaggacggcccagggtcaccatccaggtgccttgagaacagagaatgcagaagtggcactgttgaaatttagcatgggtgtattaacaaagaagctgacagcctggaaatatttacttctgtgggtactgttggtgaccccgagcgatgaaaatgaacattctgccactttccatcccggcggtgcacacacgagtctcttctgactgcattgtctttggcattccactgccatccatgtactgtgtgagcctaatatatgctatgcaggcggcatcatcccctaccagatgtacatgagggtttagaataatagtgtggattggtttattgcttttggacanagcattttcaaagtagaatcggtgaaaatc

SEQ ID NO: 23 - DNA, 272 bp, Homo sapiens
gaaacaatttttctgaaatttatttctaaaagtcagagacaaaactttagaagtgacacatttatactaagcatacatgcgtgacgaaaaaaataagcacagaatacaaaaatgaaatagtaaaattttaatacagtattctgaatacaagtagaataccactagataagaattgtatttacctaagaaatctatgatagtgtgggtggagataaaccagtttaggatagccacttcactattcacattttaatcagtgctgaccagaagct

SEQ ID NO: 24 - DNA, 350 bp, Homo sapiens
ttaactgacaatctgttttggttttttttttattgcaaattgttttatgactataactcagccatttgtgtgtggaatacacatgcgtaggggaagactatgaaactcacttgttactcaaacacacttgtttataaatacatatatacacacacacatatacatatccacacccaacttttttttttcccaaaattcaagtcaacaatttagtggcagagagatgctataaaaacattatttttagatgccacacaagtcatgagaaccattaattttatcatacaactgaagtacagccatcttgaattctacctggattaaagttgatcattttgttaccaatgcaa

SEQ ID NO: 25 - DNA, 393 bp, Homo sapiens
gtctaacatttatttttttctttttccccagaatcctgaaacacaatagtcttttagtagaagaggtttctgagttctttctaagcaactactctaaaaaatcagtagcttctaggtggaatcatacagtttccataaatggtcttattttccttttctggttgaaatttaacccaaagaactttaaggtctaatgtgatgcagtatttacatacaaaactcttaattcatcctgcaaaatggccaatatgagcagataaataggaaagctatgcatctaataaagcacagggccagtgctctataaagattattgagttgtaaacataagatatctattcaaaagagaccactgaaatggttggggccaggttaggccaaaacttaatgcat

SEQ ID NO: 26 - DNA, 362 bp, Homo sapiens
cttgaattaagcacagactcgtcagctcggttgctttatcatgaataatgtgtgtgaccttgcagttcttccacagttcagcaaacaagtgctagcttcactgaccaaaaattaaggaaggaaaacacagtttttaaaacgatccatcttttaacagccgaaaccgatgtgtctatggtgctgcaccttgctgttgtacttctgaaatcagacgtgtgtgaacgatcatttctgacttaaccgtgagatgctcacgagtacccttcctgttgttttgttagcattgaaatcgagactatttatttggaatatatacaacagtgtttttccactgtatttcatttgcaaaagttgagaactgc

SEQ ID NO: 27 - DNA, 411 bp, Homo sapiens
attaatatgaacatatgaacctttattaagtggctcacatttcagtataaatcacactaaaaagatatttaaaagctatttacactacagtgctgacacatttaaaatgaaaaaaaaggatataaataagctctatggaaaagctttaaattgttgaaaaagaattctggctcatattacaaaatatatatatatatttatatatatatatatatgtcaatgtcagctctattctaaaacctaaaattccaacgtaaatgatttttttttaaagactcctttatgtttaaacctgcaatgtttacagtgcatctggccctaagtgcttaatacttcacagttatggacaggcactgaggaatgttacaaagctacataaactatgttttgtaacagacataggagcaagtc

SEQ ID NO: 28 - DNA, 417 bp, Homo sapiens
caggaggaaaaaaattttaataacatatgtttgcacaggagtcccacaaaatatgagactccgagaagagtcagatgatggacactcatgcaccaccgtgagctatcgaaagaatgtgggcttagggcttctgcatggaggtggccacggaagtgtgaaagtgaaggcaagaagtgtgtcctgaataaagcttggctggttttcagacaaaaggtcttctgggtaataaatgttgtctggagcagccctcaggagaagaggtaagagcctgtatgggatggtgtcgctgccaacatccttccctgtgatcccacttactcttccctggctgatgagatacttggggttgtgattcatgatgattgaatttccttttgaggatttgtctttgggcagatgaaggaggctcagagaaaa

SEQ ID NO: 29 - DNA, 268 bp, Homo sapiens
aaaagaaaaatgttaagactttattcaagatgtgtatcaggcattataacaaaacagcagaacttcaacctttggaatactgtaattttacatccctttgatgcacagtccagtatactattttattacagatcattctatagggactacagacatgaactagaggaaatgtgcacagtcaaaatccagaatatcagctctgggagtgtacactgttagaggatgaagcacatcctttgccatttcaaatactgtgccaggtggagga

SEQ ID NO: 30 - DNA, 241 bp, Homo sapiens
catgggaaaacttttcttcattctcaacatgcttaagctatttttacaaatcagttaaactatgtctacacaaagcttagaagcactttatttgggagcaatcagtatttttgtcaaaacttttggacaggtctttatttgtgttttggaaggttcaacacgaattgtgcaaaatctctggatatattagtttagcgatatggttgttgaagaaaataatatgttttaagcattcacaacg

SEQ ID NO: 31 - DNA, 361 bp, Homo sapiens
ctcccaaaataggaaattttgtattcctatagtcaaaacaataaacaatttttgaaattaaaaaagttgagaatcttgaaattcatttttttcagtagaataaaacaataagcagcatgaaaacgtaaagtgctacataaaagccccacattacataaattttgaaaagtttattggcttaaacagttacaggtgaaacagattacgtattttttttcaagcatgctattttaattaccttgatatctcatcatgtgctatgttggtcaaataaaatgtcatgagttatctagatctgaggattaaagaggagtcctcagcctttacttgccagaatatacatccagttttagctgtatgc

SEQ ID NO: 32 - DNA, 363 bp, Homo sapiens
tttttaattgcaactggacttttattgtgcagttacaacaacaaatgttttcagaaaaatatttggaaaaaatataccacttcatagctaagtcttacagagaagaggatttgctaataaaacttaagttttgaaaattaagatgcaggtagtgcttctgaactaatgcccacagctccaaggaagacatgtcctatttagttattcaaatacaagttgagggcattgtgattaagcaaacaatatatttgttagaactttgtttttaaattactgttccttgacattacttataaagagtctctaactttcgatttctaaaactatgtaatacaaaagtatagtttccccatttgataaaag

SEQ ID NO: 33 - DNA, 320 bp, Homo sapiens
atgttgtgaaaaggaatctgtaaaagtcagttttatcacaaattgtaaatattattgaaattgattgcaaatttagatcacatacaaatgagagtctgacattcaactgttttcctatattccaaagtaaacaattcctttcaacactcaagacttaaacaggtattcttagagggttatatgaattgctatcagaagctgttggctaacaagccagtaatttggttctttcaccagaacacagttccagataagcatctttgcactatttctcaagtatgaatccccatgtggggggaaaacggatatactttcaatag

SEQ ID NO: 34 - DNA, 299 bp, Homo sapiens
  misc_feature (1)..(299): n=a,t,g or c
aatagttccattcattaagtcatttcttcttgctctgcttggtaaaaggtgaaaacatggcatcaaaacacagcccagagaaagtcaattcctgtatttctaagacagtaggatccaggcttatttggaagataaaatatctctggaagaacagatagtgttaatggattgantcattttcctcaaaaagatataacccccagaacctcagaacgtgaccttatttggaaatagagtcataacatatgtaattagttaaaattagtccatattggagtagggtggacactaatccagca

SEQ ID NO: 35 - DNA, 515 bp, Homo sapiens
tttttgcataatgagcgcattttattaaatagatagttaacgcactgcttcttactcattccaagttgctgtaggtgctgcccgcattaacagcagggacaaaagcttcctatgcgcgtttcagcaggaatactctctccactccaggtacttctttgttttggatttttttggcatgatttccttcccatgtaaagaaagccaacttcttcaagacacaggtcattcagctttagtggtggcctccaggttctccttgggccgtgcagaaggccaggtcccgcacagtgaggccctcctttgtcctccactgaaagcttttcactgttcggtctgcaaagaaagaggttcgcctgcccctgctccactcgccagggtggaagtggtggagggctgggaaagggctttcttcacagggcagtgctctcggtatcattgtctatatccagcaggatgcggccaggcacgtctttgctggctgagtctgagtgcatttcaggaaagatgctgcgatg

SEQ ID NO: 36 - DNA, 350 bp, Homo sapiens
ttttgaacttgctcagaattttattgggattaacagggtccacggggagaggcgagccttctgggggacggggacagaataccgcaaagaataccgcaatgggaacggccttgcatagacaccgaggcgggctagcggcgcggcgggaagaggagagggatggagaaagaacttgggagaggaaggtggcagcagcgcctccatgggcactgcgcggctgtgacgaaggccacagcggccctccccgcttcggggtacagggtgtccactccacacagcacagggagaggggctggggcacaactgactgggagaagtgggtagaggggccctgaccaaggcatcacaat

SEQ ID NO: 37 - DNA, 344 bp, Homo sapiens
tttttttttttttttttttaaattttattataaagacctttattaggagaaaggacatattttctatttcttacttttattttgtgccttgaaggacttgtgaatgtatagaataattattttttcttactgcttcctctttgcaacccaacctccaccaagtcaatcgtgaaggtaggaagaaagctgtatttctgttacttttaaaaatgataacgagaagaaattaaaacaatggcttaagagaaagaggatgtaaggagtacaaagcaaaacttaacaaagagttagtaaaggaacttgcattgacaattcactcagccatgttaattttatcattaata

SEQ ID NO: 38 - DNA, 543 bp, Homo sapiens
tttttttttttcatgtttcatagttttattgagtctttttcagttttaactgtccatggtaagtacagttctagtgaccacaattatgaagctctgctcgtactaaaaatagcagatacaaagttggctgccatgccttacacacactaagacacacacacacacacacacacacacacacacacaaggttttgcatactcttacatgcaaacagtactatgctattataggaaatgtactttccttttattaaaaatacaattacacacaattagtctgggttttgttaagctaccactgatttagataaacctgagaaagctcaaaatatcaagtaacactgtttccatactgctcattcaatggcactatcactcaaaaagaaatctagttcaatcatctatattaaaatcacagataatataaaaataaacattttttgcaatagcactaaaacatactataattcaaattcacaaattttgatatgtaacatatattcaccttcatattaatttgtgattatgtgtataataccatgt

SEQ ID NO: 39 - DNA, 186 bp, Homo sapiens
tttgtgaataaataaaagtttatcattccgtacaaacgcactcattttccacaacagtttttacacgagccgcggtggcctggtggtggcacgtggggggcggccccgcggcggcgtcacagcggctccaggtcctcgtccccgcacgcatactcgtacaggtccacggcgcccagcggtgagggc

SEQ ID NO: 40 - DNA, 413 bp, Homo sapiens
tttggaaaatgacaggtttttattgctatgtttgcagtggctttttagcacagtaagaatgtccccgcaggcccaccaccctcacgcagccccagccctccagcctctgtccgggtgtcagggaagcctttcttggggtcactcagccgtctcgggactggacgtgacagacatacgtgggttaaagccgctacacagaagactggaggtgcaggaagtgcatccgccttgagcctggatgtgggagccgtgtccggggtcccttcctggggctgtgcacgcccagggcacagggtgggaagcctgagcaggccaggttagcagcccagacacccaggatggaatattgcagcctcttgccccacagacacccaagctcacacaattgatattggtggtgattggcgcaggaa

SEQ ID NO: 41 - DNA, 365 bp, Homo sapiens
ttttgagagaaaaggaaaaactttagttaaaatctttacaataaaataattatgactataaatctctttagttaaatatgtacacattacatggtatttgtataaagaatggaaatggataaagtttttcaggcaaatctaatgcacaaatacaccatcttttagagtataatgtcagtttatcattcgttaacagctgtgttagacagtggctctgctttgtgcaaaacgtgataaacaaaattaggaaaaattctgcaaaattatttagttccccaaggaaattactaaaatagaaaatggcaaaagaaaaaaaggttgcacactgaagcttgattgtatactcaggctacaatgaccagcac

SEQ ID NO: 42 - DNA, 489 bp, Homo sapiens
tgaattgtttacaaatgtttattaaatgtcagtaatttttacaaagcaaatattaatagcaagaggcaaatgttttgcaaaatatgtacaaaagtaaaaagctgtaatgaactagcaactcattttataaaatcaaaccattctttccacttttagacctcctttagaaataatttattgcccatcctgaactaaagcactgacaaaaaaatttacaacaattatcagataatgtgcttagttcctggaaagttataaaaagatatatgtaaaaaaaaaatcctaagccacaaatattttatagagctaatacgagtcatgttttgttaggtacagtatctacggggttattacaaaatatacttttttataaggcttcttgtggtaaatgagctctcaccagagtagagtagtttagaaaagccatttcaaacgttttgcgattctgccttcaagtaagaggtaaaaggtaaatggcatagtttgttg

SEQ ID NO: 43 - DNA, 321 bp, Homo sapiens
ttgaaagccgttatgtccttttatttggtgtgatagatgactgggtatctctctaactctatttgctgacttcagcaaagaatcaatgatgagcttagtttgcaagaaccggttccatcacatggaacgggaacgtatgttaagctctagcagccaccttctgtcaaaactgtttgtaaagcaattaccataatcaggttatgaggtcccttggttgggggaaaaagtattatcaagacttggcacagcacatgaaaagcaacatgttaagtttctaggttttaagcaaacatctgactatgctattttcaactacatcat

SEQ ID NO: 44 - DNA, 363 bp, Homo sapiens
tttgcacaagtctatggctttactacttttcaagacaaaagtcacatattaaaatacaaactactcaaaagcaaatagttgtcaagaatgtggtttacaagacagatcttacagataatacagactatattatgatttatctgtttgaaaacagaaagtagtgtattatactgaattctggtataaggtgcgcaggaaactttacttacaatcctttattttcataaggtaaacaccaaagtatttctcacatatattaccaccagattttttttaaaccaaattccggtttaaaaatcacacactgacaacacagaaatacgaaatgctaggaaaagtctagcatatgaaggaaaaacatgt

SEQ ID NO: 45 - DNA, 412 bp, Homo sapiens
ttttttttctataaaaatataactctttattaaataacatgcacaaatatcaactagtcattaaacagatatttagaacaaattgtaaagaaatacaaatccttaggtacaatttagtatcttgttcatgatatttgaagagtttaaaaagaatcactgattaaactaaccatcctttttctttctgaatccaaaaccttttcaggcatatactccattccaaatttttttctagcatttcagagcttcagaatatctttaataccaaaagcccttaactacttatttgattatacatttccaatgagaaggcattaacttttcttttaagctatcattagctttgagtctctttataaaagaaatttgtagaagcataatcatggcagagaggctccagctttttgaggta

SEQ ID NO: 46 - DNA, 421 bp, Homo sapiens
aagtttcttggaaatttttttattctccttgccaacatttcttttgacattttattacttaattatgtgacattaagaaataatttggttgcatattattttcaaaaagcagtaagaaagtagctattgagaaagaaggagggccataggtttttcaataaaacgttagaaacattataaaaaacgagactcccattacatggaaacacatgatcaaagatcagactaacacacattcaaacaggcttggttcgaaatagagttctccatttctttcagatgagccttttttcttaggctctttcagaagcacttcacaatgaacagaggtcttgccagctcatttcattagcggagaagcaaaggtatgatggcagaatcatgagaagatggaaataaggcctgaggatatggcttgatc

SEQ ID NO: 47 - DNA, 324 bp, Homo sapiens
ttgtcaatgttagaaacatttacttctgacgataatccatatagctttctctgatgttacacagcgattacatctccttgtgtctaaattaaagtcaaagtatgaattttaagatgatttttaattatttaacaagtagaaatacgatcagtgacaattatcaattaaaacattaaacaacccagttaccttttcttaacagtcatgatgaaatatccctttcctgtcttatcagaagccttaattattctctaccacacacaccacaaaagcttcttaatagagcatcagtgtccatcacacctttgtgtagaatctctggca

SEQ ID NO: 48 - DNA, 502 bp, Homo sapiens
ttttggaaaatgagatttttgactttaacaaaacaaatacagattgaatttaccaaatattgataattcatgtagaacgggtgccacagattttaaagtatcaaaaccaagagggcatcacaaaataaactttggtgaaaaatatcttcatcaaagaagaaaatatgagaagagtagtccttatgcagtgaggagaaatatatttggtaaagtaaatatgggtagtagatactgaatctatagatagcatatattccaaatgttttttagggaatatcaaatcagatgatgcttagatgttatagtaatatcacttatctcatttggaatgaaatttaatgttttttaataaatagcaaattttcattttttcactacctttataaaacaaattaaatatttagagtataactgatcataactaacatcaccttgcatttactaataaatactctaaatacatttggtttattattggaatttatatccttataattttacc

SEQ ID NO: 49 - DNA, 398 bp, Homo sapiens
gagaaacactatttatttatttatttatttattttgagacagtcttgctcttattgcccaggctagagtgcagtatttacaaattacacacacataaaatctggatttctagcttcttatgacaaaggatctggcaacaccgggcccacattcagccccacaggccacaggtgacttgacttgcctccagttcacccctgcccctgccagctttgtctcctgacaccgaaacagcccgtcagagctgtcactcgggttcatgcgtgttacctgtctggccctggaaaggccctggagttggtggcgccactccaggtcaacaggcatgtttagaaggagcctgccaggggctgcatggccgaggagccacctctccctgcagaggaaagggatcctgc

SEQ ID NO: 50 - DNA, 424 bp, Homo sapiens
tttgaaggtatatattgtttattatttttacatcgtctcttccctactgcatcaagccccatcatcctagcatgcacccaggaaatcagcaaaaacccatttaagagtccagacttcaagggtccctcacagtaatgggcatctcttgttttgcccgagcagagcagaccactcgtttccccttattctgctaattgtatttcattttcctttaagcaaccacctttcaccccatcctgaatcctcagaccttatttccctggctctaggaattagcacatgacacaggcctggccactcagagtgtttcattcccctagaagtagagatgagaccccaaacgggtcaatgacactctccacttggaattattggaataagtaaatctcttcccactgggttactgggttagcaggatagaagc

SEQ ID NO: 51 - DNA, 424 bp, Homo sapiens
ctttttattgattttttttcaaaagcactctatatatggagtggcaccagatttaacctatttaaaataaaagtcatacaaacacaaaatatatttctgtgtcatgccagctcattatataataaacatgttatgacagctaattctactagaattactgtgaatacttacagtacactgaattttattctttcacatccattttagttttaaagagaggttcacgagttaaatgacaatggcatggctatcttgaatggggtgcaaacatcattggggaatgtggatccaattaatccgaaggtccggtgtgacccgtattagttttatagacaagagaagggtttaagatagggtgaaatgagctatcagtggtttcaatgtctcatgaaagaaagaaatgcattaaaaaaaaaaaagtttg

SEQ ID NO: 52 - DNA, 452 bp, Homo sapiens
tttggtgaataaactaacagctttattaatgaaggcaaacatcagatcattgtatgaatattatatatatatataaaaagaaatccaaactaacagcattgtatttcaaaagtactgtacttctgtttcttttaaagagacttgtcatctgtttttataaaacaaaatgggtactcttctcctaaaaaatcctggaaaaatgaaatagtcaatttcaagctgatgaattgaacacacctttctttaaatgcagactattgctaggaagcaaataaagtcaagcatcagaaagaagatgtatgagaaatgcatgaaagtcagagaaaagggatgtagtgaaattactgctaatctttcccccctatattcaaagaccatccaaaactggtctttcatacaaatataaaataactataaagagagggaatttgaaaccatacccatctgaaatc

SEQ ID NO: 53 - DNA, 497 bp, Homo sapiens
tttttttcagtattttccttcactttaatttttattgcttctccagttcagataattcagcgcttcctctttcttcttcctcaccttgttcatggctggctgttccatcagcagaacttccagcgattgccacattcattgcataagacaaaggtagtcatgggctcatcagcactgcgtgtctgcacctggttataggtgcagttcttcttcttgcatttgctgcactggaagaggtcagtggtggtgccgccagtcttggccatctggtgctcacggatggcctcctgggtcatggcattcctcaactccctcagttcatcactggccatttcctctgccgtcatcttggctataagcctgcggagatggccccactgagcacgttccgccgcacgcggggttcctggggtccttgaggttgcttatgcggctgcgcacgcggttccggtacttcatgtccgtgctcttgagctcttggtagatatgatcttcga

SEQ ID NO: 54 - DNA, 423 bp, Homo sapiens
ttttgtcgagaggaacgcacgttttattggaagtcttggcggcagggggagtctgcgggggcagggctggggaaggggcggcggagggggcggtgggcgcgcaggtggagcgtgggagatgtcaggtgccaggggagtcctggccggattccatcgctccaggtgtttctaccgcctgcggtcggacagacggcggatggagctgcggaaagttccctcctcttcatcgggttccccagtcctctgctgctggttgaacttgcaccggcatcttctgctcagcacgatgaggatgcccaggatgaagaggatcccggcgatgacgaggcctccgatctgcagggactggtagtcgtaagtgaacgggtcgtgttcctttggactttctgccttggccatggtgaggagacccacacagaaaac

SEQ ID NO: 55 - DNA, 400 bp, Homo sapiens
tttttgagacggactcactctgtcaccaggctggagtgcagtggccattctcggcttactgcaatctctgcctcccgggttcaagcgattctcctgcctcagcctcctgagcagctgggattacaggtgcccaccacgcccggctttttgtatttttagtagagacggggttttgccatgttggccaggctggtctgcaactcctagcctcaggtgatctgcctgcctcagcctcccaaagtgctgggattacaggcgtgacgaccacgcccagccacgttctgagttttgaggatccagaaacaaaaggctggaaagcgacacttctacaggtttactgatgagtccggagaaaatccaaaaacaaagccccactgagggtttgtgaatttggctgttc

SEQ ID NO: 56 - DNA, 288 bp, Homo sapiens
tttgacatctctatatttttattgaaaataaaaaagtcatggtgctttcttcctcataagtggcatatggacacccccagtgctgccggtctcgcttccggtacaaaagtctcagcaggaaaccaaccttaatggcttgttggtggataagacggcatcaacttgtacatttgcccattgagagaactcccaggagcaactgtcctctctccagtacacgcggcacgttgctaagaaggcagatttcaggatattcacattcatgcattacgtatctcacactacctg

SEQ ID NO: 57 - DNA, 299 bp, Homo sapiens
tttggggaacattctaaagcctttatttagcatcaggtagattatttcattataacacttgttaacttcaagacagcaattaaaatcacggactggcagctacctaggcccctgggagcagtatctcagtctggggtttgggtggataaatactataagatttaagatgaatgtgccccaattaaaggggcaaaactactgtacagtaggtctccacacatattttaagtacacaggtactttgcaaacttgaaatgcacaaggcctccttttatatagtttgatacttacatgagtgc

SEQ ID NO: 58 - DNA, 407 bp, Homo sapiens
tctagttctttgtctaggccttcaatatttaaacaaaatgcaaaactgaacgttacctcaaaatgaaacagtgtgcgtactggctgttagaagttgatggcggtctactgtttgatattcactgccatcttcctctgccccactctacctcaactcgggaccgcctcacctaatggtgggctttgcgctttatgccatgtagagaagacactgggtaaccacagcaaatcaacacgagatcctgtactgcctactctgggaatataaatggctctgaggccaggggataaaaccaaaagatctaggagtagctgaatgccaagagacgagttagaacaagttttagttccaaagatgattagactggaaagaaaactgatccaaggagggtcatttctgtgtagatc

SEQ ID NO: 59 - DNA, 440 bp, Homo sapiens
aaataatacaactagtaatttcttaagatcataaattccattacagtaaccctggtaggcaactctataaagttctgggctccaagaagaggtcagtgcatgccataaatgtgtttgatctgctgtgaagtatattcagtcttcaaaatgtaatgcttacatgagataaaatcggttggttaccacccccaaattagcatatgccagcctgcacaaaggtaaatagcaaaaactttaactgctcaatctgaattaaccaaagattccttctaggaatcttaaaaaaaaataagggtacgaacactccaagcacttattttcagatgcatcaactgacataaattaaaaatggtacaaactaataattgaacaccagtagcgtaacaaaatagaattttcactctttctgctttcagtcaaagtggtttgctcatgtttgc

SEQ ID NO: 60 - DNA, 436 bp, Homo sapiens
ttgagtatgttatacatccaagagccttatatttcactccacataaacagtaaacataaaagaaaaaagaaacactttgtctccctatagagcattttatagtataggaagggattcaaattctctttttaacaaaattcttgtttctatatagaggagattttatattcttaatgtttacaacaaagcctatttccaccaaaaaagcaagaagaaattaataaatgaaatcctgaactctaaaaacctaagaaataaaactgtgaacaattctgaaacggagtgttttttctaaaggctaatacaaacataccaaaatagaatttctgagcacgaactatgtgatttcatttcaatcgtatcactttcatctgattgaaataatttagaaacaataaggatgatcttaatctcactattttctgcatgagactat

SEQ ID NO: 61 - DNA, 438 bp, Homo sapiens
tttttgccacgcaattctgaataaagtttattaaataatatgtacagcaaatgtagtaattcaacacatctatttatcaaatcaatccactgcaatgaagaaaaataaatgaacagaaaaatctatgtctgcataggacatgctctcagtgtgtaatttaaatggcaatactttaaattaattggttatatataatgtcagttatttttctttcagaatataaccttttttgtagtaacctattctagcaataggacttaatacgactgcagataaataggactgcaaaaaccaaaaacccaaaataatgaaattaaaaaggaaaaaaaaactgtaactgagatcagagttacctttcctccccaatagaatacttatcgtaaattttaacactttacaatggctatttttgtgctaaaaatctgtaggtgagttatt

SEQ ID NO: 62 - DNA, 387 bp, Homo sapiens
tttttttttttttttttttttttcattatttattttatttcctgattctttcccctgccaagtgaccctctgggaaagcgggagtttttgttttgctttctaccagggctgcaagagcctagaactgggtctggcatacagcaaaggctcatttattgctgaatgaatgcatagtttggggaaggggaggacaagctgaggccacatttgggacgggtgctggggtggggtggagaagggagctgctgcccagaggacttcagtaagattcagggtgggggccaagaccagcagctggcagcaggttctgagaggggctgggcctgcctgaacagggaaggggtccagcagccgtggtcaccttgctgggactggtgtgtggggcca

SEQ ID NO: 63 - DNA, 183 bp, Homo sapiens
ttagtgtttttaaaaacattttttaatgaagaaattattccactccaaaatatagacacacaattaaatagtttaatcacttcaaaatataacatgtccccaggaggttccaacacacacacacacacacacacacaaaacaatacttaacagcaatacaaaaatccatacaatagtattttt

SEQ ID NO: 64 - DNA, 270 bp, Homo sapiens
tacagggcaacccacccctaggcaaagcctcggcctctcccacctcccccacgtcatcactgagctgcggcacgcagaggtgccagccaattccgaggagaattgggtccaatagaaatatttacaaataaccagggggcaggtgtgccgtgatcgggaatcgtgagggaactgagtaccagggggcccttggctcccaacagccccaggccctggggcggacttggcacaggacccaagagggaactggggcattggggggccggcaga

SEQ ID NO: 65 - DNA, 390 bp, Homo sapiens
aaagtacacatatttattttaaaacatttgtcatatttgctaataaattgataaggaacaaagaacgcctgaatctacttaaaagaaccttaatctcaaatgaagtaaaatatataaacaatcagcaaaattcttattaacttgtagaaatgtaatttatttcatgcaaagctacattctttcctatattttaacagctaatcaaataaacatttcaaaaaattcattacatcacaataagttaaaatactacaaaggaactgcaagtcaatcaatttatcaaaaccaaactgagcgaacactatgcatagataaggccaaagttactaatttgcttataggtagcactttgcagctttttccaagtacatatttgaaaatgtagtgaga

SEQ ID NO: 66 - DNA, 269 bp, Homo sapiens
ttttttttttaaaagtataattttgcattttattcattcattccatcagctgggaattgctctattgtacaaatacagttttgtacaaaaaaatcacaaaatgttacgaaataaaaaaagtacaaactgcattacttaataaatatgactaaaagtagttaaagtggcaatgagattgattttaagttggaaacattgtttgacccagcaaaccatacaagctctgtttacagacatttctacatcaatacagggcaatcctattttgc

SEQ ID NO: 67 - DNA, 473 bp, Homo sapiens
tttttttttaccagtttatatagggacagaacacacacagaactaagccttctggattatgttaaccaccaatattatagctcaccttcatcaaagtacagacaccagatagggaaaagtggatgagaagggaggggaagggcaggcagaggcagcagggttatgtcattgatctaaacaaagttttctaaaccagattgtgccatcaatcaaaatggtcaaaccgatttagactttcaacatctccagtaggaagtgagcccataattatatacattactctgcaaaatgctattggatttttctttgctccatccaaactctatgtaatcaggtgcacctcaggctatagtttaaggattatgggaccaaaatcttcatatgttcaacgattctgagtacaaacagaagttggggacaaacactgtggaaaacagctgcattccttttctgcagtatatacaccaggtatt

SEQ ID NO: 68 - DNA, 363 bp, Homo sapiens
ttttttttttttttttttttttttttttttttttttaagacttaacgtcattgtatttattaggttctgaaacaatacacattcacatccttttgaatacagtacatttggcacaataagcgcttgctttacaatgaaataacactaatgaatggcaagagattaaaattacatccagaaaggaaaaaaatgtacaaataaagcatcacaatacaaaaaaaaaaaaatcctaaaattgaatacattttacagttagccagaattattttgcacataatttaaaaagaggtaattttttagccttcttttttttttttaaagcaagaatgcattgttttttcacctttggaggaaaaaaaatta

SEQ ID NO: 69 - DNA, 97 bp, Homo sapiens
gagacccctccctgcccaccctcccacaaaaaaatttacagcgctacagttataacacgtgatgttcacatctgaaaccattaacctttcaacacat

SEQ ID NO: 70 - DNA, 326 bp, Homo sapiens
tttttttttttttttttttttttttttttttttttttggttttcttcagccgcagtcttgtctgctctgaagaaaattcttgcactgctcagtgagaaatacagcaattcaaattcctgtagatagacatccagtcgcttctgagtgagattcatggtttgtaagagtttttcatcttgactggctgactgtacattctgttgcttagcaacatgctcttatctccttcaggtatttctctctaacagactggaaccagtgaagtgaatcaaactcccgatactgatccaaaagctttagaatgtaagccacacccatggcaaagc

SEQ ID NO: 71 - DNA, 440 bp, Homo sapiens
tttttttttctagaccactgagaaaatctttatttacaataaatttcaataaaatttgcataaatatattcccaatgtacaattttcacctctgatttcttcatatcatttaaaaagttagtctgtcctgttctccttattcctttcagacaccagtgtggcgctgacattggcaggtggaggggagctgccagggagctggggggtggctgagggctcaggctgcttggggtggacctctctctgggccgccacgtttcagctccatccctgccctccagtttcctctccatggtcgccaccaggatcttgagccacgtgttctcggtaaggaggttttctgaggcatcggccagctcctgcagcttgcgggccagctcctgcagctcacgtgtcttctgctcatagagggcctgcagctgctcactgtgtgcgtggag

SEQ ID NO: 72 - DNA, 244 bp, Homo sapiens
tttttttttgctgtgttcacatgaccttactggtcagatgtttaatggtcactaataatacatttaaaataagcatgaagctaactgcatgatcatatggtgagcttatccgccacatatgaaggcaaattataagtaaaaatgtaagcaaacaattttgtattaataataaatagagctttaagcatttaacattatcaatacttttaaaatttaaataaatgcactattttatacagaactg

SEQ ID NO: 73 - DNA, 369 bp, Homo sapiens
tttttttttttttttaattagattgcattttatttagataaatgaaaatttgccccaaacagaactaggaatcaaatattgtcttggactagaggtaattgctaagctggaagcttatattgaaaactaaaatttccagcccttgactatctgtagttccaaacatcaaaggaaaatattggaacaatttatctatgtacagagagaggcaactcatgggtaccataagcaaaataacctgagggggaacatttgatattacaagaagtggtgagagtttacaagtcttgcattgctttctattgtacatggctctgtagtaatgccaaaaataacaaaatgtaggcacttgctctggacttctgcagt

SEQ ID NO: 74 - DNA, 437 bp, Homo sapiens
tttttttttagtgctcacaagtttatatttttaggtttgaataaagattcttgtgtattttctaaatacacagacaaaacagttccggaagtttacatacatgtcttaggacacttatattaggtaggtaatttacattttaaaaagttggtcttcgtaaaagatcttcccaaagagcttttacaaacagcaggcggaagtgttcttttgtttacagtgttcaaaatgccaatgctcccactaaataatggcctcaaccatctctcctcaacccaaaatattgttctcaatagctagtgtactccaaatttaagtacccaatgtcataaaatttagggctagaaaacatcttttgaagtgtgcttatccctaacacattttaaactatctagaattctttaacttcagttgaaagcagagatacagcaggaaaaaaa

SEQ ID NO: 75 - DNA, 394 bp, Homo sapiens
ttttttttgcaaattcccttctttccctttaatgaggagggggctggtggagaggcggaggaccagggaatgcagccatcgggagggttgggtttggtgtggggcatctctcacagaggctgttggagcccggctcacgtcccacatgtcccttctcggaccagtgtccagggctgagtcacgggtatcgtcattctcagacctccactgagccctgctgcctcaggtgttgctgaaggagctggatgtggtgcagcagcttcttctggtggccagccagggtgatgcccagggcaggcaggtcttctaggctgagctgagccacatcactgaaggtacagaggccaaacttggagaagttgtcctggtagcactccagtccaatggctgaaag

SEQ ID NO: 76 - DNA, 395 bp, Homo sapiens
tttaaagcatagcatatatatttattttataaaatagaaaaaaaattaaagtatattgattgttctttacacattttgattacactgaatttgttaatttaatattagttcaaataaacattgttatttaaaaaatgctgagtacacgattaagctgaattttgttttccatcagaaaaagaacttcaggagtatataatggtctacaggtgcttcccatccaaaacactaggtcttcatcttttgtttcttagaccactcaggtgcttcttttttagtaaagagtgttggtttaggtgtaaatatattgtcttcatgctctttaggcacattcaaagtctttgatttctgattttctgtcacatgttttggttctgttttagtgagaagtaagc

SEQ ID NO: 77 - DNA, 324 bp, Homo sapiens
tttattttaggctcaaggaaacttccctgctagtccaacttcactctcaacaccactcaatgatctaacagcttcctaaatccaacttcattctttttgcagtttaagcccactttcaaataaggcatcactgggatggataaagaaaacactgagatgggggatagaaacattaaaaagcagaaaaactaagcaaaatctaaatcctgtcaattggatgtttaccatttcacactgaaatctttccctgaatagaccagggacatcactgcctcctgctcagatctcaaagcttcaacatgctccacaaagcacctccctaag

SEQ ID NO: 78 - DNA, 6824 bp, Homo sapiens
cttgtgctaacaatttatgaagcaaaaggcttagaatttgatgatgtcctcctttacaacttttttactgattctgagggatgcccaagttggagcaagctctaaggagagccttacagatgaagccaaggttagcaatgtccaccctgtgatgacagaactgggtaaggtcagttcatagatagagacaattccaggaagacaaatgaggcttggttcctgccctctggatcaggtaatgtgggggacaagaacagcttccttgcatgagagacccctctagcatggcttcactaccactgcttgcagctcatgcagatgatggcagccaaagagtccccacattgacccccagtgacctctgtattggtccactgctttcacttggctcctgagtccttgtgggtttttctccccaagcttagttcattatgggtagagctaccaactcacagccgttgtcctgggttttctagccactgttttctctttcccactatcttttggtggagactcaagctggctgctgactgtactgtggggtcttctctggggacttagctggctgtgtcccagtccttgttgcagacttcctttgcacatgatgcatgcttgaaggggctatgttatacccaagtcaagagcactgttggctttaacactttaaaaatctgccccagaactgaccctttagatagagtccttcctttttttcttatcattttttaaatgttattttgccttaatagcacaactattacaatattgatataggtgctttgcagtttacagagtactttttgaagtcattgtctcactccaccaaccctctgaggttatatgtatttttattactctcattctattttttaaaatttatttttatttttatagagatatggtcttgctgtgttgcccaggctggtctcaaactcctggccttaagtaatcttcctgccttggcctcccgaagtgctgagattataagcatgagccacctttatctgtagataaagcagaaggtcactgagattagtacatttctcatagtcgtaatgtagatggcagagcctggagatgaactcagatgctttgagttctaaatctctttccattttccttccttttaaagcctcgcatgcgaattgaattccagaaccttccacaattagtgtatcattgctgttccttatgtacattcctttcctgttaaattttgctaataaaatcagatgcacactcattaaccctggaaccatttttacctctgaggactaacttttttttctaatgatacatccatcggtcatggttggactgaggctctcctaaaagaggaagggcttataaggaatggaagatcatttcctcattcacacctacctcaactgactccagagaggaaaaccggccattggttgaagtacccctggacaaaccaggctcttctcagggtcgatctctcatggtgaatccagaaatgtacaagctcctcaacggagagctgaagcagctgtacaccgccatcacacgggctcgggtcaacctctggatctttgatgaaaaccgagagaaacgggctcccgcattcaaatatttcattagaagagattttgtccaagttgtaaagacagatgaaaataaagactttgatgatagcatgttcgttaagacctcaactcctgcggagtggattgcacagggagattactacgccaagcaccagtgctggaaggttgcagccaagtgttaccagaaaggaggtgcatttgagaaggagaagttggccctggcccatgacactgccctgagcatgaaatccaagaaagtcagccccaaggaaaagcagttggaatatttggaattggctaagacctatttggagtgcaaagagccaacactgtcccttaagtgtctgagctatgccaaggagttccagctctctgcccagctgtgcgagaggctgggaaagataagagatgctgcctatttctataagcgaagccagtgctacaaagacgctttcagatgctttgagcagattcaggaatttgatctagcactcaaaatgtactgccaagaggagctttttgaagaagctgctattgcagtggaaaagtatgaagaaatgctaaagactaagacccttcccatttccaagctctcctattctgccagtcagttttacttggaagctgcagcaaagtatctgagtgcaaataagatgaaggaaatgatggctgtcctctcaaagctagacatagaagaccagctggtgttcttgaagtctcggaaacgcttagcagaagctgcagacctgctgaacagggaaggtaggagagaagaggctgccctgctgatgaagcaacatggctgcctcctggaggctgccaggctcactgccgacaaggacttccaggcctcatgtctgctgggggccgcccgcctcaatgtggccagggattccgacatagaacacaccaaggacattctgagagaagcacttgatatctgctatcaaactggccagttgtctggcattgcggaggcccacttcctgcaaggggtaatcctgagagactttcagaagctcagggatgccttcttcaagtttgacacgctcaaccactcagctggagtggtggaagcactctacgaagcagccagccagtgtgaggccgagcctgagaagattctgggcctggctccagggggcttggaaatcctcctcagtctggtcagggctctcaaaagagtgaccaacaatgctgagaaggaaatggtcaaatcttgctttgagttttttgggatttcccaggtggatgccaagtattgccagatagctcagaatgaccctgggcccatattaagaataatttttgacctggatttgaacttgagagagaaaaaaacaaaagatcattttttgataatgactgaccaagtgaaattagccctaaacaaacaccttttgggcaggctgtgtcagatcacacggagcctgcttgggaagacctaccgaggagtctgcatgaggtttattgtaggcttaaaatgtgaggatgaaaactgtgaacattttcacaggcctctgcggcgttgtgaagccaagtgtttagttcagtcgaaaatgaacttggtggcaatcaacgggttgcttttggaagccaaaaaagtattccctaaaatcttagcagaagaacttaaagaaattgattatattttgtctacagatatgtatggcctttgcaagtccattctggatgtccttttccctaagcatttccatcagagagtgttgtcagaaaaccccatggcatgcaaagaaatcctcaaaccaaattacaaatccttccggttctacagatttgctttgaaggagtacatccactttctgtttgaaaatgaaagcgcacgcaaccgccgggaatccacagacctgtggctgagtgccatgcaagctttccttctctcttccaactacccggaggagtttgaaaagctgctccaccaggaggaggacaactacaacagggaactcaaagctctagagtctgaaaaggatgaaaggggcagggggagaggcagcaggataaaaggaatagaagggaaatttggcatgctggcacccaacagggatgatgaaaatatggacaagacccacctgtgcttcatccggcttctggagaattgcattgatcaattctacgtgtacaggaacccagaagactacaagaggctctttttccgtttcatgaatgtcctcatcaagaggtgcaaagaaccactcatccccagcattggaaacacagtagccctcctggagttccagttcatccactgtggggtggtgctggcccgcctctggaagaatgtcattctatgcctccccaagagctacattgcactcttgcactactgggagttcctgtttagcaagaaggacaaggagcttggggatgtgttctccatcattcaggaatacaaacccaaggacgtgacaagagccattcaggatttccggttccatctctcctacctcgccaaggtgctatgtggctatgagaatgtgaacttcaacgtcctgcttgatgccttcagtgaaatagactatgtggtctcgggtgaggctgagcggacactggtgctgtgcttggtgatgctagtgaatgctgaggagatcctgcagccatactgcaagcctctcctgtatcgccacttccgggagattgagtcaaggctgcagctcatgagcatggactgccctggccaggttcccgagaggctcctgaaggtggtgaagcgggtcttggtggcagtcaatgtgaagtctgtggctgaggcactgcaggacctgctctttgagcgggatgaagagtacctaatggactgtgactggcggtgggaccctgtgcacaccaaagggtccatagtccgtggcctctattatgaggaggtcagactaaaccgcctgctctgtttggaccctgtggactactttgctgaacctgagtgtgagtttggccaggatgagatggatgaactggcattagaagaccgagaccacgtcctggccaccattctttcccaaaagcaacggaaggcctccatacagcggaagttgaggagggcatgcctggtggtgtctctgtgcatcagttggaggagaagagtgggcacccagatggagcgtgtcagggaggaggccagggagcccagggctgggaacttcaaaaaggcagacgtggacaggacccagtgtgacctatgtggagtgaagtttacccgtggcccagagaactatttcagccccagcaaagcgtttgagggggcagcttccgaggtggcagtcctttccagggctgagctggaaagggaggagtgtcaggagaggaacagcgagtcttacgagcagcatatccatctagaacaccaccagaggcagcaagtggcctaccagaaatactcagaatttttccacgagaaggtggacccggccattgatgaaggcaagctggtggtgcaggacatcgagcaaagtgtatggatccacagtcacgtgggctccaaggagcacagccacatgctgcagaaggtccaggagcacatcaagagggtttcggatatggtggaggacctctacaggcggaaggcctgggctggcgcggaggaggcgatgactcggctggtcaacattctgatcctgtcagtcagggatgcacgagactggttgatgaaaacagagacccgcttaaagaaggaaggtattgttcaggaagatgattatgaaaatgaagttgaagactttggtgagcttcggcctagaaggcgttctcggaaatgtggaaagcagagaaaatactaatgtccacacagctgcagcctcctcatccttcggaacattccattctgacttagaattctgagcgctggggcagaagacaaaaagaatgtgaattagcattttaaaaatagataggggagtctaacaacaccattgctttttattctcattacttctctttcagtggcttaggatctgattgctccctcacctctaaagtgtttccaagtagagtctggcagtattagtttcccccacaaacaaattcaggtagagaagttgtagtcgaagggaatgttgggactcctcactgcatggtccctggggtgtctggctcatccccatcatgacatgagttggtagcagaggactaggtgttaggacagactctcctcacctcagttgctgctgctctgggccaggaaatctctctatggattccctcatctcctgccacactgctgcagcatcaagtgtgctatgagagctgtatgtgcccaggggtgggccctgccactggccaccccgagcccaggacgcattctggtcatctctgagcccacttgtagtgtagcttcttctgttagagatgttagccttttctctctgtggcgacttttctgccttcccttcttctgttttttgtgatcattcttagctacctgtgccaagtcacagttagactacctcagaatgtagtcaagaattcacccagtgttctttggatgtcccttccctagggggaaaggctggggaatgttgctgggagcattcccagctgcctctccaaagtggtcctaactctgccttggctatggtgcagacattccaaaaagtgttttgtatacagccctgtacatctagttttcttggttctccctggcaagttcgctaccctagcttaggctgacgttctgatgagtctctgcttgctgagctcatcactgtgggatggtgacctgcagagctgcagattggagcaagtggacagaggagggagccagctaagccaaatccgtcactgccacttggctggcaggccttataagagggcggatctgggcccgtttgcaggaggccattgcctaccctctccccacagtgagccagcagccatcagctgatcccacctgggaaaccttcatgcctctctgatggttactgcccacccttaccccacccctcagctcagcctggtatggaaagcaaggtgcacgttggtctttgattgttctgtcctcacagcagagccagctttccccccatgttgctgctgcttttgctgctcatgctgcttgttgttttctcttccttatctttccaaattgtttccttgaaatgcttgtttccaatttttcttagattatgtttctaatttttattccaggtgtttttttttcttacttgacagaaaaaaagaaaaccccaacaatatcttgctgtattatcacattttttataaagttaaagcatttctctt

SEQ ID NO: 79 - DNA, 6651 bp, Homo sapiens
ggccgagtcgtggcgggagacggtgcagctgtacgaggacgaggtgcgcgagctggaggaggcgctgcggcgcggccaggagagcagactccaggcggaggaagagacgcggctgtgcgcgcaggaggcagaggcgctgcggcgcgaggcgctcgggttggagcagctgcgcgcgcggctggaggacgcgctgctgcggatgcgcgaggagtacgggatacaggccgaggagcggcagagagcgattgactgcctggaggatgagaaggcaaccctcaccttggccatggctgactggctgcgggactatcaggacctcctgcaggtgaagaccggcctcagtctggaggtggcgacctaccgggccttattggaaggagaaagtaatccagagatagtgatctgggctgagcacgttgaaaacatgccgtcagaattcagaaacaaatcctatcactataccgactcactactacagagggaaaatgaatggaatctattttcaaggcagaaagcacctttggcaagtttcaatcacagctcggcactgtattctaacctgtcagggcaccgtggatctcagacgggcacatctattggaggtgatgccagaagaggcttcttgggctcgggatattcttcctcggccactacccagcaggaaaactcatacggaaaagccgtcagcagtcaaaccaacgtcagaactttctctccaacctatggccttttaagaaatactgaggctcaagtgaaaacattccctgacagaccaaaagccggagatacaagggaggtccccgtttacataagtgaagattccacaattgcccgcgagtcgtaccgggatcgccgagacaaggtggcagcaggtgcttcggaaagcacacggtcaaatgagaggaccgtcattctgggaaagaaaacagaagtgaaagccacgagggagcaagaaagaaacagaccagaaaccatccgaacaaagccagaagagaaaatgttcgattctaaagagaaggcttctgaggagagaaacctaagatgggaagaattgacaaagttagataaggaagcgagacagagagaaagccagcagatgaaggagaaggctaaggagaaggactcaccgaaggagaagagtgtgcgagagagagaggtgccgattagtctagaagtatcccaggacagaagagcagaggtgtccccgaaaggtttgcagacgcctgtgaaggatgctggtggtgggaccggtagagaggcagaagcaagagagctacggttcaggttgggcaccagtgatgccactggttctctgcaaggcgattccatgacagaaaccgtagcagaaaacatcgttaccagtatcctgaagcagttcactcagtctccagagacagaagcatctgctgattcttttccagacacaaaagtcacttacgtggacaggaaagagcttcctggggaaaggaaaacaaagactgaaatagttgtggagtctaaactgactgaggatgttgatgtttccgatgaagctggcctggactaccttttaagcaaggatattaaggaagtggggctgaaaggcaagtcagccgagcagatgataggagacatcatcaacctcggcctgaaagggagggaggggagagcaaaggtcgtcaacgtggagatcgtggaggagcccgtgagttatgtcagcggggagaagccggaggagttttccgtcccattcaaagtggaggaggtcgaagatgtgtcgccaggcccctgggggttggttaaggaggaggaaggttatggagaaagcgatgtcacattctcagttaatcagcatcgaaggaccaagcagccccaggagaacacgactcacgtggaagaagtgacagaggcaggtgattcagagggcgagcagagttattttgtgtccactccagatgaacaccccggggggcacgacagagatgacggctcggtgtacgggcagatccacatcgaggaggaatccaccatcaggtactcttggcaggatgaaatcgtgcaggggactcgaaggaggacacagaaggacggtgcagtgggcgagaaggttgtgaagcccttggatgtcccagcgccctctctggagggggacctgggttccactcactggaaagaacaagctagaagcggtgaatttcatgccgaacccacagtcattgaaaaagaaattaaaataccccacgaattccacacctccatgaagggcatctcctccaaggagccccggcagcagctggtggaggtcatcgggcagctggaggaaacccttcccgagcgcatgagggaggagctgtccgccctcaccagagaggggcagggtgggccggggagcgtttccgtggatgtcaagaaggtccagggtgctggtggcagttccgtgaccctggttgctgaagtcaacgtctcacaaactgtggatgccgatcggttagacctggaggagctgagcaaagatgaggccagtgagatggagaaggctgtggagtcggtggttcgggagagcctgagcaggcaacgcagcccagcgcctggcagcccagatgaggaaggtggagcggaggccccggctgctggcattcgcttcaggcgttgggccacccgggagctgtacatcccttcaggcgagagcgaggttgctggtggggcctctcacagctcgggacagcgcactccccagggcccagtgtcggccactgtggaggtcagcagccccacaggctttgcccagtcacaggtgctggaggatgtgagccaggctgcaaggcacataaaactcggcccctctgaagtctggaggactgagcgaatgtcatatgaaggacccactgcagaagtggtggaggtaagtgcgggaggtgacctaagtcaggcagcgagcccgaccggagccagccggtctgtgaggcatgtcacgctgggtcccggtcaaagtccactgtccagagaagtcatcttcctaggccctgcccctgcctgtccagaggcatggggctcgccagaacctggcccagcagagtcttctgcagatatggacggatcagggaggcacagcacatttggctgcagacaatttcatgctgaaaaggagattatttttcagggccccatttctgctgcagggaaggttggtgattattttgcaacagaagagtcagtgggtacccagacttctgtcaggcaactccagttaggccctaaagaagggttcagtgggcaaatccagttcacagctccactttcagacaaggtggagttgggtgtcataggagattctgtacacatggaagggttgccagggagcagcacatccatcaggcacatcagcattgggcctcagaggcatcagaccacccagcagatagtttaccatgggctggttccccaactgggggaatctggtgactcagagagcactgtgcacggagagggctcagcagatgtgcaccaggccactcacagtcatacctcgggtagacaaaccgttatgactgaaaagagcaccttccaaagtgtcgtttctgaatctccccaggaggatagtgcaggggacacatcaggggcagaaatgacatcgggtgttagcagatcctttaggcacattcgactaggtcctacagaaacggaaacctctgaacacattgccatccgtggacccgtgtccagaacatttgtgcttgctggttcagcggactcccctgagctaggcaagttagcagacagcagcagaacgctaaggcacattgcaccagggcccaaagaaacttcgtttacctttcagatggatgtgagtaacgtagaggcgatccgcagccggacacaggaagcgggagctctcggtgtgtctgaccgtggttcctggagagacgcggacagtaggaatgaccaggcagttggtgtgagctttaaggcctctgctggggaaggagaccaggcccacagagaacagggcaaggagcaggccatgtttgataagaaggtgcagctccagagaatggtagaccaaaggtcggtgatttcagatgaaaagaaagttgccctcctctatctagacaatgaggaggaggagaatgatgggcattggttttaataagcagaaacattttgttttaatggcagcctgttggcgacgtgccaacatccaaaggccttaacttattttaagaggccgagggagtctatgaaaatctccccttttttacttttttaaagagtactcccggcatggtcaatttcctttatagttaatccgtaaaggtttccagttaattcatgccttaaaaggcactgcaattttatttttgagttgggacttttacaaaacacttttttccctggagtcttctctccacttctggagatgaatttctatgttttgcacctggtcacagacatggcttgcatctgtttgaaactacaattaattatagatgtcaaaacattaaccagattaaagtaatatatttaagagtaaattttgcttgcatgtgctaatatgaaataacagactaacattttaggggaaaaataaatacaatttagactctaaaaagtcttttcaaaaagaaatgggaaataggcagactgtttatgttaaaaaaattcttgctaaatgatttcatctttaggaaaaaattacttgccatatagagctaaattcatcttaagacttgaatgaattgctttctatgtacagaactttaaacaatatagtatttatggcgaggacagctgtagtctgttgtgatatttcacattctatttgcacaggttccctggcactggtagggtagatgattattgggaatcgcttacagtaccatttcattttttggcactaggtcattaagtagcacacagtctgaatgcccttttctggagtggccagttcctatcagactgtgcagacttgcgcttctctgcaccttatcccttagcacccaaacatttaatttcactggtgggaggtagaccttgaagacaatgaagagaatgccgatactcagactgcagctggaccggcaagctggctgtgtacaggaaaattggaagcacacagtggactgtgcctcttaaagatgcctttcccaaccctccattcatgggatgcaggtctttctgagctcaagggtgaaagatgaatacaataacaaccatgaacccacctcacggaagctttttttgcactttgaacagaagtcattgcagttggggtgttttgtccagggaaacagtttattaaatagaaggatgttttggggaaggaactggatatctctcctgcagcccagcaccgagatacccaggacgggcctggggggcgagaaaggcccccatgctcatgggccgcggagtgtggacctgtagataggcaccaccgagtttaagatactgggatgagcatgcttcattggattcattttattttacacgtcagtattgttttaaagtttctgtctgtaaagtgtagcatcatatataaaaagagtttcgctagcagcgcattttttttagttcaggctagcttctttcacataatgctgtctcagctgtatttccagtaacacagcatcatcacactgactgtggcgcactggggaataacagtctgagctagcaccaccctcagccaggctacaacgacagcactggagggtcttccctctcagattcacctggaggccctcagacccccagggtgcacgtctccccaggtcctgggagtggctaccgcaggtagtttctggagagcacgttttcttcattgataagtggaggagaaatgcagcacagctttcaagatactattttaaaaacaccatgaatcagatagggaaagaaagttgattggaatggcaagtttaaacctttgttgtccatctgccaaatgaactagtgattgtcagactggtatggaggtgactgctttgtaaggttttgtcgtttctaatacagacagagatgtgctgattttgttttagctgtaacaggtaatggtttttggatagatgattgactggtgagaatttggtcaaggtgacagcctcctgtctgatgacaggacagactggtggtgaggagtctaagtgggctcagtttgatgtcagtgtctgggctcatgacttgtaaatggaagctgatgtgaacaggtaattaatattatgacccacttctatttactttgggaaatatcttggatcttaattatcatctgcaagtttcaagaagtattctgccaaaagtatttacaagtatggactcatgagctattgttggttgctaaatgtgaatcacgcgggagtgagtgtgcccttcacactgtgacattgtgacattgtgacaagctccatgtcctttaaaatcagtcactctgcacacaagagaaatcaacttcgtggttggatggggccggaacacaaccagtctttttgtatttattgttactgagacaaaacagtactcactgagtgtttttcagtttcctactggtggttttgatattgtttgtttaagatgtatatttagaatgacatcatctaagaagctgattttgctaaactcctgttccctacaatgggaaatgtcacaagaatgtgcaaaaataaaaatctgagg

SEQ ID NO: 80 - DNA, 3080 bp, Homo sapiens
gaaataatggaggaattgcgtagcctggacccacgacggcaggaattattagaggccaggtttactggagtaggtgttagtaagggaccacttaatagtgagtcttccaaccagagcttgtgcagcgtcggatccttgagtgataaagaagtagagactcccgagaaaaagcagaatgaccagcgaaatcggaaaagaaaagctgaaccatatgaaactagccaagggaaaggcactcctaggggacataaaattagtgattactttgagcgacgagtagaacagcccctctatggtttagatggcagtgctgcaaaggaggcaacggaggagcagtctgctctgccaaccctcatgtcagtgatgctagctaaacctcggcttgacccagagcagctggcgcaaaggggagctggcctctgcttcacttttgtttcagctcagcaaaacagtccctcatctacgggatctggcaacacagagcattcctgcagctcccaaaaacagatctccatccagcacagacagacccagtccgacctcacaatagaaaaaatatctgcactagaaaacagtaagaattctgacttagagaagaaggagggaagaatagatgatttattaagagccaactgtgatttgagacggcagattgatgaacagcaaaagatgctagagaaatacaaggaacgattaaatagatgtgtgacaatgagcaagaaactccttatagaaaagtcaaaacaagagaagatggcgtgtagagataagagcatgcaagaccgcttgagactgggccactttactactgtccgacacggagcctcatttactgaacagtggacagatggttatgcttttcagaatcttatcaagcaacaggaaaggataaattcacagagggaagagatagaaagacaacggaaaatgttagcaaagcggaaacctcctgccatgggtcaggcccctcctgcaaccaatgagcagaaacagcggaaaagcaagaccaatggagctgaaaatgaaacgttaacgttagcagaataccatgaacaagaagaaatcttcaaactcagattaggtcatcttaaaaaggaggaagcagagatccaggcagagctggagagactagaaagggttagaaatctacatatcagggaactaaaaaggatacataatgaagataattcacaatttaaagatcatccaacgctaaatgacagatatttgttgttacatcttttgggtagaggaggtttcagtgaagtttacaaggcatttgatctaacagagcaaagatacgtagctgtgaaaattcaccagttaaataaaaactggagagatgagaaaaaggagaattaccacaagcatgcatgtagggaataccggattcataaagagctggatcatcccagaatagttaagctgtatgattacttttcactggatactgactcgttttgtacagtattagaatactgtgagggaaatgatctggacttctacctgaaacagcacaaattaatctcggagaaagaggcccggtccattatcatgcagattgtgaatgctttaaagtacttaaatgaaataaaacctcccatcatacactatgacctcaaaccaggtaatattcttttagtaaatggtacagcgtgtggagagataaaaattacagattttggtctttcgaagatcatggatgatgatagctacaattcagtggatggcatggagctaacatcacaaggtgctggtacttattggtatttaccaccagagtgttttgtggttgggaaagaaccaccaaagatctcaaataaagttgatgtgtggtcggtgggtgtgatcttctatcagtgtctttatggaaggaagccttttggccataaccagtctcagcaagacatcctacaagagaatacgattcttaaagctactgaagtgcagttcccgccaaagccagtagtaacacctgaagcaaaggcgtttattcgacgatgcttggcctaccgaaaggaggaccgcattgatgtccagcagctggcctgtgatccctacttgttgcctcacatccgaaagtcagtctctacaagtagccctgctggagctgctattgcatcaacctctggggcgtccaataacagttcttctaattgagactgactccaaggccacaaactgttcaacacacacaaagtggacaaatggcgttcagcagcgggtttggaacatagcgaatccgaatggatctgatgaaacctgtaccaggtgcttttattttcttgcttttttcccatccatagagcatgacagcatcgattctcattgaggagaaaccttgggcagctccggccaggccttgtaggaaaaggccccgcccgaggttccagcgtcaacggccactgtgtgtggctgctctgagtgaggaaaaaattaaaaagaaaaactggttccatgtactgtgaacttgaaaacttgcagactcaggggggtccctgatgcagtgcttcagatgaagaatgtggacttgaaaatacagactgggctagtccagtgtctatatttaaacttgttcttttcttttaataaagtttaggtaacatctcctgaaaagcttgtagcacaaaggctcagctggggatggtgtttgacttcggaggaaaaaagttgctattgcccgttaaaggcactagagttagtgttttatccctaaataatttcaatttttaaaaacatgcagcttccctctccccttttttatttttgaaagaatacatttggtcataaagtgaaacccgtattagcaagtacgtggcaatgttcattccaatcagatgcagctttctcctccgtctggtctcctgtttgcaattgcttccctcatctcagtagggaaaaaattgagtgggagtactgagatgtgtgggtttttgccattggacaaagaatgaggttagaagactgcagcttggagtctctctaggttttcaactatttcttcacaatttgaacacttgacggttgtcccttttaatttatttgaagtgctatttttttaaataaaggttcatctgtcc

SEQ ID NO: 81 - DNA, 56093 bp, Homo sapiens
aagctttacgaggtatgagtatggtaacactctatataaatccctttttcattagaaagacaggaatgttatacataatgctgtcaatctaataaatacacatatcatctagtctttaacttttctgtttatcatttagtcattaaaatttctttggctttctaatgtttttgataaaatttctaaaactctccatatttaatggaggcctatttttttttctagccagaactttttgtagactacatttctggaagtgctcactgacaccactctgaaaaattagtacttagaatatactctaattggtataaatgatctctgaattgctatggaaaactgggagaatggttgcttcaggggagagaaagtaggaggctgtggacagcaatgaggagaattacagttcaccatataacacttttgtacttttaaagtccttaacatttacattattatctattcaattaaaaaatattgggaagattttactttgaacagttaatttttcccccatgggtaccgctgtcatatagttccaactaatcatgaacttgtgtatttcctgttctttgtaaatttaaactttgtaactcaccaggaagtttgaagccaaatttgtgtttcaaatatagcaactccaggatctctaggcagatgcatttgcatttgattttaaatgaatcttgatcccttactctcacttatgttttcccacatcctactttttttattttgttgtaagccatctaaaattctcaatgggatgaaactgggtataaatgaatacatgcatacaggaattatagtagcatattccttttcttttttctttttttttttttttgagacagagtcttgctctgtagcccaggctggagtgcagtggtgcgatctcggctcactatagcctccacctcccaggttcaagcaattctcgtgcctcaacctcccgagtaattgggactacaggtgcatgccaccacacctggctaatttttgtattttttagtagagatggggtttcaccatgttggccaggctgatctcaaactcctgacctcaaagtgatctgcctgccttggtttcccaaagtgctgggattactagcataagccactgcacctggcctccttttctgagttttataaaatttgatactttactgcacgctttgagactgtattaattgaaccatgttgatgaacaagtttttgtgatgggtatattaataaaatatagatcaaatttttatagttaaatcaatatcgagcttttctagtgctttcaaaaggacaacctgaattttcccagcactgaaatgatactgaaaccatttcatatcttctgtattaaggaaaaaggcttgaaaacatacaaaaaaccctagaggtggctttctcagaggcagtgtggatgcagccatctgttgtcctgctggatgaccttgacctcattgctggactgcctgctgtcccggaacatgagcacagtcctgatgcggtgcagagccagcggcttgctcatggtaaatgcatccaccactggcttaaggtcttgttcttttgtcagtcagcatttttagtcttaacaataaatctactctcttcagagaataatatatgtgttatgttaagtgttgtgtttgaggcccctgatggcattctacagttgtcctatagactgtaatagcaaaattggtagagtaaaaacagtgtgaaaattctgcaacttcatggttagtcctttagggtttttcattctcccttacttattgtttaatttacagatttactcttttgttcatttgacaaatatttgtcaaatgcttgtgcacagtctgtattctcaaattctaggagaaaaagaagggtgaacagtattagcgcagaacgatactaataatgatggctactgtgtatgagtagccagccctttcttggctttcttggattgctttgtattctacatgaagatattccctgggctttacaggtcaataaatggaaattcagagagattaatttgaccagggtgaccaacaaggagatgacagcatacactatgcgagaagtatacacagagtagtgtaggagcatataacctaaactgggggtgaggtgggataaggagttatcagggaaggctttttggaggagttgacaactgagccgagttttgatggaagagtagaaattagcatgaaccaatttcatgctaataaagaagcaaaggaagcgtggtctacaggcaaaagcacagaggtacaggaagtaatgatatgttggggaataccctgttgactggagcttagagtgcaaggagaggagtgctagggaggtgaggttggagggtttggcagcattgacttgcttcaaggttcttaagagctgaaatagatataaaatgcaactaagagtggcttggattattattacctagtgtgttaatctcaaattttgaaatctatagcatctataggactggtgttactaatcttacactcgatctgttactgttcttatactagatctattagtccagtgtttaagggagtggtgcagatttctaggtcaggacaggactcagatgtacattattaatgcctatttcagttctgaccttctcatatgaaaccttataagacctggggtaggaagagattgttctggaagtcataggaatatgaactgtattttgtttaacaaacaatacagtatggaaatttatcacccttccagaatatttatttcagagacaaatttttatcattcgttcatttatttcataagatccacgagtagggaacctcactagacattgctctgagtatatggtctgagtttgcagtacctcttgtgtctccattagatttattaggtcctcaatagataaatcagggaataactagatggattcattttttaaagacatgaaagagcgataccatacatactgcaccttaaaggtcaaccttagagtatcattatttttaatgaatgtataatttttaaatttcatgtttacttttcctaagcttttgcactatattgcttaattccagctttgaatgatatgataaaagagtttatctccatgggaagtttggttgcactgattgccacaagtcagtctcagcaatctctacatcctttacttgtttctgctcaaggagttcacatatttcagtgcgtccaacacattcagcctcctaatcaggtaatacactacttgtaaggattattgaattatgtcccttttatagaaattatttttcaattttattagtaattcgtggctttaaatttatgcttctcttaatgattttaaggatatgtaagtcaacatttggtgcatattgtgctagaggcataaattataatttatagccacctgaaatgttagtatgcgctttccaagaaaatgacttttttgaaaatggtatttctttgaatgagaaagaacagagagaaatagatagatggcttttaaacacttcattaattaaactttttttttccaccatcacataatggcacttagtcccctttgggaactcatgagggttttagtggtagtgagctgaaagaaatatgttccaggactggcaaacatattctaaattctttaaaattttcacctagcatctaccctaaatattcagaccctgtgctagttaactgctattgaagaacaaaggtattatatctattattaaggataatagaatggtatttgagatattggtcattgaatatgaatatgttttgagaaataagttttataggaaccaaaaaaaaattcttaaaggaaccatatattactaaaaatgcttcttattggagaaagaaatgacaatcatttattaatgtgattttttcacaactttattaagatataatttaagtacaacaaactcacataaagtgtacaatttgatcagttttaacatatgtagatgccatgaaaccatcaccacaattaaggaaacaaacattttcatcactccagaagtctcctagcccttttactacccattcctcccctgctccatccccagacaactaccaatttgctttctgtcactatagatttgtcaacctgattttctccaaatatacattcaaaaatatacagttgaatacaattggaaattcgaattttgtgtttttttctttaggaacaaagatgtgaaattctgtgtaatgtaataaaaaataaattggactgtgatataaacaagttcaccgatcttgacctgcagcatgtagctaaagaaactggcgggtttgtggctagagattttacagtacttgtggatcgagccatacattctcgactctctcgtcagagtatatccaccagagaaagtatgttttactattaaaacctgaacttggaatcttctttctattgtggagaaatgtaattgtagtaagacaagaattaaatatattccattgtagtatttgaataagcagttatttgagtagaaaattagtgtttccagctaagatgatggcatattttgaaaattcatatagtgaatataactagtaaaagaagttttgtttatttttaaacagaattagttttaacaacattggacttccaaaaggctctccgcggatttcttcctgcgtctttgcgaagtgtcaacctgcataaacctagagacctgggttgggacaagattggtgggttacatgaagttaggcagatactcatggatactatccagttacctgccaaggtatgtttaaaaaaagaaaaagtgaatacttactcccagaagaaccactgtattattggctttggctttatgtgtcagcttgcccaatctccgtgtgagtcaacaagtgtttactgagttaccaaataaatgtcttaacactattttaggtactttaacaaattttaattttattaattaattttttattagaattgagacctcactctgtcatctaggctggagtacactcacagctcactgcaacctcaaactcctgggctcaagcaatcctcctgcctcagcctccccagtagctagaactacaggcatgaaccaccatgcccggccaactctttaattttcttagagacggagtcttgctatgttgcccaggcagacagattttaatgtgtatgatgcagtctttgatgataagaaacttataatggaaagctgaggtgatagttacagtaaatacattttgatgtataattctgtttgctttaatcattcaaattgtagtaaagcaagatgaactgtctgctgggatttgagcagaaatggataggaataaactaggaggtagaagagttatcaaggttcacaggactgatgggtgaagctagatttccagacccgggatgtcagtccttgaaaagcagacttggcaggcatagacgaggcagatagcaggataaaggagacaaatgtagattgttcttcagaagatcagatggtagagtctaggaggtagtgtgttttaatcagagatctgagaggcaaagatcattgcatgagatcagggacccatgcaaaggagtgagaaaaaaaactgggttaaggagcctgctgcatggcaactcctgggaacagtggccactggggcctgggacatgttgattgcagcccaggactgttaaaaccagtgtgagagaacatgggtatggaagtactagctagcaggatcatgaccccgatgctgggatggggcatcaagcattagtacatggagattcagtacatccagatgcagtacatggagactatatgcgtaactgctgactttgggcttctttcagattggagcagaggtagaggtgagtgggaatattctcaatagagggaactaaataggcatacctaataaaggagaccaggatattgcagacagtagcctcatgtttggctcacctgttcaaaaagttctcttgttcttgagcagtggtgccttaaaaggtaacttgagaagcagtcgattatttgttcagcctggagactcttgggatattttactatctttgattgaatagatttaaatgtacacagctctcataacttgccccatgaagcatatccatgaaaggcactatacttgttaaaagattggtttgtactttttaaatgtagtacttttaataaaacaggaaaaatagaagttctgatgcagttatatgcattttatatagaatgtgttcttaattggaaaaaatttgtcgtagttcctttgagttcatttacagtttttagtaggaattgtattttctactgttgtacttgctgttactaaagaaagatggtcgtgattaccatctgaattttttttctatacattgatctttagctgctacttagtcatttctgtttagacttgagctctttttcatattttttttttttgtttctcagtatccagaattatttgcaaacttgcccatacgacaaagaacaggaatactgttgtatggtccgcctggaacaggaaaaaccttactagctggggtaattgcacgagagagtagaatgaattttataagtgtcaaggtatgttgtctacttatcttctttttttatttaggtaaaattaacataaatgcagttagccatttcaaagtgtaaattcactggcatttagtgcattcacaatgctatgcaaccaccacctctctctaatttcaaaactttttcattccactcctcctcttgcttatcccctggcaaccattcatctgctttttgtctctatggatttgccttttctgtatatttcatataaaacaaatcatgcaatatgtgaccttttttgtctggcttctttcacttatgtaatgttttcatggttcatccaggtagtagcatgtatcagtacttcattcctttgcatgactgaataatgttaccatactttgtttatccacttatcagtggtgaacatttgaattgtttctaccttttgactattatgaataatgttgctgtaaatattcatgcacaaatttctccacggatatgttttcatttctcttgggtataaactgaggagtagaattcttgggtcttagggtaattctctaacttttcaaagaaccaccaaactgtctttcacaccaactgcaccattcccactagcagtgtggggggttcctgattctccacatctttaccaacaccattatgtttctcaattgtgggctagtctcacatttggaaagctagtgggagcagcgatccatctattaaaagttgtatgaaattgagtaatgagccacctctctcttgtagggcttattatgttcttgcttaaggcaatcttcatgcattgtgaacagaattatacataaatgctcagataaaagggcaaaccattcttaaagggagtagacaactagaggcaggagaccatactgaggcaggaagctggggtttttatggttctgttacttttgactatatctcaccattgcttttgtcaaagtgagactaggtctaagtttttttcaggtataaggtgagtgtggtaattaaggggcatgctagcagatcattttgggtaatgcttcacagtccaccactggtgtgtcattgtggtcgcagatccagtatcttagctgtgtaatttcagacatcagcaatattagtttaacaaagggcaattagattccaagacaaaggaatcgtgtattattctagccttattcaaacttgatttataaatcagtttagtaatttatttatttgtttctgtatttatttttatttctttgagatggagtctcactctattggccaggctggagtgtagtgatgcaatcttggcttactgcaacctctgcctcctgggttcaagctattctcctgcctcagcctcccgagtagctgggattacaggctaatttttgtatttttagtagagatggggtttcaccatgttggccaggctggtcttgaactcctgacctcgagtgatctgcccgccttggcctcccaaagttctgggattacagacgtgagctaccgtgcccagctcagtttagtaatgtataactgggttttacccagttgtaaattactcttttgtcgtgtttttttgagaactggcaatgacggagaaactaaaagtgccaggctgttgccttgttcctgttattttgccttagttttttttttttttttttttttctctgagactgagtcttgttgtgttaccaggctagagtggagtggcatgatctcggctcactgcaacctctgcctcctgggttcaagtgattcctgcctcagcctcccgagtagctgggattacaggcgcctgccaccgcacccggtgaatttttgtatttttagtagagacgggattttaccatgttggccaggctggcctcgacctcctgacctcatgatccaccagcttcggcctcccaaagtgctgggattacaggcgagaaccaccgtgcccggtcttgccttagttatttcttgttccctcctctagtcctatagttctctgactgtattgaggaaatgtaattaaatattattatgttaatagatatttatgtggttgaatattagaaattccttattttggtcacatatcctgatcagtagttggtcttctggagatagtgatttttcactagagatgactttaggacctattcaggttttttttaagatcccaatttaaggaaagactattctcattattgattttgctatatgcagggaaatttatttcgaaaggtttttcagttggcttttagggaagattatatattctctttttttttttttggccttttcccacatgttctaaaaatgatatattctttaactcctatgaaaatacattgtttcagtaattgaagatgctgattaaagtcatatctctacacattttttaaaatttgagatagatgggactttgtcccttcttacaccattcacttattcacttggaaaaactattatccaatacttatgtggcagacactgtttctggcacaagggattcagcagtgaacaaaactgcctttttggagtttacattctactagtggaaagcgacaacaagcagatagacacattcagtatataattcactgtcagatggtggtggtaagtcctatgtaggaagaaaagcagggtaaggaggcttggagtaactggagtgagtcatagatggacttgtcaggaaagggtttctgaagaggtggtatttgggcagagatctaaataaaatgaagcaacaagccatgagaatatccgggggaaaatgttctgggcagaagcatcaagcatagaacttgtggtatgatatttattctagcacacattaattttaaaaatgtataaaagacatccatttaatcatattaaagatttccatgattcatttagacttagtcagaaaccaaatttatattttctttttaaataattttatctcaactcttattttacccaataggggccagagttactcagcaaatacattggagcaagtgaacaagctgttcgggatatttttattaggttggtagcctatgaatgtttttaaagtaactgactctgttattatttatcaatcagtgctttttttggtcttgttttttgaagaactgatatttgaaacctgtggtttatgtgaattattaataagctagaggacgtggattctctatttcatcaaataatacaaaacattttagatattaaattttggaaattatttggttttgttttacaatagaaatactcctcaaagtggaatcgaagtggttattcaaagaaatctcagagtagattcttatatgaagcaaataattgcccctaatttatctctaaattttgtaagttctaaattcttttttcccccagtttctaatttatctcttataagtcaagagtccatctggccaatttaatttcagtgagtgtaactattttgcatatattaaaaaactgtatatgaatacagaagatggtatttaaggatgaaaataattattcaaatgtgatagcattatggggagttttaaaataaaagttactgttttattcttccaaaaattttattataaagtatacagttaagagaatatacataaaatacatatgcagcttaaggaagaataataaaatgaatacttcatgtattcaccaccgagtttaccaggaaaaagcataaacaaaataaacctcttccacgtaattcctgggttaaagagaagttatagtggaaaatatttgggagcaaacgataatgaaaatactatccattaaaattgttagatgttgcaaaactgatttcaaggaaaatttatagtgttaaatgtttagaaaagaaaaaaggttagaagttaaccacttatgtatctatctcatgaaattaggaaaattatagatataaactaaaaaatatgttaaaagggaaataataaagataagaatgaagtttaatgaaacacaaaacagagaagctcacaaagccaagatttattttttgaacaccgagtacaattgacaaatctctaacaagtttgattaagaaaaaagaaagcatgaataaacaattttagggataaaaagggaaacatcgctaaagatatcccagaaatgtaaaagataataagggaatattatgaaaatattcatgccaatacatttgaaaacttaggtgacatagacaaaaacaaaattgaccaaaattgagcaaaaaagaaacaaaatctgagtagtcctgtaacttagtaaaaattgagttagaaaagttaaagaagtctttacacaaatcaaacatcagactcagttttctaggagagttttgccaaacattcaagtagcagataattctggtctatttttggccccagaagatatattttacttgccatgcatttaatgagatagctgttgatttttttcaatcaccgtgacaggtgttttatattaggtgttattcgccagacatctagtccacctgttgccagatatggaattaatattcacttattttgaattaaaatttgttaataaattaataaaacaaagtcaaagttcaaattattaaaaaagtaaaagaaataaaatatattttatagagagcccttacaaaacagtaccaacataatgagctttccaaattttgaatgggcaaaataaatgaataggcatttcacaaaagaaggaagggtggccaataagtatatattaatataaaaatggttacttgtaataggaatcaaaagtgtttgacttattgactaagagtcagtttttgttttgatccctgttagtctatccagaaggcatgggtcttaataaacaccttgacctcaacagtttactgaatacaagggtaatttcatatgccttgccttctttaagggtttgttgtaaagattaaaataaatacataaatatatataaatacatttatatgtatttatatgtaattacatacaacttgccttctttaagggtttgttgtaaaaattaaaagaagtatataaatatatataaatacataaaataaatacattcatatatgtatatgaaatcactttgccaactatgaagcctgattcaaatatgaaatgttgtttgtttttcccagagcacaggctgcaaagccctgcattcttttctttgatgaatttgaatccattgctcctcggcggggtcatgataatacaggagttacagaccgagtagttaaccagttgctgactcagttggatggagtagaaggcttacagggtaataattataaatacagaaatagaatgttataacaaaatgtcatcatgtcatcagattttggtaaaaaaatgttcttttttcctctaggtgtttatgtattggctgctactagtcgccctgacttgattgaccctgccctgcttaggcctggtcgactagataaatgtgtatactgtcctcctcctgatcaggtgacaatttcatatttagagtccaaaacccaacaaatgctacactctttccttgtgagctttacttctgccaggtaatggcaattgtccttagaagaccagctttcttagggaaaagctttagccactgtttgctcaaagcataaaaagattctgaattagatgcaaagcctttttttggcccagtgcaagtctgaaaactttgtaatccttctgtgttggctgattggggaaaaaaaaatgcaagaaacctaatgtattatattttcacattatcttctgttcaaagattacatacttccattatcctgtcaaaaaaaaaactctgatacagaatcaagcatgtgaatcgtaagcatgtaagcaggtttcatagagataatttttcaactcttccttgtcctgtgttgttccaactcttattctccaatttagaagcaaacaaataaatgaatgaaagaacagatagacaaatgaatagtcaaaggtataaagtatctgtatatatgttacatgtagctattatttaaattatttagattttccttttgaaataccttcttggcacacttgcctaaatctagaaaataagcactgtgtgaataagaaattatttacactgaatattttgtaggtttttgggtttttgtttttcagacaaggtctcactttgtcacccaggctggagtacactggtacgatcacaactcactgcagcctctatggcccaggctcaagcaatctccccacctcagcctcccgagtagctgggaccacaggcacacgctaccatgcccagataattttattattaatttttgtatagagatggggtctccctgtgttgcccaggctttcttgaactccagggctcaagtgatcctcccacctcaacctcccaaagtgttgggattacaggcgtgagccaccatgcccagccttaagagtgtttgattttcattcattttcctatatatattatttctgttggggaaaaaattccaaggaagataaatagtaggctgttggtacatttctcaacttacttataaagctttttagatatataaggttaatttatgaagaaaatcataagatacacaatttaagataatatttttaattttattttttatttgttaaataaatttttctcctttcaggtgtcacgtcttgaaattttaaatgtcctcagtgactctctacctctggcagatgatgttgaccttcagcatgtagcatcagtaactgactcctttactggagctgatctgaaagctttactttacaatgcccaattggaggccttacatggaatgctgctctcgagtggactccaggcaagttatatgaggaagttgttatgacattttatgagtgataaaagaagtacaatgtcaaaatttccaccttaaaaaatgctattttttaaacaactttggtaaaactgtatagaaacataaatttacctttagttgaatgttccatagttggaatatgggttttgcagagaatttataattatgaagtttgatgtctgtttctttaacattaccttaatattggcaaaaacatgttggtgtttgcaaggatattatttaaattgggataccatgaattaaatactacaaacaaaaataattagagttttttgtttgtttgtactttaacttttaaaaaataatcagttaaagttgttgttttgaagctcacattgttccaatctggccaataggagccccttttgtatggctcctgtatctttatgacatgtcctcatcattcttgaatcacttcctcacttccagatacagtaagttattcttggccaggtgcagtggttcacgcctgtaatcccagcactttggcaggccaaggcaggaggatcatttgggcctagtttgagaccaaatcatggttgcacaaactgtacccactatggacaacagagtgggatcttgtctctgtgaaaaatttaaaaattagctgggcatggtggcacatacctgtagtcctagcttcttgggagaggctgtggcaggaggatcgcttgagtaaatccaggatgcagtgagccatgcttgtgccactgcactccagcatggatgacagaatgagaccctgcccccaaaaaagaaaaatattcttggtttatcttgtactttctgtatcccagccctagcatcagccttttctctaaagacagtattatgattttaatatttacagtagatatttgaactgttacattatagactttaccatatattttctaggaaggattattctattactcttctttaccacatttgtttggaatgtctacagaacctacagtttctaaatcagaaactccctaggtttttgctattttggcaagccattgaagttcttccctctccctttactaccagaaaggtgtgtatttgtagagctctctataatgagaaagcactctataacatggttgattcatcattttggagtagaaaagtatgaatggaaagtcagagacataaaaataaagcccagaggtctgagtcttagcttcattacagactttcttgggggatggttggtaaattatctacacattctatcttgtctttataattttaatagttaaatttttaccatgtgcctcaaaaccgttagagaattaatgagctctttgaaaaatgcttctaagtttcttgtattgctctaatagaatgctatctatgttattatttatttctgagactaaaattgtttacatctttaaactggttgtccttttgtgtattttaggatggaagttccagctctgatagtgacctaagtctgtcttcaatggtctttcttaaccatagcagtggctctgacgattcagctggagatggagaatgtggcttagatcagtcccttgtttctttagagatgtccgagatccttccagatgaatcaaaattcaatatgtaccggctctactttggaagctcttatgaatcagaacttggaaatggaacctcttctgatttggtatcttgtgcagtcatcattatacagttctgaaatataaagctatatgttggtgtaaagttgcagtgatttctctcctaaccagccccacatattcttcctggttggttggttcttcagtaaaatagtcttgtttcttgcttacactaattggtaatttgcattccttgttaagattttcaagacagggctgggagcaaggaaccaaagtagcgcgtggttgtgattacctttggtttctttgaggtttctcttacctagtggctttaaaacatctttaggagcagttccattttatagtaaacttaaattctgttatcatgaacagttgaggataatgaataatttgatacaataatgtaagaaattcctgaaaacaaagtgttatctgtgatacttttgctgcatagtaagcacaatgaagtgtactgataatgtttcaacaggaaagtgttttgattaaatgtgggcagtatcactgttctactagcattcaacatctcttctaaaaattaatagtggttcactgtaattttattggtacatgtaacatctgtacatgtgtttggttatctatatgtttcctggttttttgtacatttgctttattaatttaggcttttttttttttttttttttgagacagtctcactctatcatccagactagagtgcagtggcacaattatggctcactgcagccttgacctcctgggcttaggtgattcttccacctcagcctcctgagtagctgggactacaggcacatgccaccatgcccagctaatttttgtatgttttgtagagacgaggtttcaccatattgcccaggctggtctcaaactcctgggctcaagctatctgcgtgccttgacctcccaaagtgctaggattacaggtgtgagccactatgcctagcctaactcagactttaaaaatataaaagcaattcatttttattcccaagaacagtaaggtggtggtttaattttagtctttaattctgtttttaatttattctatttagaaatgtcccagaaacttagtataactttactttctgaaaatgaagaaacctgtccttgggcattagtgtgttggatttaagcaacaaagttaaaaaaacctaccctgtgttatggcaattttcacttgatggtggttctataacacaggtatcagtgaacctttataaaagatgaacaacttttcagcttgcttaatttcagttaattaacatgtatacttatctatgttaatgttttattgcttaaaatgtttaatttttatatttggtaaacagatagttttttctctccccctcttccttccatctttcattactacaatttaccatgcagagctcacaatgtctctctgcaccaagctccatgactcaggatttgcctggagttcctgggaaagaccagttgttttcacagcctccagtgttaaggacagcttcacaagagggttgccaagaacttacacaagaacaaagagatcaactgagggcagatatcagtattatcaaaggcagataccggagccaaagtggagtatggctttttccccctcattataattgttaaaacttcttaaaaattgtttcacccttttgatatatatttctttgacttataaacgagctatatttataaacaagggaccagaacacattaactcagtcatggttatgtgcttccttgctttcaatgtttcattatcttataaggaagagaacgtatggtctcttgaaaaaactgacaataagaagtaacaactggactaccacatttttttttacatccttaatttaactcttcgtcaatttctttttttacttaaggaggacgaatccatgaaccaaccaggaccaatcaaaaccagactggctattagtcagtcacatttaatgactgcacttggtcacacaagaccatccattagtgaagatgactggaagaattttgctgagctgtaagtaacagattctgttttggaagtacagctactattacaagtgacatagtattacacttaaacctttaaagttcgtgtttaaaataaaaatattttgaatatttaaaagctaattcaaaaaatatgtgtcgtagctatgcattaaaaaaccccaaaatgtcagaagtacagaagtcaaaattgagttttcattaaccagttcatttgattatatttgaattattcataatggactcatttaattttagtaactttgggctgggtgctgtggctcatgcctgtaatcccagctctttgggaggccaaggcaggtggatcacctgaggtcaggagttcgaggcaagcctaaccaacacggggaaaccccatctctactaaaaatacaaaaattagccaggtgtggtggcatgtgcctgtagtcccagctacttgggaggctgagacaggagaattgcttgaacccaggaggtggaggttgcagtgagccgagattgcaccactgcactccatccagcctgggccacagagcgagactgtgtctcaaaaaaaaaaaaaaaaaatttagtaacttcgaagaaataagaaggaaaattaaaagttgaaagtgattctaatgtatagtttataaaattttgttataaaaatacctgttttgccttcaaaataatttatattaatattttattgacctcaagaacatttaaatacattcagatttattcatttgtggaccacatttgttatacattggatttaaaggatccttgcaattgagtttatggccacctatgcatctgagacccatggactgggaaccattctaggtcaatgattcagtgtgattcaatttaagagatgtttattcctggtctttagaagctgctaccttttgttatctaattttgcagtactttgaagtatgtatgtatgtgtacatacgttagtgctatgtatttattaaagaagaatcagaaaacagaggtaaggaaaaataaggaaacaaatttctgttaagcccaccacctcccaaagcatatttgtttatatgcttatatatgttttcctattatggtaagaacagtctgtacatattgctatatagcagtccccctttatccacatacatcctgaaaattgttttacattttaaatgttaactactttattgtttttaaatgtcattttatagtgtagctatgccacaatatccaatttttagacatttaaattgctcccaggcaatgtggtaatgaacattcttgcagctgaatatatgcacatatctaattgtttcactaggatagaggtggaattgtataacagggagctcacattttttaaggcttttgaaatgtattgccaaattgcctgccagatatactgcaccatcactaacattgtgtgttgcagtatttttctaaacttggcccttttgattttagaaaaatgatatcaataatttacatttctttgattaaagtgtagaagttataatttttcatattattcattgtcatttgtattttatcttttctaacttgtctcttcatcccctttgctccgttttctattggagtgcaactttatttgtaagaattctttttaatttctgtgactggaatttttttttctagtttgttatttcccgttcatttcttaaaatataattgtgtttgccaacaatccattatcttttgttttgtaatggtagtatttatacatattaaattatctctttcttttttcagatatgaaagctttcaaaatccaaagaggagaaaaaatcaaagtggaacaatgtttcgacctggacagaaagtaactttagcataaaatatacttctttttgatttggttctgttaagttttttgatggcttttccatatgttgtaacaggaaaaaaatggtgtctatgaatttcttcttaatttaacaaatttggttaatttataaaatcacagattggtaaatgctataattatgtaatgatcaggattgagattaatactgtagtataaattgggacattataacagattccatattttatttcctaaaatctaaattcagtctttaatgaaataatattagccaaatggtggaactaatttatttcttttgaggaaaagataataaagaatgtaattaaatttaaatttcttggaattcccagttgtatattcatcacctttgtagcatttgacaaattttatgcttagcagcttcttcactgttttgaaataaaatatcctattacctactgatacaattatctgttctttgtatatcaaaaaatgtgaaatttacacataattcaaatacatttaattatccgctcaaccagaaatgaaatcacatccctctactatactacatccagctccaagcccaagatatttaaatgacatccattcctctcctagttccagttatgattttatcttgatattctctcatatatgaactaaattataaagttagccaccatcaatacaatctgcgtatctaatatcttaactatatagtaatggggtaagggaacagcaaaaaggagaacattaattaaaatatacaagtaagcctgggcaacatagtgagaccccatctcttaaaaaaaaaattagccatgcatgatggtatgcctctagtcccagctacttgggaggctgaggtaggaggatcacttgctcccaggaggttcaaggttctaaaccagcaaagctcagaatcccaggggatagaaacaaagacttagtggatcactagtattaaactgagacacgtcaccctgcattgcactttgtttctcagttctttgatgaaatcactgagctgacatacctgccctcttttcaccataaagtgagtttcatgatcagaagcaatgtctatgggatagcctaacaaacaatgtaaaaaccatttagtaagttcatgaagggtggtggtggtaaaaatttggagaacatacaaaacaaatacaattccaaggtgtgtcccctccaggaaggacaaattgctgcctgctctgtgatagaagaggatcagatgtaatcaacctgccgtcagacttgggctgttctctcctgggtgtggacttgcctggttggtcactgctgctgacaagtaggctgtcaatatagctgggttgtcatgtcagctgtggtgagggggaagtccacattgtggaggccacatccctgcactcttggccaatttgaccatgaatcttaagcactggggtggctggaaaagacagccgattgacatccatacagaggtcatcttgaccacttgattagtataagcactgaaggcttttaactgagcattcacataggacacaaatattctgattctttgggcccattccaagaactctgggcatacttttcctccagacctcatacccagttgtgttctttccaaatttctggtcatctggttatgttattagccactatctgtgaatcagcatagatttttatatcagacatctctacctcctgacagaatggaggagatatgttacttaacaattctgttcccttggaagatttcctgtctccactgtttgtaagggctactccctcaatgtagcagtaatgctttcactctgatgggaagtcacagtggaattctgggtctccaagaattagtgttagtgcatacacagtgtctgataatccccagagtgtctggtgcccttggatcctgtgaagaaggcttggagaaaagaagattcatggcaagaacttgtgatgtgatgacagggccttttctctggctcttcattcttagtctgacctaggtgtgagaattaggtcaggggccatgactatattgtggtgactcaaaccaggcctttgtttactaactgggagatttttacattgtaagaatcaagtaggatctttgcccatgtattttggtcttaagaacacaaatgatatggctccaatgactggaggaacaccagggtccttggtctcacgctgatttagataaaacgactgtcaggcctctgagcccaagctaagccatcctcccctgtgacctgcacgtatacatccagatggcctgaagtaaccaaagaatcacaaaagcagtgaaaatggcctgttcctgccttaactgatgacattccaccattgtgatttgttcctgccccatcttaactgagcgattaaccttgtgaaattccttctcctggctcaaaacctcccccactgagcaccttgtgacccccgcccctgcccctaagagaaaaccccctttgattataattttccactacccacccaaatcctataaaatggccccacccctatctcccttcgctgactcctttttcggactcagcccgcctgcacccaggtgaaataaacagccttgttgctcacacaaagcctgtttggtggactctcttcacacggacgctcatgacatttggtgccaaaacctgggataggaggactccttcaggagaccagtcccctgtccttgccctcactctgtgaggacatccacctacaaccttgggtcctcagaccaaccagcccaaggaacagctcaccaatttcaaatcaggtaagcagtcttttcactctcttctccagcctctcttgctacccttcaaactccctctctcactacccttcaatctccctgtccttccaattccagttctttttcatctctagtagagacaaaggagacacattttatccatggacccaaaactccagcaccagtcacggacttgggaagacagtcttcccttggtgtttaatcactgcggggacgcctgcctgattattcacccacactccattggtgtctgatcacggtggggacacctgccttggtcactcacccacattcccttggtggtacgtcaactgcaaaagcaggggacgcctgctttggctgctcacccacccccttctctgtgtctctacctttctctttaaacttacctccttcactatgggcaaacttctgccctccattcccccttcttctcccttagcctgtgttcttaaaaacctaaaacctcttcaactcacacctgacctaaaacctaaatgccttattttcttctgcaacactgcgtggctgcagtacaaacttgataatagctttaaatggccagaatatggcactttcaatttctccatcctacaagatctagataatttttgtggaaaaatggaaaaatggtctgagatgcctgacgtccaggcattcttttacacattggtccctccctagtctctgctcccaatgcgactcatcccaaatctttcttctttctctcctgtctgttccttcagtctccaccccaagctctgagtcctttgaatcctcctttgctacagacccatctgaactctcccctcctccccaggctgctcctcaccaggccgagccaggtcccaattcttcctcagcctctgctcccccaccctataatccttttatcacctcctctcctcacactcagtccggcttacagtttcgttctgtgactagccctcccccatctgcccaacaatttcctcttaaagaggtggctggagctaaaggcatagtcaaggttaatgctcctttttctttatctgacctctcccaaatcagttagcgtttacgctctttttcatcaaatataaaaacccagccagttcatggcccatctggcaacaacccttacaggctttacagccctagaccctgaagggtcagaaggccgtcttattctcaatatgcattttattacccaatccgctcccaacattaaataaagctccaaaaattaaattctggccctcaaaccccacaacaggacttaattaacctcacttcaaggtgtacaagaatagagtagaggcagccaagtagcaacgtatttgagttgcaattccttgcctcaactctgagagaaaccccagccacatctccagcaaacaagaacttcaaaacacctgaactgcagcagccaggcgttcctccaggaccacctcccccaggatcttgcttcaagtgccggaaatctgaccattgggccaaggaatgcctgcagcccaggattcctcctaagccacgtcccatttgtgcaggaccccactggaaatcggactgtccaactcacccggcagccaatcccagagcccctggaactctggcccaaggctctctgactgactccttcccagatcttctcggcttagcagctgaagactgacactgcccgatcacttcagaagtcccctggaccatcacggatactgagcttcaggtaactctcacagtggaggctaagtccatcccctgtttaatcgatacaggggctacccactccacatcaccttcttttcaagggcctgtttccctttcccccataactgttgtgggtattgacggccaagcttcaaaaccccttaaaactcccccactctggtgccaacttggacaacattcttttatgcactctttttcagttatcctcacctgcccagttcccttattaggccgagacattttaaccaaattatctgcttccccgactattcctgggctacagccacatctccttgccgcccttcttcccaacccaaagcctccttcatatcttcctctcatatccccccaccttaacccacaagtatgggacacctctactccctccctggcaaccgatcacacgcccattactatcccattaaaacctaatcacccttaccctgctcaatgccagtatcccataccacaacaggctttaaagggattgaagcctgttatcacttgcctgctacagcacgggcttctaaaacctataaactctccatacaattcccccattttacctgtctaaaaaccagataagtcttacaggttagttcagaatctgcaccttatcaaccaaattgttttgcctatccaccctgtagcacccaactcgtacactcttttgtcctcaatgccttcccccacaactcactattccgttcttgatcttaaagatgcttttttcactattcccctgcacccctcatcccagcctctctttgcttttacctggactgaccctgacacccatcagtcccagcagcttacctgggctgtactgccgcaaggcttcagggacagccctcattacttcagccaagctctttctcatgatttactttctttccacctctctgcttctcaccttattcaatatattgatgaccttctactttgtagcccctcctttaaatcttctcaacaagacaccctcctgctccttcaacatttgttctccaaaggatatcgggtatccccctccaaagctcaaatttcttctccatctgttacatacctcggcataattcttcatgaaaacacatgtgctctccctgccaattgcgtctccaactgatctctcaaatcccaacctcttctacaaaacaacaactcctttccctcctaggcatggttggatacttttgcctttggatacctggttttgccatcctaacaaaatcattatataaactcacaaaaggaaacctagctgaccccatagattctaaatcctttccccactcctctttccattccttgaagacagctttagagactgctcccacactagctctccctgtctcatcccaacccttttcattacacacagccgaagtgcagggctgtgcagtcggaattcttacacaaggaccgggaccatgccctgtagcctttttgtccaaacaacttgaccttactgttttaggctcgccatcatgtctccatgcggtagcttccgctgccctaatacttttagaggccctcaaaatcacaaactatgctcaactcactctctacagctctcacaacttccaaaatctattttctttctcacacctgacgcatatactttctgctccccggctccttcagctgtattcactctttgttgagtctcccacaattaccattcttcctggcccagacttcaatctggcctcccacattattctggataccacacctgaccctgatgattgtatgtctctgatctacctgacattcaccccatttccccatatttccttcttttctgttcctcatgttgatcacatttggtttactgacggcagttccaccaggcctgatcgccactcaccagcaaaggcaggctatgctatagaatcttccacatccatcattgaggctactgctctgcccccctccactacctctcagcaagccgaactgattgccttaactcgggccttcactcttgcaaagggactacacgtcaatatttatactgactctaaatatgccttccatatcttgcaccaccatgctgttatatgggctgaaagaggtttcctcactacgcaagggtcctccatcattaatgcctctttaataaaaactcttctcaaggctgctttacttccaaaggaagctggagtcacacactgcaagggccaccaaaaggcgtcagatcccattactctaggaaatgcttatgctgataaggtagctaaagaagcacctagcgttccaacttctgtccctcatggccagtttttctccttcccatcagtcattcccacctactcccccattgaaacttccgcctatcaatctcttctcacacaaggcaaatggttcttagaccaaggaaaatatctccttccagcctcacaggcccattctattctgtcatcatttcataacctcttccatgtaggttacaagccactagtccacctcttagaacctctcatttccttccatcgtggaaacatatcctcaaggaaatcacttctcagtgttccatctgctattctactacccctcagggattgttcaggccccctcccctccctacacatcaagctcggggatttgcccctgcccaggactggcaaattgactttactcacatgccctgagtcaggaaactaaaatacctcttggtctgggtagacactgtcactggatgggtagaggcctttcccacagggtctgagaaggccactgcagtcatttcttcccttctgtcagacataattccttgggttggccttcccacctctatacagtccaataacggagcagcctttattagtcaaatcacctgagcagtttttcaggctcttggtattcagtggaaccttcgtaccccttactgtcctcaatcttcaggaaaggtagaatggactaatggtcttttaaaaacacaccccaccaaactcagcctccaacttaaaaaggaggatagagcccaaaaactcgcaaccaagctagtaattatgctgaacccccttgggcactctctaattggatgtcttaggtcctcccaaatcttagtcctttaatatctgtttttctccttctcttattcggaccttgtgtcttccgtttagtttttcaattcatacaaaaccgcatccaggccatcaccaatcgttctatacaataaatgctccttctaacaaccccacaatatcgccccttaccacaaaatcttccttcagcttaatctctcccactctaggttcccatgccgcccataatccctctcgaagcagccctgagaaacatagcccattatctctccataccacccccaaaatttttgctgccccaacacttcaacactattttacattatttttcttattaatataagaagacagcaatgtcaggcctctgagcccaagccatcatatcccctgtgacctgcacatatacatccagatggcctgaagtaactgaagaatcacaaaagaagtgaaaatggcctgttcctgccttaaccgatgacattccaccactgtgatttgttcctgccccaccttaactgagcaattaaccttgggaaattccttctcctggctcaaaacctcccccactgagcaccttgtgacccctgcccctccactacccacccaaatcctataaaatggccccaccccatctcccttagctgactccttttttggactcagcccgcctgcacccaggtgaaataaacagccttgttgctcacacaaagcctgtttggtggactctcttcacagggacgggggtgacaacaacacggacacacatggagtggttttaaggagcagagagtttaatacgcaaaaaagaaggaagaggctcccctgtacagacacagagggagggggctccaagccgagagaaggaaaccccatgtgcagtggaaaagtggttgattatactgggaggctggaggaggcggtgtctgatttgcacagggcccaggggattgggttgaccaggtgtatcattcatgtaccccgcaaaaaacctggccctcccacctcagccctttaatatgcaaatgtgggttgccatgatgttctgaaaacacatgaattatctggagggggccatgacacttggtacatgtgctgacaagaagagggtgggaatcgccatggtggccatgttgggtggacctagtttttaatagcctgcatttgcatatcaaagtttgctggcctggctctttaagctgtcttttctgttagaaaaggaatggtttggaatgggtgagggttgcttcttattacaagaaaatttccaaaaacctttactctttctagctgccaaaaaactatttcttaataacttatgtattaccataattaggcagcaccaaagatccctgcaggtcagaccactgcaattaacatgctggctttactgctgattatggtagctgcatccacctagcctctcatattgcaactgcctgacctctgccaccccacgagccacttatccccacttataatcagcccatttcgattgtaacatctgccacttattcccgacgttgtggtatatcctatagatgaattcattcaacatccattccaacaccacctctcttgccttcctatactctctggagagtgaattactgagtcacatgatcttcactgcagtcatttgtggctatgtgacatagttctggacagtgaacatagacagaagtccctggggcgggcttcctttctgggatgagggcaaaacgcctggagatacagcaattatcttgcaactgagagacaggactagctggatttcctaggccgactaagaatccctaagcctagctgggaaggtgaccacgtccacctttaaacacggggcttgcaacttagctcacacctgaccaatcagagagctcactaaaatgctaattaggcaaagacaggaggtaaagaaatagccaatcatctattgcctgagagcacagcaggagggacaacaatcgggatataaacccaggcattcgagctggcaacagcagcccccctttgggtcccttccctttgtatgggagctgttttcatgctatttcactctattaaatcttgcaactgcactcttctggtccatgtttcttacggctcgagctgagcttttgctcaccgtccaccactgctgtttgccaccaccgcagacctgccgctgactcccatccctctggatcctgcagggtgtccgctgtgctcctgatccagcgaggcgcccattgccgctcccaattgggctaaaggcttgccattgttcctgcacggctaagtgcctgggtttgttctaattgagctgaacactagtcactgggttccatggttctcttctgtgacccacggcttctaatagaactataacacttaccacatggcccaagattccattccttggaatccgtgaggccaagaactccaggtcagagaatacgaggcttgccaccatcttggaagcggcctgctaccatcttggaagtggttcaccaccatcttgggagctctgtgagcaaggaccccccggtaacattttggcaaccacgaacggacatccaaagtggtgagtaatattggaccactttcacttgctattctgtcctatccttccttagaattggaggaaaataccgggcacttgtcggccagttaaaaacgattagtgtggccaccggacttaagactcaggtgtgaggctatctggggaagggctttctaacaacccccaacccttctgggttggggacttggtttgcctcaagccagcttccactttcagttttcttggggaagccgagggccgactagaggcagaaagctgtcgtcctgaactcccggcagtagccggttgagatcatggtgtagccagaagtctcaacagtcgcccatgcatgcacccctatctttccttctgacccatacctcctgggtcccaaccacaactttcttcaaagtgtagccccaaaattctccttacctctgaatatacttcctctgatccctgcctcctaggtactattggttcagacttccatttcctctagcaagttgtatctccaaagggatctaaggaagctctgcgctgcgtccttaggcacctaggctataacccagggagtcttatccctggtgtccctcccaatttaggcatacagctcttgacatgggcagttatgtaggacccactccccaccacccttgccagggccccaagtttgtaaatggctgagggaaaagagagacagaggagagagagagaaatggaggagaaagagagagagacagagaggagagagagacagtgagagagacagaagagagagagagacaaagaggagagagagagagtcaaagagagaaagaaagagaaagaaatagtaaaaaacagtgtgccctattcctttaaaagccagggtaaatttaaaacctgtacttgataattgaaggtcttctctgtgaccctatagcactccaatccactttgtggtcagtgtaaataagagcataggccgaaagcactgaggccattgacaacccgtagcttccctatcaaaaatccttaacccagtaacccgcagatggaccaaatgcattcagtcggtagcgcaactgctttgctaaaagtagaaaagtaacttttagaggaaacctcattgtgagcacacctcacctgttcagaattattctaataaaaaaagcaaaaaggtagcttactaactcaaaaatcttaaagtatggggctattctgttagaaaaaggtaatgtaactccaaccactgataattcccttaacccagcagatttcctaacgggatttaaatcttaattaccatacaaaggtccgaccagacctaggcggaactcccttcaggacaggacgatagatggttcctcccaggtgattgaggaaaaaaaccacaatgggtattcagtaattgatacggggactcttgtggaagcagagttagaaaaattgcctaataactggtctcctcaaacgtgtgagctgtttgcactcagccaagccttaaagtacttacagaatcaaaagactatctcaatcctgattcaaaaggttagctacaccctctctgtaatgcatttgcataagaacttgtttatgggaatgcatcttgatggggcagctgggttgttataaaataggaacccagcccagctctaggactcacccctgagcgcaaaggcaatgttgggcatgctggtaaaggaccactagaatccagcagcccagacccctttctttgtggtcaagaaaggcgggaaaaggggtgcaggactgctacatcggtaagcataactaatccgataaacagaggtccatgggtggttacgcaccctggaaaggaactcacccctgagcacaaaggcaatgttgggcacgctggtaaaggaccactagaatccagcagcctggacccctttctttgtggtcaagagaggcaggaaaacaggtgcaggactgcaacatcagtgagcataactaattcgataagcagaggtccatgggtggtgatgcaccctggaaagaataagcattaggaccatagaggacactccaggactaaagctcatcggaaaatgactagggttgctggcatccctatgttcttttttcagatgggaaacgttccccgcaagacaaaaacgcccctaagacgtattctggagaattgggaccaatttgaccctcagacactaagaaagaaacgacttatattcttctgcagtgccgcctggcactcctgagggaagtataaattataacaccatcttacagctagacctcttttgtagaaaaggcaaatggagtgaagtgccataagtacaaactttcttttcattaagagacaactcacaattatgtaaaaagtgtgatttatgccctacaggaagccttcagagtctacctccctatcccagcatccccgactccttccccaactaataaggaccccccttcaacccaaatggtccaaaaggagatagacaaaagggtaaacagtgaaccaaagagtgccaatattccccaattatgacccctccaagcagtgggaggaagagaattcggcccagccagagtgcatgtgcctttttctctcccagacttaaagcaaataaaaacagacttaggtaaattctcagataaccctgatggctatattgatgttttacaagggttaggacaattctttgatctgacatggagagatataatgtcactgctaaatcagacactaaccccaaatgagagaagtgccaccataactgcagcctgagagtttggcgatctctggtatctcagtcaggtcaatgataggatgacaacagaggaaagagaatgattccccacaggccagcaggcagttcccagtctagaccctcattgggacacagaatcagaacatggagattggtgctgcagacatttgctaacttgtgtgctagaaggactaaggaaaactaggaagaagtctatgaattactcaatgatgtccaccataacacagggaagggaagaaaatcctactgcctttctggagagactaagggaggcattgaggaagcgtgcctctctgtcacctgactcttctgaaggccaactaatcttaaagcgtaagtttatcactcagtcagctgcagacattagaaaaaaacttcaaaagtctgccgtaggcccggagcaaaacttagaaaccctattgaacttggcaacctcggttttttataatagagatcaggaggagcaggcggaacaggacaaacgggattaaaaaaaaggccaccgctttagtcatgaccctcaggcaagtggactttggaggctctggaaaagggaaaagctgggcaaattgaatgcctaatagggcttgcttccagtgcggtctacaaggacactttaaaaaagattgtccaagtagaagtaagccgccccctcgtccatgccccttatttcaagggaatcactggaaggcccactgccccaggggacaaaggtcctctgagtcagaagccactaaccagatgatccagcagcaggactgagggtgcctggggcaagcgccatcccatgccatcaccctcacagagccctgggtatgcttgaccattgagggccaggaggttgtctcctggacactggtgcggtcttcttagtcttactcttctgtcccggacaactgtcctccagatctgtcactatctgagggggtcctaagacgggcagtcactagatacttctcccagccactaagttatgactggggagctttattcttttcacatgcttttctaattatgcttgaaagccccactaccttgttagggagagacattctagcaaaagcaggggccattatacacctgaacataggagaaggaacacccgtttgttgtcccctgcttgaggaaggaattaatcctgaagtctgggcaacagaaggacaatatggacgagcaaagaatgcccgtcctgttcaagttaaactaaaggattccacctcctttccctaccaaaggcagtaccccctcagacccaaggcccaacaaggactccaaaagattgttaaggacctaaaagcccaaggcctagtaaaaccatgcagtaacccctgcagtactccaattttaggagtacagaaacccaacagacagtggaggttagtgcaagatctcaggattatcaatgaggctgttgttcctctatagccagctgtacctagcccttatactctgctttcccaaataccagaggaagcagagtggtttacagtcctggaccttcaggatgccttcttctgcatccctgtacatcctgactctcaattcttgtttgcctttgaagatacttcaaacccaacatctcaactcacctggactattttaccccaagggttcagggatagtccccatctatttggccaggcattagcccaagacttgagccaatcctcatacctggacacttgtccttcggtaggtggatgatttacttttggccgcccattcagaaaccttgtgccatcaagccacccaagcgctcttcaatttcctcgctacctgtggctacatggtttccaaaccaaaggctcaactctgctcacagcaggttacttagggctaaaattatccaaaggcaccagggccctcagtgaggaacacatccagcctatactggcttatcctcatcccaaaaccctaaagcaactaaggggattccttggcgtaataggtttctgccgaaaatggattcccaggtatggcgaaatagccaggtcattaaatacactaattaaggaaactcagaaagccaatacccatttagtaagatggacaactgaagtagaagtggctttccaggccctaacccaagccccagtgttaagtttgccaacagggcaagacttttcttcatatgtcacagaaaaaacaggaatagctctaggagtccttacacagatccgagggatgagcttgcaacctgtggcatacctgactaaggaaattgatgtagtggcaaagggttgacctcattgtttacgggtagtggtggcagtagcagtcttagtatctgaagcagttaaaataatacagggaagagatcttactgtgtggacatctcatgatgtgaatggcatactcactgctaaaggagacttgtggctgtcagacaactgtttacttaaatgtcaggctctattacttgaagggccagtgctgcgactgtgcacttgtgcaactcttaacccagccacatttcttccagacaatgaagaaaagataaaacataactgtcaacaagtaatttctcaaacctatgccactcgaggggaccttttagaggttcctttgactgatcccgacctcaacttgtatactgatggaagttcctttgtagaaaaaggacttcgaaaagtggggtatgcagtggtcagtgataatggaatacttgaaagtaatcccctcactccaggaactagtgctcagctagcagaactaatagccctcacttgggcactagaattaggagaagaaaaaagggcaaatatatatacagactctaaatatgcttacctagtcctccatgcccatgcagcaatatggaaagaaagggaattcctaacttctgagagaacacctatcaaacatcaggaagccattaggaaattattattggctgtacagaaacctaaagaggtggcagtcttacactgccggggtcatcagaaaggaaaggaaagggaaatagaagagaactgccaagcagatattgaagccaaaagagctgcaaggcaggaccctccattagaaatgcttataaaacaacccctagtatagggtaatcccctccgggaaaccaagccccagtactcagcaggagaaacagaatggggaacctcacgaggacagttttctcccctcgggacggctagccactgaagaagggaaaatacttttgcctgcaactatccaatggaaattacttaaaacccttcatcaaacctttcacttaggcatcgatagcacccatcagatggccaaatcattatttactggaccaggccttttcaaaactatcaagcagatagtcagggcctgtgaagtgtgccagagaaataatcccctgccttatcgccaagctccttcaggagaacaaagaacaggccattaccctggagaagactggcaactgattttacccacaagcccaaacctcagggatttcagtatctactagtctgggtagatactttcacgggttgggcagaggccttcccctgtaggacagaaaaggcccaagaggtaataaaggcactagttcatgaaataattcccagattcggacttccccgaggcttacagagtgacaatagccctgctttccaggccacagtaacccagggagtatcccaggcgttaggtatacgatatcacttacactgcgcctgaaggccacagtcctcagggaaggtcgagaaaatgaatgaaacactcaaaggacatctaaaaaagcaaacccaggaaacccacctcacatggcctgctctgttgcctatagccttaaaaagaatctgcaactttccccaaaaagcaggacttagcccatacgaaatgctgtatggaaggcccttcataaccaatgaccttgtgcttgacccaagacagccaacttagttgcagacatcacctccttagccaaatatcaacaagttcttaaaacattacaaggaacctatccctgagaagagggaaaagaactattccacccttgtgacatggtattagtcaagtcccttccctctaattccccatccctagatacatcctgggaaggaccctacccagtcattttatctaccccaactgcggttaaagtggctggagtggagtcttggatacatcacacttgagtcaaatcctggatactgccaaaggaacctgaaaatccaggagacaacgctagctattcctgtgaacctctagaggatttgcgcctgctcttcaaacaacaaccaggaggaaagtaactaaaatcataaatccccatggccctcccttatcatatttttctctttactgttcttttaccctctttcactctcactgcaccccctccatgccgctgtatgaccagtagctccccttaccaagagtttctatggagaatgcagcgtcccggaaatattgatgccccatcgtataggagtctttctaagggaacccccaccttcactgcccacacccatatgccccgcaactgctatcactctgccactctttgcatgcatgcaaatactcattattggacaggaaaaatgattaatcctagttgtcctggaggacttggagtcactgtctgttggacttacttcacccaaactggtatgtctgatgggggtggagttcaagatcaggcaagagaaaaacatgtaaaagaagtaatctcccaactcacccgggtacatggcacctctagcccctacaaaggactagatctctcaaaactacatgaaaccctccgtacccatactcgcctggtaagcctatttaataccaccctcactgggctccatgaggtctcggcccaaaaccctactaactgttggatatgcctccccctgaacttcaggccatatgtttcaatccctgtacctgaacaatggaacaacttcagcacagaaataaacaccacttccgttttagtaggacctcttgtttccaatctggaaataacccatacctcaaacctcacctgtgtaaaatttagcaatactacatacacaaccaactcccaatgcatcaggtgggtaactcctcccacacaaatagtctgcctaccctcaggaatattttttgtctgtggtacctcagcctatcgttgtttgaatggctcttcagaatctatgtgcttcctctcattcttagtgccccctatgaccatctacactgaacaagatttatacagttatgtcatatctaagccccgcaacaaaagagtacccattcttccttttgttataggagcaggagtgctaggtgcactaggtactggcattggcggtatcacaacctctactcagttctactacaaactatctcaagaactaaatggggacatggaacgggtcgccgactccctggtcaccttgcaagatcaacttaactccctagcagcagtagtccttcaaaatcgaagagctttagacttgctaaccgctgaaagagggggaacctgtttatttttaggggaagaatgctgttattatgttaatcaatccggaatcgtcactgagaaagttaaagaaattcgagatcgaatacaacgtagagcagaggagcttcgaaacactggaccctggggcctcctcagccaatggatgccctggattctccccttcttaggacctctagcagctataatattgctactcctctttggaccctgtatctttaacctccttgttaactttgtctcttccagaatcgaagctgtaaaactacaaatggagcccaagatgcagtccaagactaagatctaccgcagacccctggaccggcctgctagcccacgatctgatgttaatgacatcaaaggcacccctcctgaggaaatctcagctgcacaacctctactacgccccaattcagcaggaagcagttagagcggtcgtcggccaacctccccaacagcacttaggttttcctgttgagatgggggactgagagacaggactagctggatttcctaggctgactaagaatccctaagcctagctgggaaggtgaccacatccacctttaaacacggggcttgcaacttagctcacacctgaccaatcagagagctcactaaaatgctaattaggcaaagacaggaggtaaagaaatagccaatcatctattgcctgagagcacagcaggagggacaatgatcgggatataaacccaagtcttcgagccggcaacggcaaccccctttgggtcccctccctttgtatgggagctctgttttcatgctatttcactctattaaatcttgcaactgcactcttctggtccatgtttcttacggcttgagctgagctttcgctcgccatccaccactgctgtttgccgccaccgcagacccgccgctgactcccatccctctggatcatgcagggtgtccgctgtgctcctgatccagcgaggcacccattgccgctcccaatcgggctaaaggcttgccattgttcctgcatggctaagtgcctgggttcatcctaattgagctgaacactagtcactgggttccatggttctcttctgtgacccacagcttctaatagagctataacactcaccgcatggcccaaggttccattccttgaatccataaggccaagaaccccaggtcagagaacacgaggcttgccaccatcttgggagctctgtgagcaaggacccccaagtaacacaaccatgagggtgcaaatgcatgggccactaatggtagagcaagaaaacagaagggccctggttcctcgaaggcatcagtgagctgaaatgcctgccctggatgtcctattcctaggtgtttttctgcctgaagcagattaaaccctttgttcacttctccaagtagggcttctattacagcccaaatcaatccccaccccagatgacatcatcctattaatacttttcaaagtcttcctgtccttaaacttccagcttccccaaaaccccacagaagatcagcagtctgctctcctaagggagcctgggcctgactggcatagctctcccttacaatagtaagcaattaattcagctttgcgacttgatcagtccaaagtggctgccagtttgaaaatctcagaaaggtaccatatgtactaagagaagccctgacatgagggcctaagccaaaagttggcccacatccttcctcttccaaatttaggatgggcactgtaaagataaatatgaatttaataagtttaattccacctgttgaaaatgaggcaagaaattttcctcccctccatgtcaggttattacttgagaaaacttgtatgtgctttctcagtctctttgaaatatatatatgtatataattttttttttattttgagacggagttttgttcttgtttccaggctggagtgcaatggtgcaatctcggctcaacctccgcctccgggttcaagtgattctcctgcctcaacctccctggtagctaggattacaggcatgtgtcaccatgcctggctaatttttttgtatttttagtagaaatgggtttcatcatgttggccaggctggtttcgaactcctgacctcaggtgatccacctgccttggcctcccaaagtgctgggattaaaagcatgagccatcatgcccagcctgaaatacatatacagatatatatatttaaaaactgaatcagccttttgtcagctttatgacctaggaatgtctttctcaaggatctgggaaatgtaaacattaccagatagcatacctatcttccagtttctgtgggagggtaacagcctaatcttaatgagtaccttgcaccaagctataaaagtaactcctgtttccacactcccccacccccgaaaagttgatatcttagataacacaagtggtcacatcaattatcaggtaaagttagaatgaactgtgtgaccagtggtgctgtcaagttctcttagttgaggactatttatctcgaaaacatacatgtaatgggctgtacctgcttggctgtacaaaatggtgaaatttccttctgtctttgtgatctcttagcaaagtgcctgtgatgtgcatcacattctcatttaatttttattcaataataaagcttatctttctctactgccttcatggagaggatttctgggttgagagaagattttgttttttaaattatatttccccaacagcaccttcaccctttattctaaaactgctggctgggtgtggtggcttatgcctgtaatcacaaccctttgggaggccaaggtcggaggactgcttgaggccaggagtttgagaactagcctaagcaatatagtgagaccccatctcttaaaaaaaaatagctgggcatggtagtgcacaactgtggtcccagctactcaggaggctgaggtaggaggatcacttgagcctgggaggtggaggctgcagtgagcagtgatcacaacagtgcactccagcccgggtgacagtgcaagaacctgtttcaaaaaaaaaataaaattgctgtctttttcactcacaccttcactattcatggggagaagtgtgtaaggtataacagtctttttgtaataaacctccccacttccactcttctaatcagaagtagagatgatgttatgagaagttgagattaaggttgtagcttttcttttttcttttttttgagaccgagtctcactctgtcggcccagactggagtacaacggtgcgatcttggctcactgcaacctccccactgcccaggttcaagtgattctcctgcctcagcctcctgagtaactgggattacagggatgtgccaccacgccgggctaatttttgtatttttagtagagacgaggtttcaccatgttgaccaggctagtcttgaactccaggcctcaggtgatcccccaacctggcctcccaaggtgggggattacaggcatgagccaccatgcctggcagattgtagcttttttgtttacagtttggtaattacttcatgccagtctgtcatgtttaataaacaacacaggttagtgattgctttttttctttttttttttgagatggagtttccctcttgtcatccaggctagagtgcaatggcgtgatcttggctcactgcaacctccacctcccagattcaagtaattctcctgcctcagcctctggagtagctgggattacaggcagcggccaccacagccagctaatttttgtatttttagtagagatggggtttcaccatgttggccaggctggtctcaaactcctgacctcaggtgatccacccgcctcggcctctcaaagtgccaggattacaggcatgagccactgcacccagccaattgcctcttcttcaacagaaaagaaagaaaatgaaactatgtaagttcagccatgtgcagggatgctttagaaataacatttagatttttaatttgtattagattctttggacctagtactgtatttctcacagtagcatttacccaatttctttcggatcctacgtatggcagttcagcagtgacatttccatggtattttcttaacttctttaggcctcatttttcctatctgtagaatgagggagttagattagatggtctctaaatccgtacatctacaaagaatatgaatctttgaaaaattgttttctttatctggatcacaagccactatcaatctatgagaatctgcactggagttgaagaaacaagctttattcacaaaatcaaattttatttgcctagaaatgttcggcttacaaaacctgaaatgaactctttggaagctcctctatggcattattctgatgctcagggcatcaacatgctgggacactcccttgcctaacctctgtgcccaggggccctgcctgaggacgctggcaggattctctagcttgctctgaaaaacgatgcctttgctgaagccactcttctggttgtccttttatggcctgtccccatttcagtgattcccctgcaagctgaagcatgcagcagttagaccagtttttccattcttcttaattcccaaggccctttcctaggctttcataatgcaagacacaaggacagatgattattatttctaggcttcggatatttgtgcagaggactagagttgagaaagggagccttgactgtggtaggcctgaatgtgttctaagtttggacatgacctcagagtgagcactgaggctggcccacaggccagaaacccacaaaaatatggctgtccatcttgcccacctgcctaacagtttgtcccataaaagcattaaattaggagacagaaatcaactaggtgcagagttttgttactgcattgcacgtctcctgagttctcaaatccgtattttcaattatctaatggatattcaagtccaggagatggctcacagtcctcacattacaaaacagaacacacacctcacatcacatgcaaatctccacctagccttgtttactaactgggagatttttaaattataagaatcaagtaggatctttgcccacgtatttttttaagagtttttcacctaccaaaaagttgtactcaatgtcttccttaattcatcctcctcactcagtctctatttacaactggttattaaattctgttgactttatctcctatatatctattttttaaagattatggtaaaatatgcataacaaaacttacaattttaaccttttttttgagactaagtctcgctctgtcccccaggctggagtgcagtggcgcaatctcaactcactgcaacctctgcctcctgggttcaagcaattcctaggcctcatcctcccagcagctgggactacaggcacccaccaccacactcgactaatttttgtatttttaatagagatggggtttcgccacgttggccaggctggtccttaactcttgacctcaactgatctgcctgccttggcctcccaaagtgctgaaattacaggcatgagccaccgcacccaggtatcaacctttttttttttttttttgagacggaatctggctctgttgcccaggctggagtgcagtggcgcgatctcagctcactgcaagctccgactcccaggtcacaccattctcctgcctcagcctcccgagtagctgggactacaggtgcctgccaccatgcccggctaattttttttttatttgtttttattttttagtagagacagggtttcaccatgttagccagaatggtctcaatctcctgacctcatgatccgcctgtcttggcctcccaaagttctgggatttacagccatgagccactgcgccagcccagtattaaccatttttaagtgtacaatttagtgtcattaagtacattcatcatgttgactactgtcactacccatttccagaattttttcaaaatcactccaaaccgaaaatttgtacccacaatacccctcttcccacaaccctggtaacctctaatgttctgtatctatgacataatttgcctattctaggtaactaactcatataagtggaattatacaatatttgtccttttaagtttggcttatttccattaacatgttttcaaggttcatcattatagcatgtatcagaatttcattccttctacggctgaataatatcccactgcacgacctcaccacgttttgatcatccattcgtctgctgatgggtccttgtgttgtttctatctctgtcagcttgggctgctgcaacaaaataccgtagcctgagtggtttaaacaacacacattcatttctcacagttctggatgctgagaacccaagagcaaggtgctagcagatttgggttctggtgagagctctcttcctggctgtggccaccttctggctgtcttcttacatagtgaggagagaaaggaaggctttggtctgttctcctcttcctaaaaggacactaattccactatgcgggctccaccctcatgacctcgtagaaatctgattacctcccaaaggccctactcccctaataccattgccttgggggccagggctttaacatatgaacttggggcatggggatcaggcacacattcagcctgtaacaccatttagattaccatctttggacctaaatatctattttaaagttgtatttttttcctgactacgtaagtagtggatgctagtaatacaaacttcaaaatttttaaaagcataaagaatattaaaatgactgtaattccaactatgcttgttattttgtttgttccagttttctttatatgcatatgtatgcatgtgtatatgtgtgtgtttttgttttttttttttacaaaatcagaatcattatgtagttgtgtccaggttttacactaaacattttataaacttttttttgcgttattaaaaattatttgtaaatggtatttctgatgacagcataaaattctattagaaaaatatcaaaattcattttcctattgttggacctttagattgtttctggtttttcacaactttaaatactgttaacaacttctttttatacccattttttggtccacattttaaatcctcttagcatggattcttagaaatgaaattactggatcaagaagtacttttaatacttttaagattatagatacatattgctattctaaaaagctatgttaatttacattggccaccagctggatagggtgtccctctgtgcctctgaggtggtccctagtggtctctgcccttggaattcacgcccttgtgtggtcctgtgttcacactgtaccagagttggtctgtgtgacccaacagcatatggcagaagtgctggtatgtcccttctttcagattaggttatagaaaagatggtggcttccatcttgggtgcaactgcccttgcgtctttctgtcacggaccatttgctgtgagcaaacctgtggaggcccacagagaggaatggaagcttcctgccaacagccacatgagggagctgtttctcccattttattctttgcttttcaatttagtatataaactttaaaaataatccaatctatctttccctatgtgatctctttcattactttttgatttaaaaaatgtatcaaagcactacatattcatagcaaaaagatggccaaataattctaaacagtttataatgagaaacagtagttccttgccttctctttcagagtctcagcaactgttatcagccagaattcgatcagagaaacagaaccactaggagcgatatagaaaaggaatctataaaggaaactttaccttacacaattgttggagcttgctgaacactctgtgtaaggctgttgcttctgtgtttggtgttggggccttaagtcagcagcgcaggcagtctggaagggaagacagatttcaagtggaggacaggaaagaaaaacttgaacctacatcagtctcttaccctcgccaaacctccaattcagatgatacaggcaccctgcagaagaagctggtgacctttaccacagagctaagcatgcgcctggcccaggagtggctgaagctgaaggaagtcactcccaagttctttcctagaatcatgatgtgaatataggaaaataatgaaatcactgactttattttctcagctggtcattcactccctttcaagggtttaagaactactatttataaaatattctagatatgtatagactaaaagccagcggttgttcaccaccagttgggcacttatgcaaacaaacgtgtgtgtgtgtgtgtgcttattgtaaaaaatttggaaaatactgcttgttagagaaaatttggaaaatactgcgaagtataaagctgaaaaaagtagctgcagaaaacctctgttgacatgttaaaattctggaggaatttccgtctttttttttttttttttttttttgagagaaggtctcacttctatcacccaggctggagtggtggcacaatcatgggtcactgcagctcaagtgatcctccacctcagcctcttaaagtgctgggattacaggcatgagctactgtgcctgggctccttccatcttttataaaagatgcttcttgtttgcagaattgctatcatacagttctacattctgcttttttctcttatttattgtgaacctttccgctactacgagcaatcttccttgtgggtcaccattaagaggtgcttaaataaattactgtgcatttatgcatctgacccaataattaatggcccacctcttgtgggtcatttgggttccttctcttggcacagaccttctcctggcttatatttcttgggtgtaggaggtataccctcctaccaaaggtatggctcacacacctggtatgaagtaaacagcacagttcttcaaacatccccagggcagccagacaaaatccacaaaaatgcctctcccttttctgggcatgacagaaacttcattctaagcgtgtgcaatgtttatatgtagacacaacacacatgcatgtgtataaagcaaataaatacatttccctctattgttcatttgatttcacctacttacggctgaagtggaaaacttattaggcctggaaaagcctttcacagccaggaactggaatggtttgggataatttccttcaaatactcatattaagctttatttgtgttaagagaactatttaaaactcatcttaaaaacatcttgtttaaaacaatcttaaaaacaatctaatactaacccagaatgtaacaatctaaattttacttgactattcacaatagaatttaaaagtttcagccaaagttaatatgaattaataactaaaatatcaacaagcattttagttaacagtatctaactcagaccctacaatcagcatctcccataagcaagaaccggggttaggttatgtggaagttacaaagatgagtaaataaaacacagcatccctgtcatcccaggaccaaagggataggagtgaggatgatggaagtagaaacttaaatgtgatgacaataggatagagattgattccaaaaaggcatgggaatctggaaagttctcaaagaaagaatccgaaggtgttaagaaaggcctttggaaggtagaattggagagaacagtatgaacaaggactcagagccagaaaaattgggcgggcatacaggggaaagattttagtggtaatgaggaaacaaggctgggaacacagaccagggccatatcaggtccggcctcagcaggagaaatataagcaatgggaaccatcacactgggtgaaattcaatctttattttaaaagatggtacacaaccatctgccaatttataaacagatgatcaatttatagatttttaaaagtctacattttaataaatgttttacattgtgttcattttattagccattttttgattttcctaaaatctgttacttattaatgatgaatctactccaaaatcttttttttttttttttggagatggagtcatgccgtcacccagactggagtgcagtggcgcgatctcggctcactgcagtctctgcctcctgagttccagcgattctcctgcctcagcctcccgagtagactagctgggattataggcgcacgccaccacgcccagctaatttttgtatttttagtagagacggggtttcatgttgaccaggctggtctcgaactcctgacctcaggtgatccgcctgcctcagccttccaaagtgctgggattacaggcgtgagccactgtgcccggcctctactccaaattctaagtacgatactgttttggttttaaataccatttttggttaaagagccccatttaaattgtttaaatgaaataaatacatccaaagtaaatgcacggtgaaaaatacattttaatccaaaagttttgaatattggcacttagaaagttatttacaatcaattttactataccctttgtgaataaagagataattatgtacgtgtagctacctatagttgtttctttccaactcaaacaccataactatgtggaaaaagggtaagagttaaagctgctgcagctcaaaatcattacaatcaacttagattctgcaaattttcccagggttgaaaaatgctggttaaatcaggacaaaagaggaggcaagtgagtacaccccactcctctcccattttacgtgttgctcccttacttaaccggcaaagacctgcacctgaattctagacaatttcatatacaacaggcctcttattatgggtccatagcagatggtttagggtagatgttttaaagatatcaatgctaatggcctaccaatgactttcatgacctcccaatattcgttttaatggtagtcaagagactatcaagcaggaagcctgatctcgacatgtttcctctgcggctttggtgaagctgactatctgcagtataaaatcttatggtttgatcgaagtctcatttttgactagaaacagtaaagagcagctttattaagatcaatggaatggttctgaatgcctgtttctacagaaggattaaattaaaattttttcttttttttcttttttgagacagtcttgctctatcacccaggctggagtgcagtggcacgatctcggcttactgcaatctccacctcccgagttcaagcaattctcctgcctcagcctcccgagtagctgggattacaggcatgcaccataacacccaactaatttttgtatatttagtagagacagggtttcatcatgttggccaggctggtcctgaactcctgacctcaagtgatccatccactcaggcctcccaaagtgccgggattacaggcatgagccaccgcacgtggcctagatgaaagtttttaaaagcctgggctaataaaatcatccaccaatcatttttcttatggttaaagcagccaaaaagctgtcacagcatttttgagatgagaacataaggcttgtgtggctttatgatagatgctgttagtcattttatttgattaagcccttggtcagtcatctataccttaattaatattttgttcttatagaaaaatacaatccattttatgagtttctagaaataaataatggagaaaaatagatactacctgttcctaatggtctctctggaaattacagcttttgcctaggaagatacacatatagaatataatttaagttcaaaatatatttcattatattctatcccttttaattttttgtttgtttctttgagacggagtcttgctctgtccacccaggctggagtgcagtggcacgatctctgctcactgcaacctccgcctcctgggttcaaccaattctcctgcctcagcctcccgagtagctgggactacaggtgtgcgccaccacacctggctaatttttgtatttttagtagagacagggtttcaccatgctggccaggctggtctcgaactcccaacctcaggcgatccatctgcctcagcctcccaaagtgctgggattaaaggcgtgagccactgtgcccagccttttttttttttttttttttccgagacaagagtctcactctgttgcccaggctggagcacagcggtgcaatcttggctcactacaacctccacctcctgggtttaggcgattctcctgcctcagcctcccaaatagctgggattacaggcacatgccaccacacctggctaatttttgtatttttagtagcgacggggtttcgccatgttggccaggctggtctcgaactcctgacctcaggcgatccacttcccgacctcaggtgatccgcctgcctcggcctctaaaagtgctgcaattacaggcataagccactgtgcctggccctatcccttttaattttctaagtgaccagtaataaacaatgatttgtttattactaggtagcaggagaaaaactttttagtcacttttccagctaagaatttcatttaaagatacctatgacatatcttgtggtactaagaatattagagaactggaaatccagtttttttgtggttttttaagaaagagaatctgactccattgcccagcttggagagcagtggtgcaatagctggggctacaggcgtgagccaccacaccaggcctggaaacccagttttaatttgtgaactacaaatggttggcaactgattccttaattgttattgcaggagtaggcccaacatgagtccatatgtagcccttctctggtctggtgggaactgtgggaaatggtgatgaccgtgacttgaaatactcagaaggtgcatgacaaacaaattccaagtattccatcttccttggaagatcttcctctggccctggaaggcagccaagggaaaggttaaatacatttttgaccatatatatcattttcataagatgttaaaatttctagacactgggagagaccactctgggagcaacctggcattagcccttgaaacatgcattactttgaaattattcttaatcattttttcttctttaacggcttaaagaatatggcattctcccaaaaacagtgattgaacacttgcatcatgtttattttgtacccacactgctctaagtttacatgtatcaataccttcattcctcacatcaaccttctgaggtaggcactattattattcccattttacatatgaggaaagtgaggcaagagagactaagaaacttgccaaagtcacatggccggtaaatggcaggctgtgaacctagacagtctggctccagaactggtgttctgacctcatgccatgctgcctcgctgtaggacaaggatgcatatcagaatctggggattagaaagaggaggcagtagaggaatcccgaaggtgattctgatacatcactgcctctgctgagatcctgatccatagataaggtaaataaaaattctatatacttataagcagaaggctagaattgtttggtaatgtatcaaacttgacatataggtgagaataacagtggtatattatttgtccctggagttctctccaaaaacacacttatgcttgttctcaggatgcaaaagtaatgatgcatgctcactgcagaaagataaaaagtctgaagtaactgtaaaaatctgaaaactttaaaaattgtattaatcagtaaattcttgtgagtctatctcacaactgttttggcagctttgaaattaacaaaagcacagcagctgccatttcaactatcagcctttatactataaaggcctaagatgacatgtgtagcatgcagaggcacacatattgagaatttgcaagtatgggataactgggatagttctttcctaaattatttttgaataggtttgtataaataagtaacctaaataacctagttcctgagcaatacattcttgtagtacagtttaaccctgggtcactccaaaaaaatcttatccataccacttcttagtagatgcacattgctctaactcaaaataactgatagcactcacactccagctacataaaatgcctcatattttctataaagctctctaatttttttgtacttaataatactcatgctttttttgttatggactgaattgcatccccccccgccaccctccaaatttatatgttgaagccctaatccccaatgtgatggtacttggagatgagacctttagggaggcaattaaggttaaatgaaaccataagggtggggccctcatctgacagaaatggtgtccttataagaagatacaccaaagagctctcactccatgaaaggccatgtgaggacacagcaagaaggtgaccatctatatgccaggaagaaaagcctccccagaaatccgtgttgccagcaccttgatgttggacttcagcctccacaactgtgagaaagtgactttctgttgtttaagccactcagtctgtgatattttgtcctgacagcccaagctgactaacacactcttttacataatattggagagttaactaagttaaaaaaaaacctgtgccatttgtcaaacttacctatgatataggaggcgggatcaaattggtctctggggctagagagggtaggaatgagccacgtcagtgctgcactcttctcgcaatactggtcctggataaaacctctgatttgagcatagtagggctttccatcttgttcatcaatcacagaaacaacatcaccaatttggtaatatactccctgggggaaacagaagataatcccacattgaaaataaaaatagaacatcacagctatgaatgaaccttaataggtaagcaagttttcaaagtggtcagtaaaaggtgttcgagatagtctaatgtatcagtgtttatatgtttggtgccaattctaaagttgtttcacgtttgaatgaaaattatacatacacatacgagggtgcatatatgacagtttacatctggagaaaagatttgttcataaagtattttgattttatattgccgtaataccatccccactttttaaaaaatagactttattttttacagaggttttaggtttacagcaaaattgagcagaagtagagagatttcccatatacttcctgcccccacacatgcacatcctcccctattatcaataacccctcccaccactagagtggtacacttgttacacggatgaacgtacactgacatagcatcatcaaagaccagagttcacattagggttcactcttggtgctgtgtattctgtggggttgggcaaatgtataatgacatgtacccaccattatagtatcatacaaagagagtattaatagtttcaccgccctaaaaatcctctgtgctccgtactatccctactttgttagccacagtcatgaagcagtagtaaggttaaacggcttgctgaaagccatagagactgcagccaaagctcctacatcagctcagcagtcttttctctgtactgtcttgaaaatcatgctgatttggtaagaatgcattctacatgccaccctccccaaccatccactcaaagaaaatagataccatgaattcaaaccaaaacaaattcaaaccaaaaataatctttggattatagtcttcaggatatgtttacctcaacctactgtacatctcctagactcactgctgcctttctcttccactcccagttgagttttatatccttccacaacaggactactagtatttctggcattcaaggctttgtgtctcattcatttctgttccactttatacccaactaactaatgtgtacatgtcctgtgttaaatcctccctatgactctggtatccatcctatgtcctcttccctgggtcttgagctggaaataatctctcctctgaacacccataatggttgatccaaatctttatgacatccagcacctccttaagtgggtatagttcttggtaagatatactgtccttgactacgggaacagtgtaattcattgctgcttcccttgaaacagggacttggcagcaggtaaagctgtaggaatgtgtacctcaaccataaaaacacttttgaggaaatacttccagtaactgaactgtaacatagcacctgataggccaggagttttttcctggtggaccctttatccaagtgtctgagggtggctgtttcatctggatcactacggatgggtctggtctatgcaggccacagtccgctacttgctagttcctacccatcaatagctggtccttcctcccagccatcagtccaaagttatttatcatataaatagtttgcatttatggtttgtttgtccacatgtataatcaatattcccaaattctaaatgagaatacttgcttatcataggcttactatgcataacacagcatattcaaatgtatgctgaatgaatatgaatccaaaacatctactttcatagtgtaaaggcagaaatgcaaagtaaaaacaatgtcttagtgaaagattccagtggtaggcagtgcctggcacatagtaggtatttattaatatgtgctgtgttgtgtacacatatataacaccaaacaggactaagtcactgatctgagtagtctcctcatttgctgagaggattcaaggtttctggtagagaaaaggggtccacacgagaacagcactagtttaggcatcaccagatctgagttcatggagttgttctgccactgccatgctccagggaggccactcagccattctgggtcttgggtggtcacactcttggccgtgatccccagtggctcccactcaggctcctcttgcatgcctgatctgggctctagctcagtggctggcagtgacctcttgaacttgccaccatggtgctgcctgccagtggcactgctgtgatagccactacaatactgggcatttgcaacattacttgactactttgttgcattattgtccttatcatttaataaacatgggtggcagacaacaatacgaaagtacagacagtcacaataacaggtcccacacacccttccatggagacacacatggaaactgttagtacactaaacccgtagctcaacaagttgcttctggccttaatctgtaaactgtgaaggtaatgcacaaatacgaagatgtgataactcctactattcattgagtgcttactctgctaagtgcttaacacatatgatttcatttgacccactgaggtagtaactatttacaattcctattttacagatgagacattagagaggttggtcctcgtcacatagccagtcacttgctaaagctgtagagccaggaactatgctctaggcttaagctctggcatgagactgcctcactccatgacttgttggctatgtgatcttggacaagttaattaacctcgctgtgcctcaatgttctcatctagaaaatggggatagtagtatccacctcatagagtgaactgaatgaaataaagcatgcaaaatgctcagccactgatacacagcaactgtttgctaaactttagatattttattaacaatgtattaaatgttggaaaaataagagagatgtttgcctgtgtacagactttttttgttgttggtttttcccagccctgctgaggaatgccagtgtacccctgttgggaggaacagacttcgactatatagattgtgggcttaaaaaaaagtatacttaagggcatcatcacttgagtttctcagtccacctgggtcaagtataaagtactaactcacaccactgtcccctaaatgacagttcagatcccgaaacaccaaatagccttcaatggttgctgcctgtgccgtgccaggcctgccgagccttgggggtctatgttctaattcctttcctaagacttctggtttaaacacaacaatctgtcacttctctcactgaggtatcagatgttcatggactttggccctgggaaacctgacctcctcattcttttatcaaaacatcttggaattcctctcactatgaatttctagtaggtgttaatcctcactactgcccttactcagctcaactccacttaaaggcattttagaatctctgggcctactctacccatttgacaccacagtcgacaacctctactagtccaaatcctgtctctgtccttctcattcttcaatgccatcgcactaacggctcagtcttccatggctccacactatacaatcagcattttaagaataattcctacaatctacactaaaaaaaaatacttaagatcctcacatcatgtgtcagtaggcactttctcctcccacttcagctctagatgagatgttttaataacagccacttatgggggaaaacagctaagaagggaacaaaaagtataatcacaccttatacaaataaagagtagcagagacctttagactaatccaacattttagtggcacattacccactaggcccaactcttccttcagtaactctacaaaagcttaccttgtagaagattgattctgcagtgattatagtggaaactgactcaggagctttgatgggctatgaaaatacaaaaaacattagcacattcatagtatgtatgtgtctacaggcattttcccagccctatgagagttctgcaatttgagaagtactaaaatgtattgtttggtgacaagaactgcaataaaaagataaatgattttctgaatgttgtggcaaagcagtctatttccactgcaatttctgctactattagcttaaaaattgctgagacaaaggacaaccttctgattatgctgctgagatctaatgcaaagtcctctcagagcttcactacacataaacattccagttataaaaatgtacctgctctaatagcctgagcatgacagaatgcaagtaacagaaaatgtacagatgaatacaaagtgaaaaagtgtctcctcaaagacatttcccaactcaactatggaactagccataatactcaacataggttttctagcaagctgaaactaaggctttagaaactttgagagttcttagtaatttgctaccatccaaccatttttgagatctctactaaagctt

SEQ ID NO: 82 - DNA, 2333 bp, Homo sapiens
acgagcagcgacgcccctggtcccacagataccactgcctcccgccctttcgctcctcggccgcgcaatgggcacccgcgacgacgagtacgactacctctttaaagttgtccttattggagattctggtgttggaaagagtaatctcctgtctcgatttactcgaaatgagtttaatctggaaagcaagagcaccattggagtagagtttgcaacaagaagcatccaggttgatggaaaaacaataaaggcacagatatgggacacagcagggcaagagcgatatcgagctataacatcagcatattatcgtggagctgtaggtgccttattggtttatgacattgctaaacatctcacatatgaaaatgtagagcgatggctgaaagaactgagagatcatgctgatagtaacattgttatcatgcttgtgggcaataagagtgatctacgtcatctcagggcagttcctacagatgaagcaagagcttttgcagaaaagaatggtttgtcattcattgaaacttcggccctagactctacaaatgtagaagctgcttttcagacaattttaacagagatttaccgcattgtttctcagaagcaaatgtcagacagacgcgaaaatgacatgtctccaagcaacaatgtggttcctattcatgttccaccaaccactgaaaacaagccaaaggtgcagtgctgtcagaacatctaaggcatttctcttctcccctagaaggctgtgtatagtccatttcccaggtctgagatttaaatatatttgtaattcttgtgtcacttttgtgttttattacttcatacttatgaatttttccatgtcctaagtcttttgattttagctttataaaatcatccacttctcccgaatgactgcagctttttttcatgctatggcttcactagccttagtttaataaactgaatgtttggattcctcagttattgtttacttttcatcatggaagcctgtcactgtatgtaggacataatagaacttatcacttgaagctcagcctattggtcttgatcaaatcaaactaagaagaccttagaaataagctaccattttgccacagagcagcttataggtaatacactcttctctcagtgcagtgtacatttccacaaatctaagaattgccctataaacatagcagggattttgagagcttgaaaattttccattattctggacatgaatttctaaaatgccttaataggtttatgtagttgagtaaattttgttttttaatttttgtaagcatcaaagttgattagagaggggggcactttttctggagaattctcttagtaaacacaaaagattgttacggtttcattagtagtatggttgtggggccataagttaaacagtgctgcctggtaggctgggaactgaagagacttgtggtattccatctcgggtgcctctgttggcaatgatcaggcagcccaaaagatttaaatgatctataataatttccaagcggtagattatgtggcattttattgctcaggcaataattggtttaatgctggtagtgtcaaattttgaagtgttaattttgtcttaggaccttccagtaagtgaaatacaacctagttttatcaccatatccaccagcaggcatccataattattttaacaatgctaatatttgagttttgcagtatattatagaataatatagtccagttaaatctttggtttcagtatgtctgaagagtacagtgagaggttaattttctgctcaagtggtaccacttaaaggcatgtattcttttagtatgtaaaatgaaatagtaccttgagtttaaatagaatgcatttaggcattgtagagatctgaaatagttttcttccactgcgttgttgaaatcaatgaagcaattagtttctcattcagaaatgtgcacactaatatttagttttgctttctcgtggataatattaagcacttactctgcagtttctggaagttgtgtcaactgcagtgatactattcaggatggtgggaaatccccaaaaatatgtatcttttggcttgcttagattactatatttcatagttaatcttttgtctcttgcggtgctcatgatgtgtggggcacacggaaggcattgctgtagtcagtcattttggttttcttctatagccattttattattttagtgtattagttatgaagataatattatctatttgtaaattgctactttgtattttatgcatgctctgtaatttgatttttttttagttattgatttggattatattcacattctaataaacagttatagggggatt

SEQ ID NO: 83 - DNA, 1527 bp, Homo sapiens
  misc_feature (1)..(1527): n=a,t,g or c
ggcgaggaggctgcgagcgagccggaaccgagcgggcggcgggcgccgcacctatgggggagaaacccgggaccagggtcttcaagaagtcgagccctaactgcaagctcaccgtgtacttgggcaagcgggacttcgtagatcacctggacaaagtggaccctgtagatggcgtggtgcttgtggaccctgactacctgaaggaccgcaaagtgtttgtgaccctcacctgcgccttccgctatggccgtgaagacctggatgtgctgggcttgtccttccgcaaagacctgttcatcgccacctaccaggccttccccccggtgcccaacccaccccggccccccacccgcctgcaggaccggctgctgaggaagctgggccagcatgcccaccccttcttcttcaccataccccagaatcttccatgctccgtcacactgcagccaggcccagaggatacaggaaaggcctgcggggtagactttgagattcgagccttctgtgctaaatcactagaagagaaaagccacaaaaggaactctgtgcggctggtgatccgaaaggtgcagttcgccccggagaaacccggcccccagccttcagccgaaaccacacgccacttcctcatgtctgaccggtccctgcacctcgaggcttccctggacaaggagctgtactaccatggggagcccctcaatgtaaatgtccacgtcaccaacaactccaccaagaccgtcaagaagatcaaagtctctgtgagacagtacgccgacatctgcctcttcagcaccgcccagtacaagtgtcctgtggctcaactcgaacaagatgaccaggtatctcccagctccacattctgtaaggtgtacaccataaccccactgctcagcgacaaccgggagaagcggggtctcgccctggatgggaaactcaagcacgaggacaccaacctggcttccagcaccatcgtgaaggagggtgccaacaaggaggtgctgggaatcctggtgtcctacagggtcaaggtgaagctggtggtgtctcgaggcggggatgtctctgtggagctgccttttgttcttatgcaccccaagccccacgaccacatccccctccccagaccccagtcagccgctccggagacagatgtccctgtggacaccaacctcattgaatttgataccaactatgccacagatgatgacattgtgtttgaggactttgcccggcttcggctgaaggggatgaaggatgacgactatgatgatcaactctgctaggaagcggggtgggaaagaagggaggggatggggttgggagaggtgagggcaggattaagatccccactgtcaatgggggattgtcccagcccctcttcccttcccctcacctggaagcttcttcaaccaatcccttcacactctctcccccatccccccaagatacacactggaccctctcttgctgaatgtgggcattaattttttgactgcagntctgcttctccagccccgccgtgggtgg

SEQ ID NO: 84 - DNA, 379 bp, Homo sapiens
catatatagaaagctatttatttcctatagaaaactcaaaaacaaagaaaaagaaagaaaaataaagagagatagaaagagaaagggaaagaaagagagagaaaaaacaaacacacaaaaggtggtctttccccaaaaggcaggcagttgacgggaggacatgtagttgctggmgtgsgaaacagtaacattcagttaacaatggaatatttaaaaaaaaatagttttcttttcaaattgtaacttgtggtaaaacatagaaaaatgtactaaacgagcttgtataaaacagtaaaattttcaaataagcccaggggaaaagcacaatgctggaaagtctctctctctctctctctctctctctctctctctctctctc

SEQ ID NO: 85 - DNA, 3388 bp, Homo sapiens
aattcggagaacctgctacaggaacagctgcaggcagagacagagctgtatgcagaggctgaggagatgcgggtgcggctggcggccaagaagcaggagctggaggagatactgcatgagatggaggcccgcctggaggaggaggaagacaggggccagcagctacaggctgaaaggaagaagatggcccagcagatgctggaccttgaagaacagctggaggaggaggaagctgccaggcagaagctgcaacttgagaaggtcacggctgaggccaagatcaagaaactggaggatgagatcctggtcatggatgatcagaacaataaactatcaaaagaacgaaaactccttgaggagaggattagtgacttaacgacaaatcttgcagaagaggaagaaaaggccaagaatcttaccaagctgaaaaacaagcatgaatctatgatttcagaactggaagtgcggctaaagaaggaagagaagagccgacaggagctggagaagctgaaacggaagctggagggtgatgccagcgacttccacgagcagatcgctgacctccaggcgcagatcgcagagctcaagatgcagctggccaagaaggaggaggagctgcaggcggccctggccaggcttgacgatgaaatcgctcagaagaacaatgccctgaagaagatccgggagctggagggccacatctcagacctccaggaggacctggactcagagcgggccgccaggaacaaggctgaaaagcagaagcgagacctcggcgaggagctggaggccctaaagacagagctggaagacacactggacagcacagccactcagcaggagctcagggccaagagggagcaggaggtgacggtgctgaagaaggccctggatgaagagacgcggtcccatgaggctcaggtccaggagatgaggcagaaacacgcacaggcggtggaggagctcacagagcagcttgagcagttcaagagggccaaggcgaacctagacaagaataagcagacgctggagaaagagaacgcagacctggccggggagctgcgggtcctgggccaggccaagcaggaggtggaacataagaagaagaagctggaggcgcaggtgcaggagctgcagtccaagtgcagcgatggggagcgggcccgggcggagctcaatgacaaagtccacaagctgcagaatgaagttgagagcgtcacagggatgcttaacgaggccgaggggaaggccattaagctggccaaggacgtggcgtccctcagttcccagctccaggacacccaggagttgcttcaagaagaaacccggcagaagctcaacgtgtctacgaagctgcgccagctggaggaggagcggaacagcctgcaagaccagctggacgaggagatggaggccaagcagaacctggagcgccacatctccactctcaacatccagctctccgactcgaagaagaagctgcaggactttgccagcaccgtggaagctctggaagaggggaagaagaggttccagaaggagatcgagaacctcacccagcagtacgaggagaaggcggccgcttatgataaactggaaaagaccaagaacaggcttcagcaggagctggacgacctggttgttgatttggacaaccagcggcaactcgtgtccaacctggaaaagaagcagaggaaatttgatcagttgttagccgaggagaaaaacatctcttccaaatacgcggatgagagggacagagctgaggcagaagccagggagaaggaaaccaaggccctgtccctggctcgggcccttgaagaggccttggaagccaaagaggaactcgagcggaccaacaaaatgctcaaagccgaaatggaagacctggtcagctccaaggatgacgtgggcaagaacgtccatgagctggagaagtccaagcgggccctggagacccagatggaggagatgaagacgcagctggaagagctggaggacgagctgcaagcctcggaggacgccaaactgcggctggaagtcaacatgcaggcgctcaagggccagttcgaaagggatctccaagcccgggacgagcagaatgaggagaagaggaggcaactgcagagacagcttcacgagtatgagacggaactggaagacgagcgaaacgaacgtgccctggcagctgcagcaaagaagaagctggaaggggacctgaaagacctggagcttcaggccgactctgccatcaaggggagggaggaagccatcaagcagctacgcaaactgcaggctcagatgaaggactttcaaagagagctggaagatgcccgtgcctccagagatgagatctttgccacagccaaagagaatgagaagaaagccaagagcttggaagcagacctcatgcagctacaagaggacctcgccgccgctgagagggctcgcaaacaagcggacctcgagaaggaggaactggcagaggagctggccagtagcctgtcgggaaggaacgcactccaggacgagaagcgccgcctggaggcccggatcgcccagctggaggaggagctggaggaggagcagggcaacatggaggccatgagcgaccgggtccgcaaagccacacagcaggccgagcagctcagcaacgagctggccacagagcgcagcacggcccagaagaatgagagtgcccggcagcagctcgagcggcagaacaaggagctccggagcaagctccacgagatggagggggccgtcaagtccaagttcaagtccaccatcgcggcgctggaggccaagattgcacagctggaggagcaggtcgagcaggaggccagagagaaacaggcagccaccaagtcgctgaagcagaaagacaagaagctgaaggaaatcttgctgcaggtggaggacgagcgcaagatggccgagcagtacaaggagcaggcagagaaaggcaatgccagggtcaagcagctcaagaggcagctggaggaggcagaggaggagtcccagcgcatcaacgccaaccgcaggaagctgcagcgggagctggatgaggccacggagagcaacgaggccatgggccgtgaggtgaacgcactcaagagcaagctcagagggccccccccacaggaaacttcgcagtgatgcaccaggcgaggaaacgagacctctttcgttccttctagaaggtctggaggacgtagagttattgaaaatgcagatggttctgaggaggaactggacactcgagacgcagacttcaatggaaccaaggccagtgaataagcaactttctacagttttgcaccacggcaagaaaaccaaaaaccaaaacaaacaaacaaaaaaaacccaacaacaacccgaacaagac

SEQ ID NO: 86 - DNA, 1487 bp, Homo sapiens
cgaaacagtagaggtgacagagcagccgtgctcgaagcgttcctggagcccaagctctcctccacaggtgaagacagggccagcaggagacaccatggggcacctctcagccccacttcacagagtgcgtgtaccctggcaggggcttctgctcacagcctcacttctaaccttctggaacccgcccaccactgcccagctcactactgaatccatgccattcaatgttgcagaggggaaggaggttcttctccttgtccacaatctgccccagcaactttttggctacagctggtacaaaggggaaagagtggatggcaaccgtcaaattgtaggatatgcaataggaactcaacaagctaccccagggcccgcaaacagcggtcgagagacaatataccccaatgcatccctgctgatccagaacgtcacccagaatgacacaggattctacaccctacaagtcataaagtcagatcttgtgaatgaagaagcaactggacagttccatgtatacccggagctgcccaagccctccatctccagcaacaactccaaccctgtggaggacaaggatgctgtggccttcacctgtgaacctgagactcaggacacaacctacctgtggtggataaacaatcagagcctcccggtcagtcccaggctgcagctgtccaatggcaacaggaccctcactctactcagtgtcacaaggaatgacacaggaccctatgagtgtgaaatacagaacccagtgagtgcgaaccgcagtgacccagtcaccttgaatgtcacctatggcccggacacccccaccatttccccttcatacacctattaccgtccaggggcaaacctcagcctctcctgctatgcagcctctaacccacctgcacagtactcctggcttatcaatggaacattccagcaaagcacacaagagctctttatccctaacatcactgtgaataatagtggatcctatacctgccacgccaataactcagtcactggctgcaacaggaccacagtcaagacgatcatagtcactgagagacagaatctcaccatgttgcccgggctggactcgaactcctgggctcaagcaatcctcccatctgtttcccaaagtgctgagattacagataatgctctaccacaagaaaatggcctctcacctggggccattgctggcattgtgattggagtagtggccctggttgctctgatagcagtagccctggcatgttttctgcatttcgggaagaccggcagggcaagcgaccagcgtgatctcacagagcacaaaccctcagtgtccaaccacactcaggaccactccaatgacccacctaacaagatgaatgaagttacttattctaccctgaactttgaagcccagcaacccacacaaccaacttcagcctccccatccctaacagccacagaaataatttattcagaagtaaaaaagcagtaatgaaacg

SEQ ID NO: 87 - DNA, 2416 bp, Homo sapiens
gaacagtgttaccttggagcctacaatgagaggtatttcaaaatgagtgaagcatgactctcacagatgaaggcctagacgcaggatctttaatggaaaaacacttgggccacttcaagacgacaaacgctcactgggcaaaacaccttcactgaaaagagacctcatattatgcaaaaaaaatcttaagaggcctctgccttcagaagttacaagatgatcaattcaacctccacacagcctccagatgaatcctgctctcagaacctcctgatcactcagcagatcattcctgtgctgtactgtatggtcttcattgcgggaatcctactcaatggagtgtcaggatggatattcttttacgtgcccagctctaagagtttcatcatctatctcaagaacattgttattgctgactttgtgatgagcctgacttttcctttcaagatccttggtgactcaggccttggtccctggcagctgaacgtgtttgtgtgcagggtctctgccgtgctcttctacgtcaacatgtacgtcagcattgtgttctttgggctcatcagctttgacaggtattataaaattgtaaagcctctttggacttctttcatccagtcagtgagttacagcaaacttctgtcagtgatagtatggatgctcatgctcctccttgctgttccaaatattattctcaccaaccagagtgttagggaggttacacaaataaaatgtatagaactgaaaagtgaactgggacggaagtggcacaaagcatcaaactacatcttcgtggccatcttctggattgtgtttcttttgttaatcgttttctatactgctatcacaaagaaaatctttaagtcccaccttaagtcaagtcggaattccacttcggtcaaaaagaaatctagccgcaacatattcagcatcgtgtttgtgttttttgtctgttttgtaccttaccatattgccagaatcccctacacaaagagtcagaccgaagctcattacagctgccagtcaaaagaaatcttgcggtatatgaaagaattcactctgctactatctgctgcaaatgtatgcttggaccctattatttatttctttctatgccagccgtttagggaaatcttatgtaagaaattgcacattccattaaaagctcagaatgacctagacatttccagaatcaaaagaggaaatacaacacttgaaagcacagatactttgtgagttcctaccctcttccaaagaaagaccacgtgtgcatgttgtcatcttcaattacataacagaaatcaataagatatgtgccctcatcataaatatcatctctagcactgccatccaatttagttcaataaaattcaaatataagtttccatgcttttttgtaacatcaaagaaaacatacccatcagtaatttctctaatactgacctttctattctctattaataaaaaattaatacatacaattattcaattctattatattaaaataagttaaagtttataaccactagtctggtcagttaatgtagaaatttaaatagtaaataaaacacaacataatcaaagacaactcactcaggcatcttctttctctaaataccagaatctagtatgtaattgttttcaacactgtccttaaagactaacttgaaagcaggcacagtttgatgaagggctagagagctgtttgcaataaaaagtcaggtttttttcctgatttgaagaagcaggaaaagctgacacccagacaatcacttaagaaaccccttattgatgtatttcatggcactgcaaaggaagaggaatattaattgtatacttagcaagaaaattttttttttctgatagcactttgaggatattagatacatgctaaatatgttttctacaaagacttacgtcatttaatgagcctggggttctggtgttagaatatttttaagtaggctttactgagagaaactaaatattggcatacgttatcagcaacttcccctgttcaatagtatgggaaaaataagatgactgggaaaaagacacacccacaccgtagaacatatattaatctactggcgaatgggaaaggagaccattttcttagaaagcaaataaacttgatttttttaaatctaaaatttacattaatgagtgcaaaataacacataaaatgaaaattcacacatcacatttttctggaaaacagacggattttacttctggagacatggcatacggttactgacttatgagctaccaaaactaaattctttctctgctattaactggctagaagacattcatctatttttcaaatgttctttcaaaacatttttataagtaatgtttgtatctatttcatgctttactgtctatatactaataaagaaatgttttaatactg

SEQ ID NO: 88 - DNA, 3900 bp, Homo sapiens
ctaggcctgggactcctgggtccccggcagtgtctggaggcatggctggggctggcgggggcctcggggtctgggggaacctggtgctgctgggcctgtgcagctggacaggggccagggcgcctgcccccaacccagggaggaacctgacagtggagactcagaccaccagctccatctccctgagctgggaggtccccgatggcctagactcacagaactccaactactgggttcagtgtactggagacggcggcacaacagagactcgaaacacaacagccaccaacgtcaccgtggatggccttggacccgggtcattgtatacgtgttctgtgtgggtggagaaagacggagtaaatagctctgtggggactgtcactactgccacagctcccaacccagtgaggaacctgagagtggaggctcagaccaacagctccatcgccctgacctgggaggtccccgacggcccagacccacagaactccacctacggggttgagtacactggagatggtggcagagcagggactcgaagcacagcacacactaacatcaccgtggatggacttgaacccgggtgtttgtatgcgttttccatgtgggtgggaaagaatggaatcaacagctcccgggagactcgaaatgccaccacagctcacaacccagtgaggaaacctgagagtggaggctcagaccaccagctccatctccctgagctgggaggtccccgatggcacagacccacagaactcgacctactgcgtacgagtgcactggagatggtggcagaacagagactcgaaacacaacagacaccagagtcaccagtggatggccttggacccgggtcattgtatacgtgttctgtgtgggtggagaaagacggagtaaatagctcctcgtggagattggtaactagtaccacagctcccaacccagtgagaaacctgacagtggaggctcagaccaacagctccatcgccctgacctgggaggtccccgatggcccagacccacagaactccacctacggggttgagtacactggagatggtggcagagcagggactcgaagcacagcacacaccaacatcaccgtggatagacttgaacccgggtgtttgtatgtgttttccgtgtgggtggggaagaatggaatcaacagctcccgggagactcgaaatgccaccacagcccccaacccagtgagaaacctccatatggagactcagaccaacagctccatcgccctatgctgggaagtccccgatggcccataccctcaggactacacctactgggtagggtacactggagacggtggtggcacagagacccgaaacacaacaaataccagtgtgacagctgagagacttgagcccggaaccttgtacacattctctgtatgggcagaaaaaaatggagcacgtggctccaggcagaatgtcagcatctccacagtccccaacgcagtgacaagcctcagcaagcaggactggaccaacagcaccattgctttgcgctggacagctccccagggcccaggccagtcttcctacagctactgggtctcatgggtcagggaaggcatgactgaccccaggacccaaagcacctcaggtactgacatcaccctaaaggaactggaagctggcagcctgtaccacctcaccgtctgggccgagaggaatgaggtcagaggctataacagcaccctcactgcagccactgctcccaatgaggtcacagatctccagaatgaaactcagactaagaactcagtcatgctgtggtggaaggcccctggagacccccactctcagttgtacgtatactgggtccagtgggccagcaagggacatccccggagggggcaagatccccaagcgaattgggtcaaccagaccagcaggaccaatgagacgtggtacaaagtggaggccctggaacccgggacgttgtacaatttcaccgtgtgggcagagaggaatgacgtagccagttccacgcagagcctctgtgcgtccacatacccagacacagtcaccatcacttcctgtgtcagcacctcagcgggctatggagtcaacttgatctggtcctgcccccagggaggctacgaggcctttgagttggaggtgggaggacagcggggctcccaggacagatcttcatgtggggaggctgtgtctgtgttgggtctcgggccggctcggtcctacccagccaccatcacgaccatctgggacggaatgaaggtcgtgtctcactctgtggtctgccacaccgagagtgcaggggtcattgccggagcctttgtgggcatcctcctgtttctcatcctcgtgggcctgctgattttcttcctgaagaggaggaataagaagaagcagcagaaaccagaactcagggatctggtctttagctccccaggggacatcccagctgaagacttcgctgaccacgtcaggaagaatgagagggacagcaactgtggttttgcagacgagtaccagcaactctccctggtgggccacagccagtctcagatggtggcttcggcttcagagaacaacgccaagaaccgctacagaaatgtgctgccctatgactggtcccgggtgcccctgaagcccatccatgaggagccaggctctgactacatcaatgccagcttcatgcccggtctctggagcccccaggagttcattgcaacccagggtcccctgccacagacagtgggtgacttctggcgcctggtgtgggaacagcagagccacaccctggtcatgctgaccaactgcatggaggccggccgggtgaagtgtgagcattactggcctctggactcgcagccctgcacccatgggcacctgcgggtaaccctggtaggtgaggaagtgatggagaactggacggtgcgggaactgctgctcctccaggtggaggagcagaagacactgtctgtgcgccaattccactaccaggcctggccggatcacggcgttccctcctccccagacaccttgctggctttctggaggatgcttcggcagtggctggatcagaccatggagggaggcccacccattgtgcactgcagtgctggcgtgggtcgcacaggaaccctcattgccctggacgtcctgctccggcagctgcagtccgagggtctccttgggcccttcagctttgtaaggaagatgagagagagtcggccgttgatggtgcagactgaggctcagtacgtattcctgcatcagtgcatctgcggttcctccaacagtcagcccaggccccagccgagaaggaagtcccgtatgaggatgtcgaaaacctcatctacgagaacgtggccgccatccaggcccacaagttggaggtctaagtgacgagggggctgggtcggcagcccaggcatcctcaagctctggacacccacttgagcccagattcctggaagagcagagggctgggctcccagactcctgggtgctgtgggaggagggggctggtatcccaaactctggtttccccaggagagagtggtctggtgggcttcagatgagtcctatgggagctggggatctggattcctggttccctgaaggaggagagggatgatagcttggattccctaggtctttccaggatgcagaaagaaacaggctggggcctggattctgaggcaggaaggaatttgggtctggagttctggctacttgaggaccaaaggcaggaaggatcctgccttgattttacttcagaaaccaaatcagtcttctataatctggggtcggagggagtccctgtgcccaaggtctctctgcaccccaccatccacatgtatttttccttctatcccataatttattaaatcactgttctccccag

SEQ ID NO: 89 - DNA, 1486 bp, Homo sapiens
caaatcttccaaagaatcctctaagaaacccaaagaaaataaaccactgaaagaagagaaaatagttcctaagatggccttcaaggaacctaaacccatgtcaaaagagccaaaaccagatagtaacttactcaccatcaccagtggacaagataagaaggctcctagtaaaaggccgcccatttcagattctgaagaactctcagccaaaaaaaggaaaaagagtagctcagaggctttatttaaaagtttttctagcgcaccaccactgatactcacttgttctgctgacaaaaaacagataaaagataaatctcatgtcaagatgggaaaggtcaaaattgaaagtgagacatcagagaagaagaaatcaacgttaccgccatttgatgatattgtggatcccaatgattcagatgtggaggagaatatatcctctaaatctgattctgaacaacccagtcctgccagctccagctccagctccagctccagcttcacaccatcccagaccaggcaacaaggtcctttgaggtctataatgaaagatctgcattctgatgacaatgaggaggaatcagatgaagtggaggataacgacaatgactctgaaatggagaggcctgtaaatagaggaggcagccgaagtcgcagagttagcttaagtgatggcagcgatagtgaaagcagttctgcttcttcacccctacatcacgaacctccaccacccttactaaaaaccaacaacaaccagattcttgaagtgaaaagtccaataaagcaaagcaaatcagataagcaaataaagaatggtgaatgtgacaaggcatacctagatgaactggtagagcttcacagaaggttaatgacattgagagaaagacacattctgcagcagatcgtgaaccttatagaagaaactggacactttcatatcacaaacacaacatttgattttgatctttgctcgctggacaaaaccacagtccgtaaactacagagttacctggaaacatctggaacatcctgaggatataacaactggatgcatcaagaactattgtgttttttttttttggttttttttttttttggttgtgattttttgttcttgttgtttatatgaaaacactcaaaatgatgcaaccaaaagggaaaaaataaaaatcaaacaaccttcagctttatttttctttaaagccagtcatcatctcttgataaaggagaggttaaagcaaaccagcctcagcggaccactcttctctccaaggaaatccccgggaagagttagcctggatagccttgaaaacaaacaaatcaaacacaacacaagaaaactcaaagaatgtgtatggtatcatgtatctctctgtggtggttcattccacaggacgaatgcatattcaacacactgccttattacataactgatctatttattatcgcatacagatattctaagtcgttgagggaatgacaccatcag

SEQ ID NO: 90 - DNA, 257 bp, Homo sapiens
  misc_feature (1)..(257): n=a,t,g or c
gatcnnggctaagccagccagcccncccgcgccaggnaaaacagggctgcaggtgtcctgtctcccagcctcatctggccggcctccccaaacatttgcctgtccatcagctcttcctcctttcgagtcatgtggaaagggacaggnccaagtggccttggtgtttaaatcttgccctaaattgtaactcacatgattatttaaagtcactaganataagtaagcacagcaataaagntttaatggaataaaagaaa

SEQ ID NO: 91 - DNA, 251 bp, Homo sapiens
gatccgcccacttcagcctctcaaagtcagggattacaggtgtgagccactgtgcccggcctcctcagtccatttttaatactgaaggtataaattgtataaagatgtttagaaagttctaattcattttatgcatttttgcaaatttgactccatgaaagtgcattatcacgaagctgaatttgtgtaagcattgtgcatgtatgtaaaaacattgcaacttcctcaataaaatatcttctttttgtaaa

SEQ ID NO: 92 - DNA, 9517 bp, Homo sapiens
gttgctgtcggagagagaaagccgcacccgagaggaggtgtgggtgttccgcttccatcctaacggaacgagctccctcttcgcggacatgggattacccagcggctgctaacccctctcctcgccctgctcccccaaaccggcgtggctccccgggcaccaaggagctgactacagaggagcaggatttgcacccctcgctgggcttgctttggcaacagagtgcctgacccaggtcaggattttcaagaaagacatgtctgacaaaatgtctagcttcctacatattggagacatttgttctctgtacgcggagggatcgacaaatggatttattagcaccttgggcctggttgatgatcgttgtgttgtacagccagaaaccggggaccttaacaatccacctaagaaattcagagactgcctctttaagctatgtcccatgaaccgctactctgcccaaaagcagttctggaaagccgctaagcctggggccaacagcaccacagacgcagtgctactcaacaaactgcaccacgctgcagacttggaaaagaagcagaatgagacagaaaacaggaaattgctggggaccgtaatccagtatggcaatgtgatccagctcctgcatttgaaaagtaataaatacctaacagtgaataagaggcttcctgctctgttggagaagaatgccatgagagtcacattggacgaggctggaaatgaagggtcctggttttatattcagccattctacaagctgcgatccattggagacagcgtggtcataggtgacaaggtggttctgaaccccgtcaatgctggtcagcccctacatgctagcagccatcaactggtagataacccaggctgcaatgaggtcaattccgtcaactgcaatacaagctggaaaatagtccttttcatgaaatggagtgataacaaagacgacatattaaaggggggtgacgtggtgaggctgtttcatgctgagcaggagaagtttctcacctgtgacgaacacaggaagaagcagcacgtcttcctgagaaccacgggccggcagtcggccacatctgccaccagttcaaaagccctgtgggaggtggaggtggtccagcatgacccatgtcggggcggagcagggtattggaacagccttttccgtttcaagcatctggccacggggcattacttggcagcagaggtggaccctgatcaggacgcctctcgaagtaggttgcggaatgcccaagaaaagatggtatactccctggtctctgtgcctgaaggcaatgacatctcctccattttcgagctagatcccaccactctgcgtggaggtgacagccttgtcccaaggaactcttatgttcggctcagacacctatgtactaatacctgggttcacagcacaaatattcctattgacaaggaagaagaaaagcccgtgatgctgaaaattggcacctctcctgtgaaggaggataaggaagcatttgccatagttccggtttctcctgctgaagttcgggacctggactttgccaatgatgccagcaaggtgctgggctccattgctgggaagctagagaagggcaccatcacccagaatgaaaggaggtctgtaaccaagctgctagaagatttggtttacttcgtcactggtggaactaattctggtcaagatgttctcgaagttgtcttctccaagcccaacagagaacggcagaaactgatgagagaacagaatattctcaagcagatcttcaagttgttacaagccccattcacagactgcggtgatggcccaatgcttcggctggaagagctcggggaccagcggcacgctcctttcagacacatctgccggctctgctacagggtgctgagacactcgcagcaagactacaggaagaaccaggagtatatagccaagcagtttggcttcatgcagaagcagattggctatgatgtgttggctgaagacactatcactgccctgctccacaataatcggaaactcctggaaaaacacattaccgcggcagagattgacacatttgtcagcctggtgcgaaagaacagggagcccagattcttagattacctctccgacctctgtgtctccatgaacaaatcaattccagtgacccaggaactgatatgtaaagctgtgctgaaccccaccaacgctgacatcctgattgagaccaaattggttctttctcgttttgaatttgaaggtgtctcttccactggagagaatgctctggaggcaggagaagacgaggaagaggtgtggctgttttggagggacagcaacaaagagattcgcagcaagagtgtgagggaattggctcaggatgctaaagaagggcagaaggaggaccgagacgttctcagctactacagatatcagctgaacctctttgcgaggatgtgtctggaccgccaatacctggccatcaacgaaatctcaggccagctggatgtcgatctcattctccgctgcatgtctgacgagaacctgccctatgacctcagggcgtccttctgccgcctcatgcttcacatgcatgtggaccgagatccccaggaacaagtcacccccgtgaaatatgcccgcctctggtcggagattccctcggagatcgccattgacgactatgatagtagtggagcttccaaagatgaaattaaggagagatttgctcagaccatggagtttgtggaggagtatttaagagatgtggtttgtcagaggttccctttctctgataaagagaagaataagcttacgtttgaggttgtaaatttagctaggaatctcatatactttggtttctacaacttctctgaccttctccgattaactaagatccttctggccatattggactgtgtacatgtgacaacaatcttccccattagcaagatggcgaaaggagaagagaataaaggcagtaacgtgatgagatctattcatggcgtgggagagctgatgacccaggtggtgctccggggaggaggctttttgcccatgactcccatggctgctgcccctgaaggcaatgtgaagcaggcagagcctgagaaggaggacatcatggtcatggacaccaagctgaagatcattgagatactccagtttattttgaatgtgaggttggattataggatctcctgcctcctgtgtatatttaagcgagagtttgatgaaagcaattcccagacttcagaaacatcctccggaaacagcagccaagaagggccaagtaatgtaccaggtgctcttgactttgaacacattgaagaacaagcagaaggcatctttggaggaagtgaggagaacaccccactggacttggatgaccacggcggcagaacctttctccgtgtcctgctccacttgacgatgcatgactacccacccctggtgtcaggggccctgcagctcctcttccggcacttcagccagaggcaggaggtgctccaggccttcaaacaggttcaactgctggttaccagccaagatgtggacaactacaaacagatcaaacaagacttggatcaactgaggtccatcgtggaaaagtcagagctttgggtgtacaaagggcagggccccgatgagactatggatggtgcatctggagaaaatgaacataagaaaacggaggagggaaataacaagccacaaaagcatgaaagcaccagcagctacaactacagagtggtcaaagagattttgattcggcttagcaaactctgtgttcaagagagtgcctcagtgagaaagagcaggaagcagcaacagcgtctgctccggaacatgggcgcgcacgccgtggtgctggagctgctgcagattccctatgagaaggccgaagataccaagatgcaagagataatgaggttggctcatgaatttttgcagaatttctgcgcaggcaaccagcagaatcaagctttgctacataaacacataaacctgtttctcaacccagggatcctggaggcagtaaccatgcagcacatcttcatgaacaatttccagctttgcagtgagatcaacgagagagttgttcagcacttcgttcactgcatagagactcacggtcggaatgtccagtatataaagttcttacagacaattgtcaaggcagaagggaaatttattaaaaaatgccaagacatggttatggccgagctggtcaattcgggagaggatgtcctcgtgttctacaacgacagagcctctttccagactctgatccagatgatgcggtcagaacgggatcggatggatgagaacagccctctcatgtaccacatccacttggtcgagctcctggctgtgtgcacggagggtaagaatgtctacacagagatcaagtgcaactccctgctcccgctggatgacatcgttcgcgtggtgacccacgaggactgcatccctgaggttaaaattgcatacattaacttcctgaatcactgctatgtggatacagaggtggaaatgaaggagatttataccagcaatcacatgtggaaattgtttgagaatttccttgtagacatctgcagggcctgtaacaacactagtgacaggaaacatgcagactcgattttggagaagtatgtcaccgaaatcgtcatgagtattgttactactttcttcagctctcccttctcagaccagagtacgactttgcagactcgccagcctgtctttgtgcaactgctgcaaggcgtgttcagggtttaccactgcaactggttaatgccaagccaaaaagcctccgtggagagctgtattcgggtgctgtctgatgtagccaagagccgggccattgccattcccgtggacctggacagccaagtcaacaacctctttctcaagtcccacagcattgtgcagaaaacagccatgaactggcggctctcagcccgcaatgccgcacgcagggactctgttctggcagcttccagagactaccggaatatcattgagagattgcaggacatcgtctccgcgctggaggaccgtctcaggcccctggtgcaggcagagttatctgtgctcgtggatgttctccacagacccgagctgcttttcccagagaacacagacgccagaaggaaatgtgaaagtggcggtttcatttgcaagttaataaagcatacaaaacagctgctagaagaaaatgaagagaagctctgcattaaggtcctacagaccctgagggaaatgatgaccaaagatagaggctatggagaaaagggtgaggcgctcaggcaagttctggtcaaccgttactatggaaacgtcagaccttcgggacgaagagagagccttaccagctttggcaatggcccactgtcagcaggaggacccggcaagcccgggggaggagggggaggttccggatccagctctatgagcaggggtgagatgagtctggccgaggttcagtgtcaccttgacaaggagggggcttccaatctagttatcgacctcatcatgaacgcatccagtgaccgagtgttccatgaaagcattctcctggccattgcccttctggaaggaggcaacaccaccatccagcactcctttttctgtcgcttgacagaagataagaagtcagagaaattctttaaggtgttttatgaccggatgaaggtggcccagcaagaaatcaaagcaacagtgacagtgaacaccagtgacttgggaaataaaaagaaagacgatgaggtagacagggatgccccatcacggaaaaaagctaaagagcccacaacacagataacagaagaggtccgggatcagctcctggaggcctccgctgccaccaggaaagccttcaccactttcaggagggaggctgatcccgacgaccactaccagcctggagagggcacccaggccactgccgacaaggccaaggacgacctggagatgagcgcggtcatcaccatcatgcagcccatcctccgcttccttcagctcctgtgtgaaaaccacaaccgagacctgcagaacttcctccgttgccaaaataacaagaccaactacaatttggtatgtgagaccctgcagtttctggactgtatttgtggaagcacaactggaggccttggtcttctgggcttgtatataaatgaaaagaacgtagcgcttatcaaccaaaccctggaaagtctgaccgaatactgtcaaggaccttgccatgagaaccagaactgcatagccacccatgaatccaatggcattgacatcatcacagccctgatcctcaatgatatcaatcctttgggaaagaagaggatggaccttgtgttagaactgaagaacaatgcctcgaagttgctcctggccatcatggaaagcaggcacgacagtgaaaacgcagagaggatactttataacatgaggcccaaggaactggtggaagtgatcaagaaagcctacatgcaaggtgaagtggaatttgaggatggagaaaacggtgaggatggggcggcgtcccccaggaacgtggggcacaacatctacatattagcccatcagttggctcggcataacaaagaacttcagagcatgctgaaacctggtggccaagtggacggagatgaagccctggagttttatgccaagcacacggcgcagatagagattgtcagattagaccgaacaatggaacagatagtctttcccgtgcccagcatatgtgaattcctaaccaaggagtcaaaactacgaatttactatactacagagagagacgaacaaggcagcaaaatcaatgatttctttctgcggtctgaagacctcttcaatgaaatgaattggcagaagaaactgagagcccagcccgtgttgtactggtgtgcccgcaacatgtctttctggagcagcatttcgtttaacctggccgtcctgatgaacctgctggtggcgtttttctacccgtttaagggagtccgaggaggaaccctggagccccactggtcgggactcctgtggacagccatgctcatctctctggccatcgtcattgccctccccaagccccatggcatccgggccttaattgcctccacaattctacgactgatattttcagtcgggttacaacccacgttgtttcttctgggcgctttcaatgtatgcaataaaatcatctttctaatgagctttgtgggcaactgtgggacattcacaagaggctaccgagccatggttctggatgttgagttcctctatcatttgttgtatctggtgatctgtgccatggggctctttgtccatgaattcttctacagtctgctgctttttgatttagtgtacagagaagagactttgcttaatgtcattaaaagtgtcactcgcaatggacggtccatcatcctgacagcagttctggctctgatcctcgtttacctgttctcaatagtgggctatcttttcttcaaggatgactttatcttggaagtagataggctgcccaatgaaacagctgttccagaaaccggcgagagtttggcaagcgagttcctgttctccgatgtgtgtagggtggagagtggggagaactgctcctctcctgcacccagagaagagctggtccctgcagaagagacggaacaggataaagagcacacatgtgagacgctgctgatgtgcattgtcaccgtgctgagtcacgggctgcggagcgggggtggagtaggagatgtactcaggaaaccgtccaaagaggaacccctgtttgctgctagagttatttatgacctcttgttcttcttcatggtcatcatcattgttcttaacctgatttttggggttatcattgacacttttgctgacctgaggagtgagaagcagaagaaggaagagatcttgaagaccacgtgctttatctgtggcttggaaagagacaagtttgacaacaagactgtcacctttgaagagcacatcaaggaagaacacaacatgtggcactatctgtgcttcatcgtcctggtgaaagtaaaggactccaccgaatatactgggcctgagagttacgtggcagaaatgatcaaggaaagaaaccttgactggttccccaggatgagagccatgtcattggtcagcagtgattctgaaggagaacagaatgagctgagaaacctgcaggagaagctggagtccaccatgaaacttgtcacgaacctttctggccagctgtcggaattaaaggatcagatgacagaacaaaggaagcagaaacaaagaattggtcttctaggacatcctcctcacatgaatgtcaacccacaacaaccagcataagcaaatgaaagaaaggaattgtatttaccttttataattattattagtgtgggtatggctaatgagttctgattcacccacgaaggttacatttatgctgaatacatttgtaaatactcagttttatactgtatgtatatgattgctactctaaaggtttggatatatgtattgtaattagaattgttggcatgatgacatttcatttgtgccaaaaatattaaaaatgccttttttggaaggactaacagaaagcacctgatttgcacttgaaccagattatagatttaaaagtatatgacatgtattttgtatttaaaactagaatagccagtatttatgttttttataaaactgtgcaatacgaattatgcaatcacaatacatttgtagctcccgagtgtcctaaagggagtgcacttctttgaagctggtgtgttaatactatgtaataaatggttaactttcaaatgatgctgctgccaaaattatattaatagtgagtttcaggcccctgggcattttgtaccatgtaattatcctctggtgatgctgtttctcgttagtggcagtagtgcctccgtctcctagtgataatgctccaagtctatgaactgttaaatcagcattcattttaagaaaagcaactttagtttcaaagatacttttaagcttctaaattgatcatttaaactatttctttaaataagagagccaaattagaggctcatactttagcttgtgaagaagataatgaattttttaaagggaactttctatgcaatgttcaggataaatcgatactgctggccaatcagtgtcatctcctgggtaaattttgatgtcgcattataaagacatgcataattgatggtttctagattatctagtccaaacaatagagtttattttttcttcatctgaaccaacatgctacagtagctaagaagtattaaaactatatacatccatataaagatgaaatatgaactatctcattagaagtcatagttgaccacagacatgttattcttctgaaagagccacattttggttttatttcttgtcacatgatttcttttcttgatggatgaaaaatatgaaatgaaatcttttatatctgttgcctagttttgtacatggatctcattttacaagagaatctctctgcta

SEQ ID NO: 93 - DNA, 124 bp, Homo sapiens
attttcgtggacgccgggtgagtgagagagttggttggtgttgggccggaggaaagcgggaagactcatcggagcgtgtggatttgagccgccgcattttttaaccctagatctcgaaatgcat

SEQ ID NO: 94 - DNA, 4359 bp, Homo sapiens
gtgagctgggctggcttccgtcctggtagccaaggctaattctccctcgagttcttgggagatgggcatttggcgagaaggctggcgttagtgaagcgcgcccggcgtcacggtgagtgcgggtcttgggccctagcacctgttctctgggaagtcgtccgctgtgaacgatgaacgcctttccttccaccagctgctggttaccccggagacaagctctgtccgcggagaggagtgggacaactcctaaaggaaagaagcacttgtaaggaaatatagcatccattgtgaaagtggaaaagtaaagataattcatcatgcctgctgtggcttcagttcctaaagaactctacctcagttcttcactaaaagaccttaataagaagacagaagttaaaccagagaaaataagcactaagagttatgtgcacagtgccctgaagatctttaagacagcagaagaatgcagattagatcgtgatgaggaaagggcctatgtactatatatgaaatacgtgactgtttataatcttatcaaaaaaagacctgatttcaagcaacagcaggattatttccattcaatacttggacctggaaacatcaaaaaagctgtcgaagaagctgaaagactctctgaaagccttaaattaagatatgaagaagctgaagtccggaaaaaacttgaggaaaaagacaggcaggaggaagcacagcggctacaacaaaaaaggcaggaaacaggaagagaggatggtggcacattggctaaaggctctttggagaatgttttggattccaaagacaaaacccaaaagagcaatggtgaaaagaatgaaaaatgtgagaccaaagagaaaggagcaatcacagcaaaggaactatacacaatgatgacggataaaaacatcagcttgattataatggatgctcgaagaatgcaggattatcaggattcctgtattttacattctctcagtgttcctgaagaagccatcagtccaggagtcactgctagttggattgaagcacacctgccagatgattctaaagacacatggaagaagagggggaatgtggagtatgtggtacttcttgactggtttagttctgccaaagatttacagattggaacaactctccggagtctgaaagatgcacttttcaagtgggaaagtaaaactgtcctgcgcaatgagcctttggttttagagggaggctatgaaaactggctcctttgttatccccagtatacaacaaatgctaaggtcactccacccccacgacgccagaatgaagaggtgtctatctcattggattttacttatccctcattggaagaatcaattccttctaaacctgctgcccagacgccacctgcatctatagaagtagatgaaaatatagaattgataagtggtcaaaatgagagaatgggaccactgaatatatcaactccagttgaaccagttgctgcttctaaatctgatgtttcacccataattcagccagtgcctagtataaagaatgttccacagattgatcgtactaaaaaaccagcagtcaaattgcctgaagagcatagaataaaatctgaaagtacaaaccatgagcaacaatctcctcagagtggaaaagttattcctgatcgttccaccaagccagtagttttttctccaactctcatgttaacagatgaagaaaaggctcgtattcatgcagaaactgctcttctaatggaaaaaaacaaacaagaaaaagaacttcgggaaaggcagcaagaggaacagaaagagaaactgaggaaggaagaacaagaacaaaaagccaaaaagaaacaagaagctgaagaaaatgaaattacagagaagcaacaaaaagcaaaagaagaaatggagaagaaagaaagtgaacaggccaagaaagaagataaagaaacctcagcaaagaggggcaaagaaataacaggagtaaaaagacaaagtaaaagtgaacatgaaacttctgatgccaagaaatctgtagaagatagggggaaaaggtgtccaaccccagaaatacagaaaaagtcaacaggagatgtgccccatacatctgtgacaggggattcaggttcaggcaagccatttaagattaaaggacaaccagaaagtggaattctaaggacaggaacttttagagaggatacagacgataccgaaagaaataaagctcaacgagaacctttgacaagagcacgaagtgaagaaatggggaggatcgtaccaggactgccttcaggctgggccaagtttcttgacccaatcactggaacctttcgttattatcattcacccaccaacactgttcatatgtacccaccggaaatggctccttcatctgcacctccttccacccctccaactcataaagccaagccacagattcctgctgagcgggatagggaaccttccaaactgaagcgctcctactcctccccagatataacccaggctattcaagaggaagagaagaggaagccaacagtaactccaacagttaatcgggaaaacaagccaacatgttatcctaaagctgagatctcaaggctttctgcttctcagattcggaacctcaatcctgtttttggaggttctggaccagctcttactggacttcgtaacttaggaaatacttgttatatgaactcaatattgcagtgcctatgtaacgctccacatttggctgattatttcaaccgaaactgttatcaggatgatattaacaggtcaaatttgttggggcataaaggtgaagtggcagaagaatttggtataatcatgaaagccctgtggacaggacagtatagatatatcagtccaaaggactttaaaatcaccattgggaagatcaatgaccagtttgcaggatacagtcagcaagattcacaagaattgcttctgttcctaatggatggtctccatgaagatctaaataaagctgataatcggaagagatataaagaagaaaataatgatcatctcgatgactttaaagctgcagaacatgcctggcagaaacacaagcagctcaatgagtctattattgttgcactttttcagggtcaattcaaatctacagtacagtgcctcacatgtcacaaaaagtctaggacatttgaggccttcatgtatttgtctctaccactagcatccacaagtaaatgtacattacaggattgccttagattattttccaaagaagaaaaactcacagataacaacagattttactgcagtcattgcagagctcgacgggattctctaaaaaagatagaaatctggaagttaccacctgtgcttttagtgcatctgaaacgtttttcctacgatggcaggtggaaacaaaaattacagacatctgtggacttcccgttagaaaatcttgacttgtcacagtatgttattggtccaaagaacaatttgaagaaatataatttgttttctgtttcaaatcactacggtgggctggatggaggccactacacagcctattgtaaaaatgcagcaagacaacggtggtttaagtttgatgatcatgaagtttctgatatctccgtttcttctgtgaaatcttcagcagcttatatcctcttttatacttcattgggaccacgagtaactgatgtagccacataaggagacataggttataaactagttatcttttaaaaggctcagcaacacaactcttgaaatgcttatcaggataatggtagctatagctggccatttagaggaattctaggacagtgggagctgtgttactagcactatataattccggtcagtgctgacaaataacatttaacaagtattgcagtaatcatcacttacaggtaccatttatttcaaaacaacttttttagtctgctccaaagttaaaataattaactagctaagcattattattcaactggtctaaaaactattgttatctttttttttccttttcactgttatggccttttcacatttctaaatcccatcttgatatactatgaatactctagaatgatgtaaagcagataggaatgtatgtgtacatatttattgcatacttgcacatcaaatcgatgtacatagtttaacacgtggtccttttgtgaaacctagaactcagaggattgctttttttctttcagcctattttgagttaacttcagtcctttcttagggaaatgacagggcaaagcaatttttctgttggctttgggctgtatttgtgcactaaatctttattctaaaaaaaaaaatggaaactttaatttttttaaaacgggaatttcatttacagctacattaaaatcttaatgagaaaaat

SEQ ID NO: 95 - DNA, 4165 bp, Homo sapiens
gtctaaagagtgtaaagacctaattacacggatgctacagagagatcccaagagaagggcttctttagaagagattgaaaatcatccttggcttcagggagtggacccttcaccagctacaaagtataacattccccttgtgtcatacaaaaatctctcggaagaggagcacaacagcatcattcagcgcatggtgcttggggacatagcggatcgagacgccattgtagaagccctggaaaccaacaggtataaccatatcacagccacatacttcctgctggctgaaaggatcctgagagaaaagcaagagaaagaaatacagaccagatctgcaagcccgagcaatatcaaggcccagtttaggcagtcatggccaaccaaaattgatgtaccccaggaccttgaggatgacctcacggccactcctttgtcccacgcgactgtccctcagtctcctgctcgggctgctgacagtgtcctcaatggccacaggagcaaaggcctgtgtgactcagctaagaaagatgacctccctgagttggctggaccagcactctctacggtgccacccgcaagcttaaaacccacagccagtgggcggaagtgtctgttcagggtggaagaagatgaagaggaagatgaggaggacaagaaacccatgtccctctcaacacaagtggttttgcgccggaagccatctgtaaccaaccgcctgacatccaggaagagtgcgcccgtcctcaaccagatctttgaggaaggggaatctgatgatgagtttgacatggatgagaatctgcctcccaagttgagcaggttaaagatgaatatagcttctccaggtacagttcacaaacgctaccaccggaggaaaagtcagggccggggctccagctgcagtagttcggagaccagtgatgatgattctgaaagccggcggcggctcgataaagatagcgggttcacctactcctggcaccgacgggatagcagcgaggggccccctggcagtgagggggatggcgggggccagagcaagccgagcaatgccagtggaggggtggacaaggccagccccagtgagaacaatgctggtgggggcagtccctccagcggctcgggtggcaaccccaccaatacatcgggtaccacacgccgctgtgccggccccagcaactccatgcagctggcctctcgcagtgctggggagctcgttgagagcctcaaactcatgagcctctgcctcggctcccagcttcatgggagcaccaagtacattattgatccacagaatggcttgtcattttccagtgtgaaagtccaagagaaatctacgtggaaaatgtgcattagctccacagggaatgcagggcaggtccctgcagtgggcggcataaagtttttctctgaccacatggcagataccaccactgaattggaacggataaagagcaagaacctgaaaaataacgtgctgcagctacctctgtgcgaaaagaccatctctgtgaacatccagcggaaccctaaggaggggctgctgtgcgcatccagcccagccagctgttgccatgtcatctgactgtggccccatctggccgctagcacgcttcctgctcagagcagtgaagaccggctcacttcactgttccatttggttttactattttaaagtgggcgttaggagcaattatttattacctttccatttgttcgcctgatgatgtgacaatgcatggtctttgtgcatgctgctagacacttttctttcccagccgaaaagcctattatgtaatttttacattcataattttaatgtggatgatcaggattaaatcaagatatatatctggaacctcttataaatggagcacttagaaatttgttgttctgcacttaacctagagagagaaaaaatgcttttctttgtgaaaaatctgaattcctgtcctgaccttctgtgatgtggaaaccctaggctctgagacacactctctggtgtctgagacagaaccaaagcaataacgttgtgatgcccacaggcctggagccagctagcgaccttgtgccgcccagctgtccatggcccgtgcagagcagaggacagtgagtgtctgcactgagaaccttaaaccacagttgaacatacccacacctgtttgtcttaagctatagtgtaaaaacaaagtttgggctctgaaaatttaactgaaaaagatttccttgtttttgtaataggtgagataaagtacttagatttataaggcagcttcccctgtagtgataaattacaagcagacaatcttattttgtaatgtgatgaagtgatgatgtcttaactctacttagagagtgtatgtctgtctaacagaacaaaaagatgctctgtgtaaattccttcctgtagggcacactgcaggatttccatgtagatagaagaactatagggcctagtacagaaggtgcacacaaatgttggcaaagtcaaaccccatgaattaaaacctactggaatttggtttttaggagtttggtaattagattatctcttttgttattttcattcagttatatcctttggctcagctagctttgaaattggctgatgaaaaaatatacataaaagggtaaaattcacacatacagcaaacaaaaatgcacaaagcctgcttcgtaacttttttttctggaattgtttttcactttgcctttttctgccaaaacaataatcaaagaactcttgctttaacctattcctgtacaaagactgtttttgaccagataatcatctgttgtggcattctatcttgtaggacactgtatattgcaaattgctgattatggaaggggccagttgctgttttttcatgcagtgccctgggagtcttaaaagcagtgcttagcaacattggtgatagcatgtggctgggacccagggcccttccccactcttcagccccgagtcatgtgtctgaggtgacggactgagacgcatctggtcctgtaattcagagagtgggcacatcaccaaagaactgcattgctgtggtcactgtttcttcaagtacacactgactctgctactttaggataaatatattttactcagaactctgaatttcacagtatacttactaaactaagtaaaaatgatacttaaaatacttattttactttctagacctaggctagatgttttaagctacagctctagttcattgtgatatttataatttgaaagctatgagaatagatgtgtgggtgaagccatagaacatatttgcttgaaattcttgagcagggatcttataaagggccagaaataagatgtgtggttcacatagatagtgagcgtaacatctgtattaaacataggagagaagtttataaagggcattggcaataaactctttgttgcagctgttttccaagcagtgtaaatactttttcctgtgattatgtatagccttggaatggcaccttttaactaacccatatgtgtttggtttcaatggttttttatattcagatgtatatatggtgctcactttaggatcagcagtgttgaccatttatgctgcatagctgtattatagccttattagttgtgtggttgacccttggggtatacaaatgtcagtctgagtggtgtcttactcctttgtttataagtgaatgattgtgcatgttttgtatgtcatagtatgtcgtcacataaaagggagggagcgaaaaaccattacattaagataatattggaccaaactacttacttgctctaaacagttacttgtaccccttaacctgtcttcaaaagttgcatatagttacagtagtgtataaattaaatattgtggaaaaacagtcttgtatttttctgtatgtgtgtatatatatataattatgtacttctggcaattctatctgtatttaaagatgtgacaatcttgacaccaattttaagaatagctgtgagaccgaattaaagataatccctaccaagtgaaaattgatgtgtgttaagagggtacagaattatcaactgatttggtcagttgcttccaatgctggttgatttccctcattgtgtaaacattgacaggtatgtgacaaatgggaaaaaaaatccaaataataaagtgacatattggtgttcagcaat

SEQ ID NO: 96 - DNA, 966 bp, Homo sapiens
ggcagtggaaccttcgggctcctgagcttcaggatggttcgtactaagacatggaccctgaagaagcactttgttggctatcctactaatagtgactttgagttgaagacagctgagctcccacccttaaaaaatggagaggtcctgcttgaagctttgttcctcaccgtggatccctacatgagagtggcagccaaaagattgaaggaaggtgatacaatgatggggcagcaagtggccaaagttgtggaaagtaaaaatgtagccctaccaaaaggaactattgtactggcttctccaggctggacaacgcactccatttctgatgggaaagatctggaaaagctgctgacagagtggccagacacaataccactgtctttggctctggggacagttggcatgccaggcctgactgcctactttggcctacttgaaatctgtggtgtgaagggtggagaaacagtgatggttaatgcagcagctggagctgtgggctcagtcgtggggcagattgcaaagctcaagggctgcaaagttgttggagcagtagggtctgatgaaaaggttgcctaccttcaaaagcttggatttgatgtcgtctttaactacaagacggtagagtctttggaagaaaccttgaagaaagcgtctcctgatggttatgattgttattttgataatgtaggtggagagttttcaaacactgttatcggccagatgaagaaatttggaaggattgccatatgtggagccatctctacatataacagaaccggcccacttcccccaggcccacccccagagattgttatctatcaggagcttcgcatggaagcttttgtcgtctaccgctggcaaggagatgcccgccaaaaagctctgaaggacttgctgaaatgggtcttagagggtaaaatccagtacaaggaatatatcattgaaggatttgaaaacatgccccgg

SEQ ID NO: 97 - DNA, 1102 bp, Homo sapiens
gcctggacagtcagcaaggaattgtctcccagtgcattttgccctcctggctgccaactctggctgctaaagcggctgccacctgctgcagtctacacagcttcgggaagaggaaaggaacctcagaccttccagatcgcttcctctcgcaacaaactatttgtcgcaggaataaagatggctgctgaaccagtagaagacaattgcatcaactttgtggcaatgaaatttattgacaatacgctttactttatagctgaagatgatgaaaacctggaatcagattactttggcaagcttgaatctaaattatcagtcataagaaatttgaatgaccaagttctcttcattgaccaaggaaatcggcctctatttgaagatatgactgattctgactgtagagataatgcaccccggaccatatttattataagtatgtataaagatagccagcctagaggtatggctgtaactatctctgtgaagtgtgagaaaatttcaactctctcctgtgagaacaaaattatttcctttaaggaaatgaatcctcctgataacatcaaggatacaaaaagtgacatcatattctttcagagaagtgtcccaggacatgataataagatgcaatttgaatcttcatcatacgaaggatactttctagcttgtgaaaaagagagagacctttttaaactcattttgaaaaaagaggatgaattgggggatagatctataatgttcactgttcaaaacgaagactagctattaaaatttcatgccgggcgcagtggctcacgcctgtaatcccagccctttgggaggctgaggcgggcagatcaccagaggtcaggtgttcaagaccagcctgaccaacatggtgaaacctcatctctactaaaaatactaaaaattagctgagtgtagtgacgcatgccctcaatcccagctactcaagaggctgaggcaggagaatcacttgcactccggaggtagaggttgtggtgagccgagattgcaccattgcgctctagcctgggcaacaacagcaaaactccatctcaaaaaataaaataaataaataaacaaataaaaaattcataatgtg

SEQ ID NO: 98 - DNA, 5544 bp, Homo sapiens
ctcctgcacggcgagtgctggagcacgagctaccgctcgctcggtcagggcgccccctccgcccgcctcctgcttcctcctccgctgcctgccgccgccgcctccaccattgtataatgctcggggcgcgcaggcagagaacggcggagtcttagcttcagcctcgcctgctgcccgctccccggcgccaccctcgggcccctggagcggggcactccgcatggagcgggagtagctgaggagtgggcggaaacccctcctgatgcgttagttcccaggtggagctgcatgtgatatatgttgggtaaaggaggaaaacggaagtttgatgagcatgaagatgggctggaaggcaaaatcgtgtctccctgtgacggtccatccaaggtgtcttacaccttacagcgccagactatcttcaacatttcccttatgaaactctataaccacaggcccctgacagagcccagcttgcaaaagaccgttttaattaacaacatgttgaggcggatccaggaggaactcaaacaggaaggcagcctgaggcccatgttcaccccctcctcccagcccaccaccgagcccagcgacagctaccgagaggccccgccggccttcagccacctggcgtccccgtcctcccacccctgcgacctcggaagcactacgcccctggaggcctgcctcaccccggcctcactgctcgaggacgacgatgacacgttttgcacctcccaggccatgcagcccacggctcccaccaaactgtcacctccagccctcttgccagaaaaggacagtttctcctctgccttggacgagatcgaggagctctgtcccacatctacctccacagaggcggccacggctgcgactgacagtgtgaaagggacctccagcgaggctggcacccagaaactcgacggtcctcaagagagccgcgcagatgactcaaaactgatggactctctgcctgggaattttgaaataacgacgtccacgggtttcctgacagacttgaccctggatgacatcctgtttgctgacattgatacgtccatgtatgattttgacccctgcacttcctcatcagggacagcctcaaaaatggcccctgtgtctgccgacgacctcctcaaaactctggctccttacagcagtcagcctgtcaccccaagtcagcctttcaaaatggacctcacagagctggaccacatcatggaggtgcttgttgggtcctaagacccagggacccagcgactatgcccacccagaccccagagcgttcccataaccctgacagttctccacactgtgcatgcacccttgcttgcctttttcagagaaaaagaaaattttacaacaggatcacactagtttttgctttgagcagagttggagtgccttcatccaagtatgaccacttttaatacacttttttgagtggttcctcagagacctactaccctggtataggaaagaatccatttgaagacaatgttgcaatgttgaatgacaaaaataaacagttcaagtgaagcacaaggattaagttggaaaagctgtaaattgcatgtgcatatttgtctattttttctataagttttattgcaagaggtaaagaagaaaactatatatatatatcttatttagataatctcagtaccttttctggcatttttgccctgtataggttgacttggcaattcggcctttttagaggcattaactactcctcgtaagtgttgcatttacatggctgtttagaaaactgctgcccaaatttattttatatttttgtacagattctgcagtttatgatattgtttttctaaaaacaaatgctgtttatacatatgagatagctattttgataggatttgctcacatagttcctgcaaacttcagatgtacaagttgcacttgtacttttatagagttgtaatgttttatatgtgtatggtgcaagagaaaattggatcaaatcaatctgcagttgatgtccccaaatgcaaacacaggcacacacatgcacacacccataaacacacacacagtgctttaagaaagggccaggtgatatcacacccaaatttcacaagcactgaccccctggcaccaacacccgccagtactgtgacttccaaagccagagccacatgtgctcatcaaacttgcattaagcagttggcgggagatggctgtggagctgggggtttaagtgatggttctcttttgctccctcttttgagggtaaagctactgtctttcttaagagtgtatttatgccaagtttgcgcttttaattgtttttattttgttttttaatgaaaacccagatctttcctttttggcataatttttatgatgacctgaaattttacatccgaacaaaattttacatccgaaaagcaaccaacttcttcatggaactcagccctgttgcaatgcttagggcccttaaagaagaaaatctccccagaaggcatccatcatgttgcttaattgtcttctgcagcttcctttccctagagctttccctgtgttgctaagagctgaaaatggcatcttcgtgatcaccacagtgagcttggctcgcctcggccggcccgggatgcactcttacaacatgtgtgactcttgaacctggagttcatcacattacgtcacagcttcccatctggttgctttcctgagtcagctacttcacacttgtcaaggctgttttaccccaaaactcagacaggactttctatgcatgttttccctcctccccccaattccccccccatcaccttatctcccaggacacacttgagaagtagctttttattcctagtggtgtacatttaattttaaaaaggttgcaatgtatcatgcttgttgccgaaactgtttatggccttcttgtttcagttttttcttttcttccaatggtactttagctgttgagtgcaggttacaacctatattgttatgcagatggcttctttaggaataacttttatatttatttaaaaatttttaaattatgggatgttttgttgttgttgttgtctttgttgttggtcatttgtcaatattcagtcaccaattctgctcacttcttgccatggataaaattgggtctttctggctaattaaaaaagacaactttataaaatggcactttaagcaagccatagttagttttatttttgtaatgcacatggcaaagcaaagacgtttgtgatgaaggaactgctcatctaagcaaaagatttgagtatgatatgataaaggctttctacattctaatttactttttccccccacttgaatgtgttttaaaggctaattatcagctcagtagagcagtgagaaactgatcaaattgcacttgttctcctacaagcaacctccacgcagacacctcgtactgctacaggtgtgtcatttcctttaataggaccagggaccatgtaactgaggtgagggttgtagtagatgcttccagtgtcagtatgcctgttaattttaagagcttccctttcttgcagagaacaagtctgcccagattccatgctttctataactggaggacctggcaaacctgccgcatgctgcacacatctacctacgtacacatatacaatagtattgatgattctgaacaataacagggtaaaacagttggtttgccattgttaaaaactgatttacagtaacttacaacaactgtacttttgttggattagcaaatcatgtgtttaaacaaatcccatatgttgggcaacagttcaaataagcacggagaagtgttgcccaaacttggttctctgactcttatgtatttgtaaggctgggcttcaaaatcaaaacaaaaaccccaaaaacagcaggcaaatgctttttaactctgacaccgttgccataaatccctgatactcaaagtctaacaagaaagacatggaaaattagcagcccattttcagaaagatcaaaatgatctagggttctaattgcttttgcatcctattcttacaaagtgatgtcccaacagggaacagtaggagctggagtgggatctccaagtcccagtttgagtgtgggatgtgcttccagcagtgccttccctttatgaaagacatcacatggcatccagggccaggcaggcagcttgaggtgcctttacgagaaaaccgagctggggctgggagaggacagttattgacactgatgtgcaatgaagtgacaagatgagagcagaatcgtaagagctttgaatttgaagtgagtttttttccccccataagttatttattccttttttctgtgtaaatatatttattttactgtggagcgctaacatctggatcgtaacatgtgcagaatgtatggtaggaatgtattctcttgtaggaatgtaaatctgtattaaaagggggtccaagccaggcccccaggtcttctcattgtatgcacagtccgcattcatttttactcttctctaatatgggtctatttgaaatatgcaaaaggtatgaggaatgttttaatacctccaaatttttaagaaaagcatcaaagggttgatattttttaaagtttttttagtagcactttctctggatgacagaaggggcaaccacatgggcacccttgttcataccaaagggtgagcagtggccagagcctcctctgcacctctcgagtgtctttaccaattgagctttttatcgccatagccccttggagtgccccagctgccctgaggtcaatcaaggaaaatttcttaatgaaataagctccaaagagccaaagtatcaacttacagatcgtttttaaagcttaaatttatgaaccacctttgtggtaaacaatgaattatgaataccgcagggcagccttcttaaatgacaaatgtaaaaaaaaaaaaaaaagactctacttcgtgcagcaattgctactctatacgaattgtcttaatttgaaaaccttgctgttacaaattggacctttatacattttctgaaaacaatgaaaagagtatatttaaccttttctggctgtaaatggttaccttcctgtaactgccccgcacctggaggcatggagttgtgtgcatcctgcttatgtacaattgttttcagtgtttctaagaatgagtctgaatggttcttgaaaattagccaggatcaaatgctattgcagacaaagccaataaaaagttggacttcttttggggataacaagttttggaagagaaatgcaggccatatgtgcgcatgaccgagattttgaaaaaagatgtacatagtgacatgtttggtgcatggtttttgaggagggcttttgtcaaaaaggaggtataacctttcccccacagacctgagagctgtgccttttctatgcaatattacagacgttacatcggaacccagatggctgtattcacatgtaggtttgggctgtaatctaaacaattggacagattaaatgtacatggaaatgagcagtcttacttttgtagttttatattatacaataaacagttaaaagatg

SEQ ID NO: 99 - DNA, 457 bp, Homo sapiens
  misc_feature (1)..(457): n=a,t,g or c
gactttaaatgataaacttttattctgaatatactgtttttgcacaagatttaacacaacattttctgggattataaatatttbataacagtattatacaavtbbbyacaaaatgtttttatcaggctaggtaattttcacaaaagtgtcaagrgaacaaaataaaggggagaaaagatctattgttcacaaaagtcgagttttttttttttttttttttttttttattcaaattttattggaagtttacaaatgtattacagacatcagtaaaacatcatatccattttacagggcacggntctcaagcaaagtgttcagaacagtctctggcagrscccacaccaaaggcctgttgcagaccttcttaacaaatagcttgacactcaacacagaacacaggctytggcctgcctcaccttcccaggccctttggggttttgtttatgcacttgaa

SEQ ID NO: 100 - DNA, 1728 bp, Homo sapiens
ggtgcgcaagggcacggacctcggagctctccccgttcccccgccggccatgaacgccgctcgcaccggctaccgagtcttcctcgccaactccacggccgcctgcacggagctggccaagcgcatcacagagcgccttggtgctgaattggggaagtctgttgtatatcaagagaccaatggagaaacaagagttgaaataaaagaatttgttcgtggccaagatattttcattatacagacaatacccagagatgtgaatacagctgtgatggagttgctcatcatggcttacgcactgaagactgcctgtgccaggaacattattggggtcatcccctacttcccctacagcaagcagagcaagatgaggaagaggggttccattgtgtgcaagctgctagcatccatgctggcgaaagcaggtttaactcacattatcactatggatcttcatcaaaaggaaatacaaggctttttcagctttcctgtggacaaccttagagcctcacctttcctgcttcagtatatccaggaagaaattccaaattacagaaatgcagtcattgtagctaagtctcctgatgctgcaaagagggcccagtcctatgcggagagactgcgtctgggtttggccgtcattcacggggaagctcagtgcacggaactggacatggacgatggtcgtcactccccgcctatggtcaaaaatgctactgtgcacccaggcctggagttgccattgatgatggccaaagagaagccaccgataactgtagttggagatgttggaggccgcatcgcaatcatcgtggatgacattattgacgatgtggagagttttgttgctgccgcggagatcctgaaagagagaggcgcctataagatctatgttatggccacccacggcatcctgtctgcagaggcccctcgcctgattgaggagtcctccgtagacgaggtggtggtgacgaatactgtccctcatgaggttcagaagctgcaatgtcccaagataaagactgtggatatcagtttgattctttctgaagccattcggagaatccacaatggagagtccatggcctaccttttccgaaacatcactgtggatgactagctttcacgagggtctcgaccctggacctcctgagggaaacatggaaaaagcagtgccatgagtgatacagtgtttccttgcaagggaggactcgaaacagcctggagttagatatcttcttttgcccggattgatggggaggagggattaaaagagtcaggaagaagacagagctaatggataaatatcataacatggccttacatgtctgctgtcatcagccctgttccttaaaagttctagctgctttcttaaaaataatctgaaaatcttattgatactaaagaggagttaaaggcacataaagtcttaactctataatgttcatttagttgtttcagctccagggaaatggaggtattgatgttgaacctggttagggaagctgagcgcctgtggccctattactatccagttggcctctcccaaatcaacttcaagtcttttatagagaatcgtatttttctttcagaaattgctatgcctacagccattgaaaaatgaagcattcatgttgttacatcttccaaggatgtcagattagaaaatagcatcccacctctgggtatctgagtggctctgaagttgcaaataaaataatttgttgt

SEQ ID NO: 101 - DNA, 4101 bp, Homo sapiens
ggctcctcgcgatcttgttcctttcccctccgcttctctgacctagctgcgcggccccggcccgggagctgccgaacccgcgcctcccctgggtgaggaggacacgcctgccctcgtcgagaaaacttttcctgccgactcagttggggcggcggtggcaggaagtgcgggcagcgacctctcctccgcctgccccgcgcgccctgccggaggtcggcgctgagcttgcgatcaagtttgtgggggccccccttcccagttgccggcgagtctcgcctcgagaggggcgcccgaccccggggagggcggcaggccagggcgaaggccaagggcgttttgtggcgccggagactaggtgcggagcaaggcggggactcgcacccgcatccgagagcgcggaggtcgcgcagcccgggagaagggagcctccggcggctgcttcctagagtccacagtgcgctgtctcctttggctgaggagagtgtcctggccccgagtctatcgaggaaaatgaagttaagccgccagttcaccgtgttcggcagtgcgatcttctgtgtggtgattttctcgctctacctgatgctggaccggggtcacttagactaccccaggaacccgcgccgcgagggctccttccctcagggccagctctcaatgttgcaagaaaaaatagaccatttggagcgtttgctagctgagaataatgagatcatctcaaatattagagactcagtcatcaatttgagtgagtctgtggaggatggtccgaaaagttcacaaagcaatttcagccaaggtgctggctcacatcttctgccctcacaattatccctctcagttgacactgcagactgtctgtttgcttcacaaagtggaagtcacaattcagatgtgcagatgttggatgtttacagtctaatttcttttgacaatccagatggtggagtttggaagcaaggatttgacattacttatgaatctaatgaatgggacactgaaccccttcaagtctttgtggtgcctcattcccataacgacccaggttggttgaagactttcaatgactactttagagacaagactcagtatatttttaataacatggtcctaaagctgaaagaagactcacggaggaagtttatttggtctgagatctcttacctttcaaagtggtgggatattatagatattcagaagaaggatgctgttaaaagtttaatagaaaatggtcagcttgaaattgtgacaggtggctgggttatgcctgatgaagctactccacattattttgccttaattgatcaactaattgaaggacatcagtggctggaaaataatataggagtgaaacctcggtccggctgggctattgatccctttggacactcaccaacaatggcttatcttctaaaccgtgctggactttctcacatgcttatccagagagttcattatgcagttaaaaaacactttgcactgcataaaacattggagtttttttggagacagaattgggatctgggatctgtcacagatattttatgccacatgatgcccttctacagctatgacatccctcacacttgtggacctgatcctaaaatatgctgccagtttgattttaaacgtcttcctggaggcagatttggttgtccctggggagtccccccagaaacaatacatcctggaaatgtccaaagcagggctcggatgctactagatcagtaccgaaagaagtcaaagctttttcgtaccaaagttctcctggctccactaggagatgatttccgctactgtgaatacacggaatgggatttacagtttaagaattatcagcagctttttgattatatgaattctcagtccaagtttaaagttaagatacagtttggaactttatcagatttttttgatgcgctggataaagcagatgaaactcagagagacaagggccagtcgatgttccctgttttaagtggagattttttcacttatgccgatcgagatgatcattactggagtggctattttacatccagacccttttacaaacgaatggacagaatcatggaatctcatttaagggctgctgaaattctttactatttcgccctgagacaagctcacaaatacaagataaataaatttctctcatcatcactttacacggcactgacagaagccagaaggaatttgggactgtttcaacatcatgatgctatcacaggaactgcaaaagactgggtggttgtggattatggtaccagactttttcattcgttaatggttttggagaagataattggaaattctgcatttcttcttattttgaaggacaaactcacatacgactcttactctcctgataccttcctggagatggatttgaaacaaaaatcacaagattctctgccacaaaaaaatataataaggctgagtgcggagccaaggtaccttgtggtctataatcctttagaacaagaccgaatctcgttggtctcagtctatgtgagttccccgacagtgcaagtgttctctgcttcaggaaaacctgtggaagttcaagtcagcgcagtttgggatacagcaaatactatttcagaaacagcctatgagatctcttttcgagcacatataccgccattgggactgaaagtgtataagattttggaatcagcaagttcaaattcacatttagctgattatgtcttgtataagaataaagtagaagatagcggaattttcaccataaagaatatgataaatactgaagaaggtataacactagagaactcctttgttttacttcggtttgatcaaactggacttatgaagcaaatgatgactaaagaagatggtaaacaccatgaagtaaatgtgcaattttcatggtatggaaccacaattaaaagagacaaaagtggtgcctacctcttcttacctgatggtaatgccaagccttatgtttacacaacaccgccctttgtcagagtgacacatggaaggatttattcggaagtgacttgcttttttgaccatgttactcatagagtccgactataccacatacagggaatagaaggacagtctgtggaagtttccaatattgtggacatccgaaaagtatataaccgtgagattgcaatgaaaatttcttctgatataaaaagccaaaatagattttatactgacctaaatgggtaccagattcaacctagaatgacactgagcaaattgcctcttcaagcaaatgtctatcccatgaccacaatggcctatatccaggatgccaaacatcgtttgacactgctctctgctcagtctttaggggtttcgagtttgaatagtggtcagattgaagttatcatggatcgaagactcatgcaagatgataatcgtggccttgagcaaggtatccaggataacaagattacagctaatctatttcgaatactactagaaaaaagaagtgctgttaatacggaagaagaaaagaagtcggtcagttatccttctctccttagccacataacttcttctctcatgaatcatccagtcattccaatggcaaataagttctcacctacccttgagctgcaaggtgaattctctccattacagtcatctttgccttgtgacattcatctggttaatttgagaacaatacagtcaaaggtgggcaatgggcactccaatgaggcagccttgatcctccacagaaaagggtttgattgtcggttctctagcaaaggcacagggctgttttgttctactactcagggaaagatattggtacagaaacttttaaacaagtttattgtcgaaagtctcacaccttcatcactatccttgatgcattcacctcccggcactcagaatataagtgagatcaacttgagtccaatggaaatcagcacattccgaatccagttgaggtgaacctgactttcacatttggattgagaatcattggcttttatacctttcttggtttgacgtgcaataaagaagcacattattttagcttctggctactgtgagaacatgaattctgtgattctgtgggttttttcttttttcttttaccagtacagtaag

SEQ ID NO: 102 - DNA, 5046 bp, Homo sapiens
ccgttgctgtcgccgttgctgtcgggggcgctgtgcgctgaggaaggcgcgggcgagccggagcagaagaaggagggagggagccagccgctgcagccaccaccgccaccatgtcctaccaaggcaagaagaacatcccgcggatcacgagtgaccgtctccttatcaagggaggcagaatcgtcaatgatgatcagtccttttatgctgatatttacatggaagatggcttaataaaacaaattggagacaatctgattgttcctggaggagtgaagaccattgaagccaatgggaagatggtgatccctggaggcatcgatgtccatactcacttccagatgccatataagggaatgaccacagtagatgacttcttccaagggacaaaggcggccttagcaggtggcaccaccatgatcattgaccatgtggtgcctgagcctgagtccagcctgactgaggcctatgagaaatggagagagtgggctgatgggaagagttgctgtgactatgccctgcatgtggacatcacccactggaatgacagcgtcaagcaggaagtgcagaacctcatcaaggacaaaggggttaactccttcatggtttatatggcttataaggatttgtatcaagtatctaacacagagctctatgagatcttcacctgcctgggagagctgggggccattgctcaagttcatgctgagaatggggatatcattgcccaggagcaaacccgcatgttggaaatggggataactggcccagaaggccatgtactgagcaggccagaagagctggaagctgaggctgtgttccgtgccatcaccattgccagccaaaccaattgccctctctacgtcacaaaggtcatgagcaagagtgcagctgacctcatctcacaagccaggaaaaaaggaaatgtagtctttggtgagcccatcactgccagcctcggcatagatggaacccattattggagcaagaactgggccaaggcggctgcatttgtgacatccccacccctgagccctgacccaactactccggactacatcaactccttgctggccagcggggatctgcagctatctgggagtgcccactgcaccttcagcactgcccagaaagcaattgggaaggacaacttcacagccattcctgagggcaccaatggtgtggaggagcggatgtctgtcatctgggacaaggctgtggccacagggaaaatggacgaaaaccagttcgtggctgtgacaagcacaaacgctgccaagatcttcaacctgtatccccgcaagggaagaatatctgtgggttctgacagcgacctcgtcatctgggatccagatgctgtgaagatcgtctctgccaagaaccaccagtctgcggcagagtacaacatctttgaagggatggagctgcgcggggctcctctggttgtcatctgccagggcaagatcatgctggaagatggcaacctgcacgtgacccagggggctggccgcttcataccctgcagcccgttctccgactatgtctacaagcgcattaaagcacggaggaagatggcagacctgcatgccgtcccaaggggcatgtacgatgggcctgtgtttgacctgaccaccacccccaaaggtggcacccccgcaggctctgctcggggctctcctactcggccgaacccacctgtgaggaatcttcatcagtcgggatttagcctgtcaggcacccaagtggatgagggggttcgctcagccagcaagcgcatcgtggcccccccaggcggccgttctaatatcacatctctgagttaagcaagccttcctcaaagagaggggcagaagcaagaagagattgttttgaagccaaaatggtacaccgatatttaagaaggaaagcgaatccaaacggttgtgatctaaagaatcaataagcctcaagccttatgtttctccaatgttacgctcgcttgcctagctttacgaatattgctttgttttctgtttatgcatagccttgatttgtttgactcccctccccccatttacatgcatgcaatcagacaggccactaaggtaaaagagtctgctctatcatagtgttgagagcgtgtgtagtgctgcatcttatgacaaggggacagacaagctgggacgtcagggaaatgaacaaaagggacgcaggttatttggggtgagtgggtggtgggagcctggagcaaggtggagggtgcagaggggctggggtagggcatgtaggagggaggtgggtgggtcaggtgagtggaaggggtgttgtatattgtgttgatgacgtacgttatttccatggaagatagccgctgtggcagctgtcacatcaccacagctccctagggtctgccgagaaggcaggcagtctttgggttctgttctttgtcacgtcccctacaagtaaattttgtttctttgaacgtttattaaaatgccaagacccaaccatttcttccacctgcttgattgtgccagtgtttgctcaggcctctttcttagtgttgctttcaaatccttctctttcctgggttgggaaggccaggcagggacagagcaaatgacacttctcttcctcttgccctccctgcctctttggtgctcttaaaagccagcagctgagaacatagcacaggcccacgtggtgagggcacccacagcttaaagacgcttccttctaaacacggcgaggtcacctctcactcttctgtctttgcaaaccgagaagagtggcatgcttctggcatcccaagtcaggattttagctcagatgaggcagaatgaagggcctctcttacaggcagtttgtgtttgattctctcgatcctggcacatccatgataaataggagtttttgaaagttggttttattaggtgttccctaatttttaccgtaataggtcatctcagcttatatgaaagtcaagtggggaactgggaaagccaaagtcagtcttgagcagagggagcacattttgtggacctggttccacctttccattccaaaccacctgtttccccttccattagcagaaactctgggggaactttgtgtctcagtcctagaatctccccaagtgagtggaagtgacatgatgcagtcttcctcatggggcacctgaaagaaattagtgtgggtgcttcgatctaccttgtctgtcagagttgaatatctctttccctatcatgctgcttctgaaaattcagttttggagcaagtcctgtgagcaagataagaatctatagaaccaagatgctcattttcagaagaaatatgttcaacctgggatcagacttccatgctctggggaatccaagtggtagcacctgtaaccctgtgtactaagtgctttgaagagaagagcaggcctcagacaccttttaattgcttaggagaaaccattgtctctgactgcaggtttgaataagttgaagaccagagaaaagtacacactgggctacaaaggaatttggagatagccaaggaacaggatttcccctagcaagctaccttctgttcaaatcatgaaaaaagactatttccccttagaatagggaagcttgctattttaaagctcttgtagtgcttttcttttaagggagatgtagtaaaagggaaaatgtagctcttagtttacacttcaaagatgtgggggtctttcagagaactaagaataacagttttatgtgcagagagagtttgccagatctgaagcatatacctcattgactaggctgttactttgggataggttgcagtaccagccacagccagcagatagaggaaaagacacacataaactcgcttctgagcgtccacttctgcactctctgctctgctgttactcagcccctgagtctgactcatctctgcacaacctctctgtgccatgaagataagtcttccatggccaaatcggtcatccgcactgcccttgggacttccgaagtgaaccattccaccagaacctttgattctgcacaagatttccttgctctgggaacaacccccaaatgcccttgggaggaacaacatgagctcaggaagcctctctttcttcacttaccattactaactctccaagcatagaaatccctgggaattgcgagaataactcccactattttaaaatttatattcagatttgtttcgtttcataagacacatcaaacaggcctatacaaaaggtttaggaaaagaaaacaatggtgagtcccggccctcttcgaattcactggcacctcatgcaagtgtaggaaggcacgctggatcgtctatctgattccaaagctgtcctttgccatctcatcccttggcctgccccccaaccctgaggatgcccctgccatccccccaacctcctcatattgcctctgaacccagatggcaatccatcccggttctctctgagggccacgggcttgggtagtggaaagggtgtttgggaaattgttaaatcagttacccgtagtagagctatttcttgtacttctaagttttctagaagtggaaggattgtagtcatcctgaaaatgggtttacttcaaaatccctcagccttgttcttcacgactgtctatactgagagtgtcatgtttccacaaagggctgacacctgagcctggattttcactcatccctgagaagccctttccagtagggtgggcaattcccaacttccttgccacaagcttcccaggctttctcccctggaaaactccagcttgagtcccagatacactcatgggctgccctgggcagccagcattcattgtaagttccctctttgaaaactggtgtgtgggtgttcagttctgtgtctggtgggtatggacagacagtaatctcctgtgatctgtgctagctgtgaggcagctctggaacgtgaagagctgtttggtttgaaccgtgaacaaaactgtgttttgagtttagctgacattaaagaaaaaagttcatcacgtgactgttaatgtaaacctggttattaaaataactatgaaatta

SEQ ID NO: 103 - DNA, 5426 bp, Homo sapiens
ggggaggaagaaaggcgaaggcaaggcgaaggggtggagagtgatatgaagagcgagagaaaagagaggacagcggacgagcagatccggtatctggaatcccggcgcctagaacgtgtttttcgggagagcaaaggctgtgtctacggcaggctggggatatagcctctccttccgatgaaaagagaaaggaagaatggactacagccaccaaacgtccctagtcccatgtggacaagataaatacatttccaaaaatgaacttctcttgcatctgaagacctacaacttgtactatgaaggccagaatttacagctccggcaccgggaggaagaagacgagttcattgtggaggggctcctgaacatctcctggggcctgcgccggcccattcgcctgcagatgcaggatgacaacgaacgcattcgaccccctccatcctcctcctcctggcactctggctgtaacctgggggctcagggaaccactctgaagcccctgactgtgcccaaagttcagatctcagaggtggatgccccgccggagggtgaccagatgccaagctccacagactccaggggcctgaagcccctgcaggaggacaccccacagctgatgcgcacacgcagtgatgttggggtgcgtcgccgtggcaatgtgaggacgcctagtgaccagcggcgaatcagacgccaccgcttctccatcaacggccatttctacaaccataagacatccgtgttcacaccagcctatggctctgtcaccaacgtccgcatcaacagcaccatgaccaccccacaggtcctgaagctgctgctcaacaaatttaagattgagaattcagcagaggagtttgccttgtacgtggtccatacgagtggtgagaaacagaagctgaaggccaccgattacccgctgattgcccgaatcctccagggcccatgtgagcagatctccaaagtgttcctaatggagaaggaccaggtggaggaagtcacctacgacgtggcccagtatataaagttcgagatgccggtacttaaaagcttcattcagaagctccaggaggaagaagatcgggaagtaaagaagctgatgcgcaagtacaccgtgctccggctaatgattcgacagaggctggaggagatagccgagaccccagcaacaatctgagccatgagaacgaggggatctgggcaccccaggaaccgccattgcccataagacccccaggaagctaggcactttctttccatggaaacatttagacacaaacctccccagctccggccaagccatcatttgctacctggagctggatgtagaagtcagcagacagctccctatccctggacccctgccctccttttttctgctcacaaggacttttgattttagttataaggaggacccaaaatgtgtgtgtgtacatgtgtgtgcacacatggtacgtgtccatgtgcctacctgatactttcacatgtaattaaattccaggcaaccagcacaagagccgtgagcttggcacatgtgctgctcgtgagcaggaaaatcagaggagccactgatctgagtggtatttaggttgaaggaaagatttctcctctcaagtgccagggagcagccacacgtctgtctgtgtttagagagggaagagggttctccaggttcaccatttgggttgtttatatgttggtagaaattctccctgtatgcctagaaggatcagtgaatgtaagagccttggaaattaacaaaataacagccacataaccttgcggcaagtctgatggaaagaaaaagataaaccatccgtggggtagatgcaataagcccacgtatttttacactggaaacgttgattgttttaaatgacaaagacatatgtgatgttctatgtggaaacctgtgaagagtggattctgcctccatctctgcctccatggctacctttaggagacagagaagatcctgtgtgtttctctgtacccagctgacagcctgtctctatggcgcttccttgagtggaaggaaatgtctcaagaaacaaagatctcgctggtgcgtacacagtgctgaccagctagtgtggccagggcctggtggcctggtggccaggaagtttcaggttgaagggaaatgtcgaggctacctgcagatatgacaggtgccttgaacgcagcccatcttcatgtcatcaaaggtcttcctgcacttgaagctggggcgatgtttgcagtcaagaccattctttccaacctctgggttcttgcaagttgccctcaccttgtgtgtggagatgcattccaagaatgaagcctcatcttgctactgagtgtggggttcagggaagctctttaggccacctggtgaaggtgcatggggaggatggagcttctcctcagctcctctgagcagccacctatgtgatctttaaatccaaccccaatgggagaaaagggcaagaacagtctgtgccctgggactcctatcaggaagcttgacaggcagctgggcatcagtgcagctgatatcgtttgaggagggagacagatgcttggacctgggtgcctggctatggagattgaccaagcaagatcaggagctcctgatagcaggcgtctttgagcctagctggggtagaggcactgcccatctcttctccaccttctctccacagaatgtttgcagagctgggcagttgaggaaaggacagcccctggttggtgcctccaaaggaaggtggacttttttggtggagacgtttctgccctgggcaccctcctgcccccgattcatacctatggcttcttgagaaggctcacagctgtggtcttaacgtagactgcagaaagatggcatgcggcccctggcatttcgccaagggttttatagcaagtctccttcctccatagggacagcagcaccagccctgtggggcatggagtggaagcccagaagggcttctgcaagctgcacagaactggggtaagaagacaaagagtagccaccgggagaggcttcctttgttacagctgggaaagaacagttctgtgaatgcaaacacctcctgagttttgcaattgagaaaatgatttggagaacttctcttctggtaatttttattttgaatgttcagggccttagttggccccagtaattctccttggaggacttgggagaagaatttccacaaagcaaactactaaccactagctcttactggacagcgatttctggcttataagagttctctttgatttgcactagcactacgatagtgttagatggggaaatactgcaacatgtccagttggccagatcactttccaagggagcgatactaaggcagactcagctttttaaagatgggaggtcaggaggtggaagtgagaggagatcccatctcacacaacacacttccacgtaatgcagaccacacttttccattttgtcctgccctcttgagaggtcatttctcacgtcctaagaacctgatcagaaattttggaagggttctttgaaatagcagcagttgaaacagagacactttgccacagtgtggagcagattttctcactggtatcacatggtcttgcagttttgaactcttcgaccgatttgtgggagtttatgtaattgcgtgcaatgaacctgaaattgtgtaaaggacaaaagaccagtttatagggttgggttttttttccaacttgtgaaaagcagtttagctgcatctgtctccccaccacccccaccccgggaggggcttatgttacaaggtgatcaagtgaaggaaaaacctgagcctatctggctgggatggtggaattaagcacaaggtcacattctctgtgatcacatgagagggaaggtgatgacttaaatggcagggggtggggattatcttggggagaggctgaaaagcacaaaagatagtcttccctgtacgtattggtgaagaacgtgcacaaggctggatggacttcaacttggagttgagttgaggcaagaggatttctggatattagtcacccatctgcaagaaaaatgctgaggcctcgggtcaagattttgatctgagacatgctgatgcttcaaggagaaatattttcacaatcctctcttccctcaccagaagagaacagtactctctcctagaaacctctaggtaaacacattttatcctaatatcggtagcatataatgccccccccaaaatatctgttttccatgcaaaaaagtctcaacaagaagtctgtggagttgagtggttacttcaaagtgtcaggagagtgaagaaattggccacagaagagcaagaagctctcttaagaaaagggaattctctttaaagaaaccaccaccaacaacaaaacaaccaaaaaccatgttttatgtcaaagctctgtagcacagagaatgtggtgtcacagatacatcgccgagagaggtttctttctttcttttttttttttttgagacagagtctggttctgtttcccaggctggagtgcagtggtgggatctcagctcactgcaacatccgcctctggggttcaagtgattctcctgtctcagcctcccaagtagctggaattacagggacccgccaccacgcccggctaatttttttgtgtggttttagtagaggtggggtttcaccatcttggccaggctggtcttgaactcctgacctcgtgatccacccgcctaggcctcccaaagtgttgggattacaggcgtgagccactgtgcccagccaaaagagaaatttctacatgaacaaggcaatttcagtgtcttacagcggccaaaccatgacgtgaagaatgagataggagacaggagatcaccataagcgtccctgatatagcagcacacattttcacgtttccacttaaatcgttttgcacaaagtcttgcttcgctcagatgagatgagatatgatttcctagagatgtaaaaataagaatgaatgtggcgcccccttcttccagatgtaatagaaagctctgccctatcacaaggggggtgttgaagcgccccttgtgttttaactgtatttaactgagcacaagatgcacaagctgtggtgggaaaccctcagtttacctttggagtcttccctgcagatcgcagacctgtttccaggctgatgtttctggtgtgtaattgctagcgtttctgaagggttttcccaattgttttagccttgtgaagtattcttaattataacttgcctttcagcgatggtacatgacttgattcaacgtttggttctgaacttacacactgatgcgtttactcatctaacataatctgacagggcctcagcaagggagccatacatttttgtaacattttgatatgttttaatgcatctgacttagatcttactgaaataaagcacttttcaaagag

SEQ ID NO: 104 - DNA, 517 bp, Homo sapiens
ccaaatttcaaaaagttttattttgaaagaatgagagaaataaaacagagaggtatcaattaccaagaacaattacactgaagaaaacacaataataagtactctcccacacaaccccccccatttccccatccctggcacaataatattaaaaccaccaaagcacacctaacaaggaaaaacaacagtacgtaatgaaaaaagcaaatgtccatactgctcagtccaactaacccttatgaaatgtccttcccccagctaaaccctacccactggaatgataaagawatgtagagacaaccctaggggagacttggaactctgcttatactagcaaagctcagtgaagaatcagtaagagtagtgaatctgtttggcagtgaacactggatatagcttctttttcaaattttggatgattgcagagaacaggtagagtttgaggctcacagacttctaacaggactgatccctgttccctcaaccgtaacagtggggbagctgccaaatcctgggt

SEQ ID NO: 105 - DNA, 3184 bp, Homo sapiens
ctctgctgtgctgcctcaaacgcggagggctgcgtgcagtgggagcgggctccaggagcccgagcctccagccgtcctcagagcaaggcagcaccgaggcctggccacagcaatatccatctggaagctcttcccttcactcccaactctgaggttgcctaactctttattaaaaattcagaagggggaatgccagcccctagcatggactgtgatgtttccactctggttgcctgtgtggtggatgtcgaggtctttaccaatcaggaggttaaggaaaaatttgggggactgtttcggacttatgatgactgtgtgacgttccagctatttaagagtttcagacgtgtccgtataaacttcagcaatcctaaatctgcagcccgagctaggatagagcttcatgaaacccaattcagagggaaaaaattaaagctctactttgcacaggttcagactccagagacagatggagacaaactgcacttggctccaccccagcctgccaaacagtttctcatctcgcccccttcctccccacctgttagctggcagcccatcaacgatgccacgccagtcctcaactatgacctcctctatgctgtggccaaactaggaccaggagagaagtatgagctccatgcagggactgagtccaccccaagtgtcgtcgtgcacgtgtgcgacagtgacatagaggaagaagaggacccaaagacttccccaaagccaaaaatcatccaaactcggcgtcctggcctgccaccctccgtgtccaactgagctgcctgctccttctcgataatagccgtctcctctttatcatgctttttccccctgttgtttgtcaaaaaaaattgcctttaaattcctgggtgtttggttgtttgagattccttccttgttatcaagcctctcggacaaaagggctaggaaaaggtgatatgtctcctgatcatatcatacccattaagtataacccattatttagaaggttctagggaaaaaagtagtattttcttattaaacaatcagcacagcctatatctttgttctctcatgttgatccaagccagagacatcggtaacaaatagcacctgtgttgtttgtgaggtgtttcagtcccagtcctgatgtgtgtgcgttgttctctcctggccacttaaataggaccatatgtaaacttgactttgactgcatgagatatccctatctggtctcactcagtcctctgcatcccaacattcccaggacatgcatgatcaccagcatttattttcattatttgaggatatcttataactcacagattgtcagcatccagccatgtcctatctagattaggaaaatgatcagaatattccagctcaacaagtctgggtatactcactattgtgagtcaatacaccatagctctgttgaaattcctggaggcaaaattgaccttggccccaaagatattcctcaatagatttcaaacaccactcccctgtagaactctcccagcctcgttggggaggcttgtccagggtgatagagactgatttcagacaaacctatttattacaaaagtttcatggtgtctgaatgattgttttctctctttgtatatttgtacaaatgtttcagctgtgcttttaaaaaatctggatgttttttatttagtgattgttcgacaattagctgcttcaaaacataatgtgcattgcttatgaatgccttcatatactaatacagatactctgataatattacactctaataaggataatgctgaattttgaaaggacacaaaacatctaatgccaatatatacatggttagccaacatctttgctatcaagaccacttgttttaaataaagatgcaagtgtcagttgtagattattgggatgaagctaaatccccagaatgcagcagcagctgagcatgttaaaatggggaaggatgatagctacatgtatgccggtcctactcacgcgacacccgtgtgctcaaaaaagttacttgtttttgttacgtgtgattttcctatttctctagcccaaagtgcattacagaagatacacctatagaaccattaccttctgctatgtgtgccagggctcatctactcctgtacattaatggattactttagatgcaaatgcagattacaatggagtggggaagtactttcattacccaagcctcagaaaaacacacaagaacaataacacagcaaacagattgagggattgttgtggtttttgactaaggtgtatgttagtttcatcagaaacttaaaacatagactgatcactcagaaattaaagtccgttttactgtgaatatagcaatatagtactggacacagtactggtgaaactgaggagagcattgcttgtaaaatcctgagtttccataaggaaaatgaaaactccttttaaaaataaaatctgaggagtgtacaataagcatatgctttgactttcctttgctgtggaggtttttggtttttcattgatgataaacgactacagacttagtagtggagaaatggtgtcctctagtggaagaaatagtagctccgctattcagatgcagagcactgcagcatccagcctttcaaagctgactcttctcaatcatctgtgggtcatttgacttgattttttaagctaccctgaatttccagaatgcaggttctaaagaaatctagatgagagaaagtatttgaaaatgatttttaaatgttttttaaaagacacatctgacatttttaacaacttagtaaaagttgaaatgaccattctgtgtagtcataaaagaaacacaatgaagtgtatggcctctggagttagtcttagtaaaacttattgctctgtgtcaatgttaacctgtctcagatcaagtaattccttcactaggttgggtttggggaggggggaaaagaggggcttttcctaggagaacgataagaaatggaaagactccttgaagtgttgcaagggaacctcctagcactgtgaaagtcagaatcgcctcagcatttccatgacgcacattatgcaaatctctttagcactattttaaggttgaaaactttaacaatgaaggggaaggggaagatttccaccaactgaatcatttgtgcacgtgtatagctcaaagagcttagacttcaaatatatctggtgaatg

SEQ ID NO: 106 - DNA, 5076 bp, Homo sapiens
gcggccgcagcctcagcaccgcagagcggagagcggagcccggagcccgccgccccaggatggctgcagctcctccaagttactgttttgttgccttccctccacgtgctaaggatggtctggtggtatttgggaaaaattcagcccggcccagagatgaagtgcaagaggttgtgtatttctcggctgctgatcacgaaccggagagcaaggttgagatttaagttctcaaaggtggctgcaccaaatcccatcccaagtgcccttcttccagtgtgaagggcactccttccacgaagagggaaagtgcacttacatttcaatcgaccaagttccaaggacctatgccataatgataagcagacccgcctggctctggggagcagaaatgggagccaatgaacatggagtgtgcatagccaatgaagccatcaacaccagagagccagctgccgagatagaagccttgctggggatggatctggtcaggcttggtttagaaagaggggaaacagctaaagaagccttagatgtcattgtctccttgttggaagaacatggacaaggtgggaattactttgaagatgcaaactcctgccacagcttccaaagtgcatatctgattgtggatcgtgatgaagcctgggtgctcgagaccatagggaagtactgggctgccgagaaagtcacagagggagtgaggtgcatttgcagtcagctttcgctcaccactaagatggatgcagagcatccggaactcaggagttacgctcagagccaaggttggtggacgggagagggcgagttcaatttttccgaagtcttttctccagttgaggatcatctagactgcggtgctggcaaagacagcttagaaaaacaagaagaaagcatcacagtgcagactatgatgaacaccttacgggacaaagccagcggagtgtgcatagactctgagtttttcctcaccacagccagtggagtgtctgtcctgccgcagaatagaagctctccgtgcattcactacttcactggaacccctgatccttccaggtccatattcaagcctttcatctttgttgatgacgtaaaacttgtccccaaaacacagtctccctgttttggggatgacgaccctgccaaaaaggagcctcggttccaggagaaaccagaccgccggcatgagctgtacaaagcccacgagtgggcacgtgccatcatcgaaagtgaccaggagcaaggtcgcaagctgaggagcaccatgctggagctggagaagcaaggcctggaagccatggaagaaatcctgaccagctccgagccactggaccctgcggaagtgggggaccttttctatgactgtgttgacacggagattaagttctttaagtgaagtaagcgttccctttccccttcttatttaagacttcccaccttactaaattaccagcaaaacaaaccactctcctgtttgagtaaaatgagaaagttaatatgtggcctccttttctgaagccagatcaaactgttaccttgtgttccaccttgaatctcacagcgtccccttctgcaatgtaggtctccttcctgtgcagtgtaacatgtatcccgttgcctgttgttcggttgtgtgactaattgtggattttaagctgctattattgtatttcagtggcaatggacacattagccttttacaagaggactagagttcatcaagccttgaaaggcaggcttcacagtgccgagttggcgggaaaagcaaattcttttgaagtcttagtctttccctcagtagcggtttctttcaggttaacaagaggcatttgtgcacacacacagggctcttgtgtgtgttgtcaaggggaccctccgtggcctcccgtgagtgcatgcctgtagtgcacagtgtctctacaggtgtcttctggggggcagaaccaattggaaggaagaaagggacccctctccagtcctggctccttcctacatcctgggctcctgaagaagctgtcttcccattttccatgcgctgtgcttatgtgtggtggactgcagagctgcttccacttacaggagagctgataatttgttagctggaacctattcacttccgagattcagacatagccatgctggtggccttctgaatcactgcatggatgtcccaggaggcagctctccccacacagcagcacagccatcacaggattccttgtgtagaaatgattcccagtctagttaccaacagctagtctaggagtaattgaatggccctatggcacagttccacccacagagtagtgaatctctcagccaaggagggaaagaaaaggaagaactcttgactatttagattctagttaaatatctggaatcctagcagtcactacattatctcagcagagagactttaattaaactgatttgtttccaatgtcgggttcacttaaaggatttgacttaccaccagagcatagaaaagcatgcaaggaagaccagatgggcttagcattgggaagacagagggcaaggaggtgatagatggatatagaagcatttctctgcaggataccagttcaggccccaccattcctgccaaggccattacatcccacaaacccaaatacaaagcagctgacttccctggatcttccccccactcctcacacctcacatgtcccaggagctgccttcattcaggcgggtagctgcactgggcatggggtggtggtgggagcttaccgccacctattcaagctctcagctactcctgaaacgggcagagatgatgaacagaagtgtatgtaaatacagcagctagtgggagagcaccagttgggcctaatcctgcctcatcattcttggcaggaatctgcaaatggaaacattgtgagtatcagcaatctgggaagtgacagggttaataactccttcccagaagctgtatcatgagattttgaggggaccgagccctgttacatggatgtgaacagtgaggatcagaggttttatcagaacacattctttttttctaccaactctccagagcgtgagtataggagtgccatgagctttttagtcagcagttttgtaaactctgtatataaaatcattaaccacacattgtgggtgatgggaagacgatttcagctgacagagttaatggcaaccaataatggtggcctgtagctgctaagagcttcacgcaggtttggcctgggctttcactgttggtgaatttagagtgtccttttaggtggggcggctattctaaaagtgtctttctatcactgttaagggggggggaaagtgaggttcgaggatgacgtaggtaactctcccctcccaagtccatgttccaagtggctatgtaaagcaagatgatacagaaagctgctctaaaatctcactgagtgatttcaccttcgcctactatgaaatgtctcatcagacctgacatgtctgagataaccaaggtgattcaggatttgatcaaaagaagtctagtaagaattaattacacagaagcctcctttcatttctatgggccaaacaaaggccatggataaccctacccgctttatgtcattacccattgggaaacacaatggctacttctgttagggtacattgaccttggtcaagcatcttaaagaaggcaaccctaattgagagctgtcttggctaatactctgcaccacaattgtgatgtcctagtcctaccactagagggcatggtacagcctggcaaaagttaaaaggggtgtggcagctcccatcaggtctggaggtggtctataagcacagttgacagttgtgcattgggatgggtggagaaagacgacaagagagcagagaatctgctgatgtggctgcgcttacttttagtgactttatgtacttatattaacagctggaaataggttgttgggttttgagcaggctgttatagtgaggaatgttcatttttaaatgttcctaacagattttgcttttgaaaaatgcttgttacatgaataatttgtggaccagggattgcttttctgaaggcagtatagggaacatgaatattcaagatgaaatacaaaaattatgtttaagggtcatagtgtataagtagcttcctaggaaaccctttgtgtatcttttcagactggggtgggggctgagcatgcttgtgcagaaagaagccatagccagaaaggacagaatctctcccccactcccttgccccataaccaaacataagctagctagtcttgtctaatagatgggatttactataggtgaagatagccctcatattcaaggacagaagctctggcaggagtaaattagcaaagcagaaatagtaccctttcattcttggaggtgctttgaaattttaggtagaatataatcgaaattatggaggttccttagtgctcaataatataagacctggtgttattagaacgagtctttcttataaactaacagagcaggtatatgcctgttagaccttagctgtggggttcctttactattgggtgaatcattaggtataaaaaataatcatcaaccaggcaaattactttgcttcctagctgatgtcatcccacattggtacaggtgttattcagtactgggtggttcagcagggaagccgggtgggaccagtgtgtctgtcatgaaaccactaactgcattcctgactgaagagccatctgtcatttattggggaaggtcttcagttgagctctcagccttaggaaggaagcacgtggaggagggacggaggaggttcccttgctgggcatgcttcgtagagggccaggagcagcaggtcatgtgcacatgccgttgcagcacaagcttatgcttcccgtagccgtggcttttcattctgcacagtcccaggtcccagctcccctcttatggtttctgtcataatgtgctttatctgattgactccaaacatcccgaaatgtcacctgcagatttctcgtgggaaccaatatgtacatgtttgcaattatgctgtgagaatttaaatgtgttagatggaaaatgctattggcagggaataataat

SEQ ID NO: 107 - DNA, 4249 bp, Homo sapiens
gggaaagcgaggagccgcggcggcgtggagccggcgggcccgggcgggggctccccggagccctaccaccccaccctgggcatctacgcccgctgcatccggaacccaggggtgcagcacttccagcgggacacgctgtgcgggccctacgccgagagcttcggcgagatcgccagcggcttctggcaggccacagctattttcctggctgtgggaatctttattctctgcatggtggccttggtgtccgtcttcaccatgtgtgtacagagcatcatgaagaaaagcatcttcaatgtctgtgggctgttgcaaggaattgcaggtctattccttatcctcggtttgatactctaccctgctggctggggttgccagaaggccatagactactgtggacattatgcatctgcctacaaacctggagactgctccttgggctgggccttttataccgccattgggggcacagtcctcactttcatctgtgctgtcttctctgcacaagcagaaattgcaacctctagtgacaaagtacaggaagaaattgaagaggggaaaaacctgatctgcctcctttagtttggaagagacaatgccattttctcccttgagtaatcttgtgaaacagtccacagtttcatcatttgagtcaagtggagaactaacctttacctaccaaagccacgttccacggcccgaggcttaaacaggaccaatgagaggccacatccagctacgcaaagttactggacatgcggtctgcagtgcacattataaggaatggaacatgaaaatagtatataatcctagacctggagttgccaagttctgtcagactccatctcccccaggttcaatgatggatgataatctaaatcattagggcagcagtttctctggtaacggaagagaccgtccgccagatctgcaggctgtttctgctccaacactgcttgcttgtgagcatctctgcctcagaatggggttttgggttggagttcttgttttcctctgttctttcaagttgtctccaacgaacagaaaactataaacttactggggacaggatgtgtgctaaagggcacagcaagacactgtcttttgcttagctgaccaaaggggtcagcagggatggcgtggagtcatgctgtggaacttattctaggctgaatcctagggtaaggtggatcaactgaactgtcactccagagattttagaaatttgagtaaagaaacaataaggacctatacaatcatatgagaacaaaaatatgaaatcttgctagtgaagacgtattttttcttcttcccagcagccaggctagcaccagttctggcccagtctcctcttcttctggagatcacatgtttttcttctaaggttaggattgtgctttgactgcgaaaggaaacctcactgtttcctccttccagggactgaggtctccaagctagctgtggcttatgcagatgttcactgggaggacctgccagaatctcggcacttggggggagacctttactcccagtttggtgaccatgctgtagtcagctctatttccaatcccgacagtagcagaatggcattctacaacaaaaagaagctagttatgggagttaagtttttgtagttactggtgttgatcctgaaagcagactgagataacattaaattgctgcaactgaagaactgcagccaagaccttaattccaggaaagcacagaggacaaagttaattcaaaaagaggcgctagatcaaggtcacagcactgcctacacctgtttacaaaaagaatcaaataccactatgaataaggattcaggggtttttaatctactttccataaattaccaatatcactgattcaggaagatagtatctcagaatgaccagagcagcacagaaacaagctactctgacattatgggagcttcaaaattgtatcatgatacagaaacactccttagcactttaagaaagtgagatggaactgccagatttctggaaggagaaaaagtgtaggtatttgggttcattaatctgctcacttgaggactttgttttgaaaaagtaccttctgtggacaaggtattgtgctaccagctatacaaccctgacttcagagtttgcaaccttgccctgagtgaatcatgttaaagctgtctgagtctaaagcaccgtatcttggtgcagaacagataattatacagagatggaatgggacaaccgcagttttactacattctggtgtttggcctatatgagaaaccatcttctcacagattaagggctaagggcaaaaggggtgggaggtgtggaactagccttaatgagtttcccattcctgaaccaaaattcaaagtgagtgagatgtaaatcctgtgattttggtgaagaaaaaaacgggtatcttcatagcagcctaggaaaccttaaccatatctctaacaccacacagaaagaggctggaggagccactggacaaagcttctgtctctgtgtgtacatttataatgttctaaccaagtctcaaaccttgatgaaaaacacaaaatttttccataaacttatcagaagactcacttttctttctttcttggatagagaaaccattttctgacactaggtttacaatctcagtgtccttacaagttaagtcctaagctcacaggatcctccgagcatgtccatcacctgctctttggctaaggtggcagtgtacctctagatcaacctgggaacagtcacaagggagtgtgacttcttggccataataaactcactcgatagtgtttatgttattaatctgaatgcaacagaagacaaaagcacaggcatgcacacacacagaaccccaaaccactaaaaactacctaaacactgacttagtaaatagtaaaaaggtaatgttgggacttttaaaccttgaatccattagccaggcttgggatgaaaggaccatctaaaatcatgctagtctaaaccatgctcttccacacagctgtttaaaaaccactgggtatgaggaatatgctagaaagaaatgttaaaaatagattgttggctcacacttatttttctaataaataggaccattattactaccaggaaagtcttatttattttgcctgaaattggcttaaagaaagtctcatgacgggatgggatgggctgcgcttctcaatgaactctgaggcagaaatatttgccttggattctgtggattctttaaacctgtgtgctaataattcaaacaatgttgcattaattgtataagggtttttgtatagttttcaaacatctgtggtgtaatgatctttgttaaacatatattctgtaaagtgccatagtctttttttatgtgtagcatatttaaaaatatatatgtatattatacatacacaagtttgtgtgaaagatgtgcaataacaaaggtgtatgtatgttttgttgttttgttttggaaactggacaggagtcaaaacagggatgtttgtttctgttttggcaaaggagagttccacatttttgccttcatggcttattcagtaacccataattttaatgctacacaaatcttatgtgaagaaaagactggtatgaaatcattttttcctgggtctaaaataatcgctagtgttatgtcaaagttaagcccgcacgccaggcccagttaatgctagtctttcatgtgaaatgtgaagctgccatgttgccttttctcttagtaggataactagtagctggtacataatcactgaggagctatttcttaacatgcttttatagaccatgctaatgctagaccagtatttaagggctaatctcacacctccttagctgtaagagtctggcttagaacagacctctctgtgcaataacttgtggccactggaaatccctgggccggcatttgtattggggttgcaatgactcccaagggccaaaagagttaaaggcacgactgggatttcttctgagactgtggtgaaactccttccaaggctgagggggtcagtaggtgctctggagggactcggcaccacttgatattcaacagccacttgagccaaatataaaattgtatttacagctgatggactcaatttgagccttcaaacttgtagttatcctattatattgtaaactaatacattgtctagcattgatttggttcctgtgcatatgtattttcactatgtgctcccctccccagatcttaattaaaccagattttgcaattc

SEQ ID NO: 108 - DNA, 6060 bp, Homo sapiens
atctcactgaggaccaacctttcgacattcttcagaaatccttgcaagaggccaatatcactgaacagacattggcagaagaggcatatttggatgccagtataggttcaagccaacagtttgcacaagctcagcttcatccttcttcatcagcatcctttactcaggcttctaatgtttctaattactcaggtcagacgctgcagcctataggggtgacgcatgtgcctgttggagcatcgtttgcaagcaatacagtgggtgtacaacatggctttatgcaacatgtggggatcagtgttcccagccagcatttgtctaatagcagtcagattagtggttctggtcaaatacagttaattgggtcatttggtaatcatccttccatgatgactattaataacctagatggatctcaaatcatattaaagggcagcgggcagcaagccccatcaaatgtgagtggagggctcctggttcatagacagactcctaatggcaactccttgtttgggaactctagttccagtccagtagcacagcctgttaccgttccatttaacagcacaaattttcaaacatctttacctgtgcataacatcatcatacaaaggggtcttgcaccaaattcaaataaagtcccaattaatatacagccaaagcctatccagatgggtcagcaaaatacatacaatgtgaacaatttgggaattcagcagcaccacgtacaacaagggatctcttttgcttctgcaagctcaccccagggctcagtagttggtccacacatgtctgtgaacattgtaaaccaacagaacacaagaaagccagtcacctcacaggcagtgagcagcactgggggcagtattgttattcattcccccatgggccaacctcacgcaccccaaagtcagttccttatacctacaagcctttctgtcagttccaactcggtacaccacgtccagactataaatgggcaacttcttcaaactcaaccctctcagctcatttctggccaagtggcctcagagcatgtcatgttgaacagaaactcttccaacatgctcaggaccaaccaaccatatactggaccgatgcttaacaaccagaatactgctgtccacttagtgtctgggcagacatttgctgcctctggaagtccagtgatagccaatcatgcctctcctcagcttgtgggtggacagatgcccttgcagcaggcatccccaactgtattacacctgtcacctgggcagagcagcgtttcccaaggaagacctggcttcgccaccatgccatcggtgacaagcatgtcaggacctagtcggttccctgctgtcagctcagccagcactgcccatcctagtcttgggtctgcagttcagtctggttcatcaggatcaaactttacaggagatcagctgacccagccaaacaggactccagtaccagtcagtgtgtctcatcgtcttccagtttcttcttccaagtctaccagcaccttcagtaacacacctggaacaggaacccagcaacaattcttctgccaggctcagaaaaaatgtctgaatcagacttcccccatttctgctcccaagaccacagacggcctgaggcaagcacagatccctgggctcttgagcaccacactgccagggcaggattctggaagcaaagttatatccgcatccttaggaaccgcacaaccacagcaggaaaaagtagttggatcatctcctggccatccagctgtgcaggtggagagtcattcgggaggacaaaaaaggcctgctgcgaaacagctaacgaaaggagctttcattctccagcagttgcagagggaccaagcccacactgtgacaccagacaaaagtcacttccgatcactaagtgatgcggtacagagactgctctcctaccacgtgtgccagggctccatgcccactgaagaagacttgagaaaagtggacaatgaatttgagacagttgccactcagctcctaaaaaggacccaagctatgcttaacaaatacagatgcctgctcctagaagatgccatgcgaatcaatccctctgctgagatggtgatgatcgataggatgttcaaccaggaggaaagagcttccctgtcccgagacaagcgtttggcacttgtagaccctgagggttttcaggctgatttctgttgttccttcaaacttgataaagctgctcatgagacacagtttggccggagtgaccagcatggcagtaaagcaagcagctctctgcaaccgccagccaaggcccaaggcagagaccgagccaaaaccggtgtgacggaacccatgaatcatgaccagtttcatctagtgcctaatcacatcgtggtctctgcagaaggaaacatttctaaaaaaacagaatgccttggcagagcactgaaatttgacaaagtgggcttagtgcagtaccagagcacgtctgaagagaaggccagccggagagagcctctgaaggccagtcagtgctctcccggccctgaggggcaccggaaaacctcatccagatcggatcatggtactgagagcaaactgtcaagcatcctagcagattcgcacttggagatgacgtgtaacaattccttccaggacaaaagtctgaggaattctccaaagaatgaagttttacacacagacatcatgaaagggtcaggcgaaccccagccagatctccagctgacaaagagcttggaaaccacatttaagaacatcttggaactcaaaaaggcgggacggcagccccagagtgaccccacggttagcggctctgttgagttagatttccccaacttttctcctatggcttcacaggaaaactgcctggaaaagttcatcccggaccacagtgaaggtgttgtagaaactgactccattttagaagcagctgtaaatagtatcctagagtgttaatagcagcagtcctccccctaccccgccccgagaccccaccccgagaccccaccccggaccagttacattcgttcctggcaaaagcaaatggaaatggtctcctgtctccagcctgcttgatctttcatcacaggttattctttctaatctcaatcctgttctttgtttaagagcaatacttgtcgtgattacagggagatcctttagtaaaattaatccttggcagaaagcagtctgataggccccactcatttcaagtgttatgaaagtgcttataggcattttgtttatttgttttgttttttaaaaacactgtaactcaatgagaccacagtatacttggcccttggtaaaattttgacaatcataagtcatttgaaaagaacagacttactaaaatcaaacgagacggatagaagctactttttaaagaatatcccactgcatctgcaaatttagttttgggtttttttattattattattttgagtttttttgtgtgtgttttgttgttattgttgaggggaagaccacatggttcttccccctcagccatctttgagcagtaaattgctggctgtgctgccagggacccgcagccctggtggaaaagccagtagcacatacgcagggcattgcagggcttccctattgatggttcaagtgcttttctgatgcttccggagcaaaacctcatgcttttaggcatatctatgttgaatttcacctagggaatgttctgttcttagttacagcagcaaaatttgaaataatttcaccaggctaaataaaggaaaatggaaaccagttaagaggcacagtgtacagaggaggccgggatagagccatgagggttataatattaatatgtatatatgtaaaagcatatatatgttaactattgagaaaaaacaagttttgcattttataattggatatagtcaacatataatgtatgtttttgtttgttgctggattttgtttcatttaacctctctttgcaccctctcccacaacaaataccaagcatcaaaagcactttcatttgaaaattattatgttgtaatttttcagtttaaactttaaggagactctggccttgtttatgcttcttgtctgagaacagtagtgacccctggcagcaattcattaccaaaacacagacaaaccaaaggtaaccagctagcccaccactgaaaggaaagatctgagacatgggattcccatttgagagccaaaggatatgccctgtcatggtttctgtttggcctgtgttcatattagtgagcatggcttactgcttttttttttttttttttttgtcagggagtattctccgttttcctttctcgtatacctgccccaggttatcccatttctgttgttacctttattcttaatgtcattgtaaccatcacttatctcctctcattgggaaagctacatgatagtatttttatgcactcttctcccacacatacacacacgtgcatgtatctgagctgctcggatccagaggtcatttttgttacagtgtgtgcacactcactctccttcttagtgtgcatactctctcatttattctgtttatctccctggctctggaggtgcagccactggtcttcactttaatgtgttgccagaatctgcttctggctgtcgccaacatggggatgacccccattgtcatcatgttgggcatttcttttccagattggcctgtgatggaaaggaaggcttctaattagaaaacacagcaacagaagacctataccccggtgcccctgtgtcccactacacacagaaaaccctgtgagatggccagtcttcataatagcaacgtaccttcaccccagccacatgccccagccaatacaaattggaaaatctggcccattttagggttaccattttttccttatttgtgccaatgtccaagttgcagatttcccctttttcctgtattgtaacatattagataagttggtgtcgccagttggtactttctgtttgggtagtcctagggtaacaccctgccctaaactccatgatttcataggcttttcttcccttggggctcatgctcccctaattcctagcaagatgatccttcctaatcaaattcttctcattgcagaactttatccctggaagccttcatgtgggctgctagtgagttacattaattactgcaaatcagtggaattctcaagagacaagataagcttcatgtacatttgtcacctctctttcttccctatcctgccctgctgtcccaatcctagcttttctatataccatcttaaagggtttttaagccctaacacttgtctagcaaatggagagcctaatttaccaaaatgaaacttgtaaatttttgtgtcattgtatgtaagtttactttttatggaggaaggattctagataatgacaaatgaagattatgacatgtatttcactcctgtgattaggttctacgcacatgggtcataactcgcatgtcgagccccctctagtgaagggtaggagagctcagcctcggatggccaacattcagttgttcaggttcattcgtcaaagttaagttttagaactatttgtactcagtaacaaaaatcattttctttttttttttttttttctgttgtggaaaagcgtgaatttgttattaagcatttgattttctgtgtccttaagtacttcctgaagatgaagcaaaattttaatctggcaattatgaaaaagaaatattttagctctgaaggatttagtagattctgttagattagggaggccttacagactgactttacttaaagaggacgcgtcactcgctgtcagtgtggtgtgggctttatttgcttaaataccttcatttgtatagtacgtctcacttgaaattgctttgtatacattttgtaaaaatatttataaaatgttttgtaaaaaaaaaaaaactataacaaattgcagtttattttgttatgttggataaatactgttaaaagaaaccagtcagtaactatattgttaatccatggttaggaaatgtttagttggagattacaaattgaaacaaccattgcaatacagccaaagatttggg

SEQ ID NO: 109 - DNA, 7071 bp, Homo sapiens
gccgcctcctcggccagtggcgtagccgaatcggtgtcgcggccagccagataggggcggaggtccggaacccagtctggacccgagcggggggccatggagaaagcggcccgaggcgctgtttacaccgactagcgcgggcccgttgcggctgcaggcaccatggaccgagcccccacggagcagaatgtcaagctgtcagctgaggtggagccatttattccccagaagaagagtcctgatacatttatgatccctatggctctcccaaatgataatggaagtgtttctggtgtggaaccaactccaattcccagctacctgattacttgttacccatttgtgcaggaaaaccagtccaatagacagtttcctttatataacaatgatatacgatggcaacaacccaatccaaaccctactggaccatactttgcctatcccattatatctgctcagccgcctgtttctacagagtatacatattatcagctgatgccagcaccatgtgcccaggttatgggtttctatcatccttttcctacaccttactccaacacctttcaggctgcaaatactgtaaatgctatcaccacagaatgcactgagcgtccaagtcagcttggacaggtcttcccattgtccagccatcgaagcagaaacagtaacagaggatcagtggtcccaaaacaacagcttttacaacagcacataaaaagcaaaaggccgctggtgaaaaatgtagctactcagaaagaaacaaatgcagcaggtcctgatagtcgatcaaaaattgtgcttctggtagatgcttcacagcaaactgatttcccatcagatatcgctaacaagtctctctcagagaccactgcaacaatgctctggaagtccaagggcaggagaagaagagcatcccaccctactgctgaatcttctagtgagcagggggctagtgaagccgacattgacagtgatagtggttactgcagtcccaaacacagcaacaaccagcctgcagcaggggctttgagaaatcctgattctgggaccatgaatcatgtggaatcatctatgtgtgcaggtggtgtaaattggtccaatgtaacttgccaggcaactcagaaaaaaccttggatggaaaaaaatcagacattttctagaggtggaaggcaaactgaacaaagaaataattcacaggttggattcagatgccgaggacacagtacttcctcagaaagaagacagaatttgcaaaagagaccagataataagcatttaagctctagtcaatcccatagaagcgatccaaattctgagtctttatattttgaggatgaagatgggtttcaagaactaaatgagaatggaaatgctaaggatgagaatattcaacaaaaactttcttctaaagtattggatgatttacctgaaaactcaccaatcaatatagttcagactccaattcctattaccacctcagttcccaaacgtgcaaaaagtcagaagaagaaagctttagcagcagcccttgccacagctcaagagtattcagaaataagtatggagcaaaaaaaattacaggaagctttatcaaaagcagctggaaaaaagaataaaacacctgtgcagctagatttaggggacatgttagctgctctggaaaaacaacagcaagcaatgaaagcacggcaaattactaacaccagacctctgtcatatacagtggttactgcagcttcttttcacactaaagactctactaatagaaaacctttaaccaaaagtcagccctgtttgacatcctttaattctgtggacattgcttcttctaaagcaaaaaaaggaaaagagaaggaaattgcaaaactaaaacgacccacagcacttaaaaaggttattttaaaagaaagagaggaaaagaaggggcgcttaactgtggaccacaatcttttgggatccgaggaaccaacagaaatgcacttagattttattgatgacttgccacaggagattgtttcccaggaagatactggactaagcatgcccagtgatacttcactctctccagcaagtcagaactctccatactgtatgacacctgtgtcacaaggctctcctgctagttctggaataggcagtccaatggcatcttcaacaataaccaaaatccacagcaaaagatttagagagtattgtaatcaggttctttgtaaagagattgatgaatgtgtgactcttcttctccaagagcttgtcagtttccaggaacgcatctaccaaaaagatcctgtaagagcaaaagcaaggagacgactcgttatgggtctaagagaagttaccaaacatatgaagttaaacaagatcaagtgtgttataatttctccaaactgtgaaaaaatccagtcaaaaggtggtctggatgaggctctctataatgttatagccatggcacgggaacaagaaattccttttgtgtttgcccttggaaggaaagctctaggacgctgtgtgaacaagctggttcctgttagcgtagtgggaatcttcaactactttggtgctgagagcctgtttaataaattagtagaactcactgaggaggccaggaaagcatataaagatatggttgcagcaatggaacaggagcaggctgaggaagccttaaagaatgtgaagaaggtaccacaccacatgggacattctcggaatccctctgcagcaagtgccatttctttctgcagtgttatttctgaaccgatctctgaagtaaatgaaaaggaatatgaaacaaattggagaaacatggtggaaacttcagatggactggaagcatcagaaaatgagaaagaggtatcctgtaagcacagcacttctgaaaaacccagtaaacttccatttgacacacccccaattggtaagcagccatcattagtggctacaggcagtactacctcagctacaagtgctgggaaatccacagcaagtgataaagaggaagtgaagccagatgacctggaatgggcctcacagcagagtacagagactggctctttggatggcagttgccgagatcttttgaattcctccatcaccagcaccaccagcactcttgtacctggcatgcttgaagaagaagaagatgaagatgaggaggaggaggaagattatactcatgaacccatatctgtagaagtgcagctcaatagtagaattgagtcttgggtctcagagacccagagaactatggaaacccttcagcttggaaaaacccttaatggttctgaggaagacaatgtagagcaaagtggagaagaggaagcagaggcgcctgaggtgctggagccagggatggacagtgaggcatggactgctgaccagcaggccagtcctgggcagcagaagtccagcaactgcagctcgctcaacaaagagcactctgattctaattacacaacgcaaactacgtaactcaggaaatgtcggctctctatctccagctgtggaagggttgcagccattaccttttatgcttcatctcaacattttgcactgtccagtatttaatatacgtatttaattcccaacaaatatttttgtagcttttacttgttatgatctgtagcttagcttttaattagtatctaagtgtctttctaagaactgtgtggaaaattcagatctgtttcagcttattttgtaatcaaaaacagtgataaaaagaagaccagatcttaaagaaaataaatttcaaatgcttacttaaaagacattttgaaagttaaagaacaaggttctaaggatagaagcagttatcagtgtttgcttcaggactccacctcctctactctaatttgaccaaaaaattgtttgggcttctttaaaaaagaactgggggtggagtcagaaaattaaatgaaaggctgagggtaactaagtccaccagtgttgtatgttaaaaaatcaatgcaacttttatgtggtccacaaatgtttagtcagaagtcactgattattgtaattaattagtgttgggatgggctaaaacagagccttcaaaacttcggctagcagtggagccaccatcttagattatagctagctagcctcatttgtggaaagtgatagatgctgtctataatagtgaacagtcacccatgataggacctccaggttctgtctcatatttgcttcttacttacctcaggaatgctcttgtacatagacttatttacaaaaagctaggcacatgttgacaggtgaataactgtaaccgattgtatgactgctgcacttacatgtaaactcttcagaaacagagtcttatactggtgtgttctcttgcatgcttctggttcaggactcttgatttgagatatggatttgattgagtatccaaacttgtcctgagtgcaaaactgtttcaccttttaaaaaatacctattttgcacctagccttgagcaccttccacatagcaatgaccatagttactgtcaggaggtcaaggaaaggaactttgcacaacttgtgacatgtatcctgataatcaaggcttagaggaggaagttttagaagataagagaaagttgttctaattgtgctgaaactattagatgatttagagtatacagatatgtaggtattaattctctattcactattatttatctctgcccttctctaggagtttgtatacctgcttaggagacaataaatgagctaaatgttttatttgctagtcagtcaccacctggacttcagtgactttacaagtttatgtaatggtggaagaatgacaaactatgtaatttttttgtcttccatccaactccccaccacccccaactgtcccccccacccccctcacacacatgcacacatccgtacgtgtgtgtgttttccacttacaagcttccataagcaggcacaaaactgagaaggaaggggtattatccctgccctgattatctggggcagggctttgcctcacagaggcaggagagaagaattgggcagattctttactgaactcattgggactactgtgctagttttgatgttttataatgctggcatttaattactggagagattggattcttggttgatgatttagtatttgtgaattgtgaaagttcaggagctgtgtagaaaatgttagtcaatcaactttattattgtgctaaaaggggacattcttatactgtcctgtctaaactgttctccagtatagacttcctaggcactaaatatccaatatttaaaggaacacagcaggtaaggaatgaagcctctgaaatagtactcatggatttatacatggcagatcttactgtctctacacatttggaagtgttcgttggtttaaagaaatgatagaggttttgaactactgacagtcttaaaagtgaatttaaaaactgttcatactttttatggtgtaaatttcctttgctcgatgtcagtgattcagataactcttgaccttgagatgatggcttttcacaggtttcttatattttatatctcttctgaacatgaattgtcattttagatttttgacatttgtatcaaaagagaagttgaggaaatcttcagaacactggtaacttttagttttgctatagacttcagaagtgtttatttatatgttcggtaaatgctctcgcatatgcagtacctcttctgccagcaaatccaagggaccatagcctttttatgagacaggtcacctctagaggacaccccaagaattattaaaggaaatgttaccattttgagagcatgcttaaataaatattaataatgtctttataacttgtttcctttaaattttggaatattgaattacaggctttggaggagttgtgaaaattaggaaagtttttatatattttttgaagtgggcatggttggctctttgaagacctataaagagatccagtgggaagagtaagggttggttcatcatcacaagaaataaaaaacatagtgattttttctcttaatgtgtagaggtggttttactggcaataattaataatagatttctatttcagtatgtaagcatattaactaaaatatgaattacacttccaaagttagatttctgcttcagtaggtttgtttgctgtgaagattacttctcaaaagacagatgttcatattagcttaattttcggtttaaatatgtttgtaaatgatgtaatatatttcttttgactaaatgtggaaaagtaatgtgtgttatacattgagaagtttttactggctttgactggaggttgtttttgcagagatggtattttatatgattccagtatttggaaaagaattagtcaaaaggaattcacatagtttaaatactgagaaattaatatccaaatatgtacttgtctgatttctaaataagctgggggaggagggaggggtgggaattgaaatgtgcaaatgagtagtgaatgctacactcattttcaactctttaacatgaaactgttcaatcttaacacattgttactttaatatatgtataaagaagtattactgtttgtaaagctgctgtttgcttaaaaaaaaaaaacacccttgtcatgtattttctgtatgttgggccaacaggttagaacatcaactcatttaaaaatttttatctttttttgatttaaaaaaattctgtgaaataatttatttacagacatcttcctcctccctcatcccttccaacctttacatacatcacagaatcaaccaaactgtttgcctaatctgaaatctgaatcctaatgagaaaaatttaaattttgttggcacatcacaccttgaaagtatttgtattattttataatttaatttctaaatataccacataagtttataatttaatgtcttaattgtaatgctctaataaaaaactagcaaaattagtgtgagttataacatgaagggattttcatcttttgctgtatgaaggataattgttatatcacatttggggggtaataacagcttttttgcactatgtaaatactagtggggattcttctgtactaataaaatgattattgaaatg

SEQ ID NO: 110 - DNA, 5918 bp, Homo sapiens
ccaactcctggagtcccctgggagctgccgctgcaggcccccgagccgctaggccccgccgccaggccaccgctgctgcggcagccatggcggaagttcatagacgtcagcatgctcgggttaaaggagaagcccccgcgaaatcctccacactccgagatgaggaggagctggggatggcgtcggccgaaacgctgaccgtgtttctgaagctgctggccgccggcttttacggcgtgagctccttcctgatcgtggtggtgaataagagcgtgctcaccaattacagatttccctcctcactatgtgttggacttggccagatggtggccacagtggcagttctctgggtgggaaaggcgctcagagtagtcaagtttcctgaccttgacagaaatgtacctcgaaagacgtttccactacctctactatattttgggaaccaaatcacgggactgttcagcacaaagaaactgaacttgccaatgtttacagttctgagaaggttctccatcctgtttacaatgtttgctgaaggagttttactcaagaagactttttcttggggtattaaaatgactgtatttgcaatgattattggagcctttgtagctgccagctctgacttggcatttgatctggaaggatatgcttttattctgataaacgatgtcctaacagcagcaaatggtgcatacgtaaaacaaaaattagattcaaaagagctgggaaaatatggactgctctattacaatgcactgttcatgattctgcccaccctggccattgcgtatttcacaggagatgcacaaaaggctgtggagtttgaaggctgggctgacaccctctttcttctgcagttcaccctctcctgtgtgatggggtttatcttaatgtacgccacagtactctgcacgcagtataattctgctcttacaactacaatagttggctgtattaagaatatattaataacttatattggaatggtctttggtggagattatattttcacgtggacaaacttcattggtttaaatatcagcattgctgggagcctggtatattcctatatcactttcactgaagagcagctgagcaaacagtcagaggctaataacaagctggacattaaggggaaaggagcagtgtgaccagaggattgcttcatctgatacgtaggcctaagtttttaatcaactcagaacactggcagttcctacagagacactgaggtgtcttgattatggaggaaataaccattcctttgcacttgtacaatctgaggattgattgctgccttttaaaattttatgaagagagaaacttataattgactctattttaaatatgttgtttgaattaatttatatcagactggaaaaggtactgggctttttaatttatttttcttatatgccgacagtgaaacatcagtgttttgaaagtattttatttcataatttgatatccaggtgtccctgagagctgcatatgtaatgtttgccaactggagcttcatcattcaaattgttgctgcatctggaggcagtttagcctttcctctgctggaaatgcagacgaatatgtgaaatttctcttctttgaatcttatttcttatgattgcattgtcttcatcatatcatcattccatttgccaaggaaaacaactttggcactataaaaatatgtggggctttgaagtgtattgctatctatgttggcttccctgactttcataggatgagcagagtgcattccttgaaaacatgttctttttttgttgtgtagaatggggataatgaagggggtgagaaagtaggccttttactaatttttcatctatttgacttattgattcaactaaaatgttttaagtatatgtgccaggcattgtgctaaatgctggggatacagagatgtttgcagaggtagttgaaacatctcactcctgccatagtgactcaggtaaggttgagaatttagctctgttaatctattcagaagatgtcactaagagtaagttgtttcagcactcaaaagccgcaaatctgtaaattggattaagaacacctgccctacctacccggcaatagtgtgaatccaaatgctgcaatgtgagatgaggtacaagtaaagagctgtgttttgtaaaccagtgcagctcagcattgactccctctctaagtgaaaattgcagacaggcaagtctgttttcccttgccaccttcctttgggtttggttgctctttggatgaatatgatgaggtcccacatttctgaatttattggtttgaggggaaaggctggttagacgtctttgtattgtcaatggttggtttttctctggcagtgtcagtgttagagctatcatcttccttcttaaatggcatgagcaatgagcaaacttccctcctttcaacattctcacctacatcatgtgccccttggctcacctactgagcttgccaacttctctcaaaaccaatgctgcattttgggagagcagctgtgaatgggcactgcctaaattgcctcttggggtaatctggagggtggaggtgttaactcaaacataaccctatgacttgactcagagatatccattgactttgaggattagtgtgtttgctcaggccagttgtacagccagtgtgcaagagatttggtacctttgcactaatgcacacaccagtgtctatttcattgggtttggaatccactggactctgttgacctaaacagttagggttttgattttttttgatatgcaaatttatattgagatcattttcatattcctgtcttttggtttgtctttactaaagcttggctggtggtgctgtgtccctagaattatccctgcaaccaactcccaagttacaagcttcattaagagccttagactcacttttttctagcatcttctgacctgagaaaattccactgggagtaaaggatagtatcttgtgtcatatgggtcttactctccctattttaccaatgagaaaacaaaactcagagaaagatgacttgctaatacatcaaacccatgtcctttttattgaactatgctgccatttaattaaccgcccttcccctctgagggagtaaggaaacagatcctgagttcacttgagcactttcaaaaaagcaagcagttgattgaatttggtgtcagagaggagcatactttgcaaatcaggaagagtgacagcttaccctgtcctggaacccttatcccacttccaggctgactttagttgataatgcacttctggctgtaaatgttgccaacacttcctggttttgcttaggtacagtgaaagggcatagtgagagctatttttagtgattctgttctttctgtcagcaacatgaaggagggacgtttgaataatttttgttgtagaatatttcttcatgaaaggcttttgggtgtctttaacaggtgttgggctagagccccaccaggagttgaactgcctcttgggggtcaggttccctaggagatctgtcacctcttcaggagtatttgagaacattgtgtagttacagcttcactaaatgcacgtgacaggcttctgtgccttgggagccctggcttatgctgaaacttctggctgaccagagcagtacagcaactttgccctgtctgtgttctgcttcctggatgcatccttcagccactaaccagcattgcaagatggagcagggtgaacaagctggagactgaatagtcttttggagtttgcgttttgattattgcaggcgtgttacaatatactggtgatttacctggtactgtggcacctcccagaaagtctggtttttgccccatgtttgatatttactaggcagaaattctttgtcctgttaactgcctcctgggagaaaaagaggcaatacagagttaaatccttaatttgcccactgagacagatgagctgtggtattccaaaagacaaattctatgactagtgtctcctgttcaatgtaagtgagaccctctttggccaatctgcttctagtcaaggctaaatggattggaataaccctagttggccaggctacacattgccagcatgtcccgttgagttttaattgcctcatgtggctgtggactttatgagtcaatcatttgtaggctccagtttgcacctagtttttttttttaaaaagtgcatttacacgcttttggtagtcctgttttatcaagaatccatggagggttttggtcagtacagctggtgcaggatcctcacggagaaacagtggagtttcacattgagttggtttgaaatggcaccccaggactttgggcctgccttacttgatagcctcgttcagtgagcaaagacttagtgagcagctcttgtatgccaagtattttgctaagctctggaaaaaagataaacaagacatggttcttgctttcaaggagtgtgtaattctttagccagatatggaaacctggaccctgagtgggagaaaggagacagatgaaaggagtccgtgattttgtaaccaagagctgcctgcatggttatgagtatcactgattttagggacgccccacagagctaaagcatttttttaatccgagaggacttttgtaactcatattagttaatcttctagctctgagatagcaacacagctcttagaattctgtaagtagcttgaggcctcctcctctactgtacatgttcttgctttcccaaaattgtaagtttggtttttcctatgaacaagactgtaattgatttttctctccctgaggaaaaaagttcggaataaatgagacatggatatgaaactacttagcacaatgcctggtacatattaggccctcagcaaatgtggctaccgtgtcattatttcatggtgagactcaaggcaaaacaagattcttaatttatgctccgtaaatgctagaggcttgggcaatacggtctgtcctgaaaaacaggactctgtgtctcattgcctctagaatccttaggtagcagtttctgttcactgtcttttcttttttaaaaatatctgctggacacaattacggccattacatgatgcaggtgattctacctattttttaaaaagaacaaaatttcttttatattgtgacagtacattttaataaaggaaaattattttcttccccctactccccctccttttttttttctggtaaagacagggtctcactctgttgccagactggtctcaaactcctggcctcaagtaacccttctgtctcagcctcccaaagtgctgggattacaggtgtgtgccacatgtccggccaggaaaattattttctatcttaaagaaacatagttacattttagaatgtcaattcagttaaatctttctcagtttttacctttagatggctcctggaaaggccagcgttccttttcccctctctgaattgaaagcacttgaccccatgctgcccctgcttccaggcctgtctcagttgtcatatattgtgagtccctggcaccattactgttttctaagccagtcttctaggtcttactttcaggatgctgcttcatggcatgaggatatagtttacagtgttgtagtttttttttttttaaagctttgttctttaaaaatactttttaaaaagaaatctactggttagatttattgtctcacaaaaatgtttttagagattatttttttcacaaatgttttctttctcatgctgatgatcaactgatttttgtctacaggtgttagcttctcacagtattttttcattttagagtctatttaccaaatgaccatttttagtgttaaaaggtactgaggaattgaggtatgtaaatcaggtgacataaacatgaaaattatgtgcctaaatatttttgtaatggtgtaaaataaatactttttcctg

SEQ ID NO: 111 - DNA, 3010 bp, Homo sapiens
agtgcctaatgggtgttgttcctggctggacttgatgtccagggcctgaggggttttctcgccgagtctcctggggcggtccggaggctcgtgccctgttgtggggcccccatttgccgccgccatgcccacggccgccgcccccatcatcagctcggtccagaagctggttctgtatgagactagagctagatactttctagttgggagcaataatgcagaaacgaaatatcgtgtcttgaagattgatagaacagaaccaaaagatttggtcataattgatgacaggcatgtctatactcaacaagaagtaagggaacttcttggccgcttggatcttggaaatagaacaaagatgggacagaaaggatcctcgggcttatttcgagcggtttcagcttttggtgttgtgggttttgtcaggttcttagaaggctattatattgtgttaataactaaaaggaggaagatggcggatattggaggtcatgcaatctataaggtcgaagatacaaatatgatctatatacccaatgattctgtacgggttactcatcctgatgaagctaggtatctacgaatatttcaaaatgtggacctatctagcaatttttactttagttacagctatgatttgtcccactcacttcaatataatctcactgtcttgcgaatgcccctggagatgttaaagtcagaaatgacccagaatcgccaagagagctttgacatctttgaagatgaaggattaattacacaaggtggaagcggggtatttgggatctgtagtgagccttatatgaaatatgtatggaatggtgaacttctggatataattaaaagtactgtgcatcgtgactggcttttgtatattattcatgggttctgtgggcagtcaaagctgttgatctatggacgaccagtgtatgtcactctaatagctagaagatccagtaaatttgctggcacccgttttcttaaaagaggtgcaaactgtgagggtgatgttgcaaatgaagtggagactgaacaaatactctgcgatgcttctgtgatgtctttcactgcaggaagttattcttcatatgtacaagttagaggatctgtgcccttatactggtctcaggacatttcaactatgatgcctaaaccacctattacattggatcaggcagatccatttgcacatgtggctgcccttcactttgaccagatgttccagaggtttggctctcccatcatcatcttgaatttagtgaaggaacgagagaaaagaaagcatgaaagaattctgagtgaagaacttgttgctgctgtgacctatctcaaccaatttttgcctcctgagcacactattgtttatattccctgggacatggccaagtataccaaaagcaagctgtgtaatgttcttgatcgactaaatgtgattgcagaaagtgtggtgaagaaaacaggtttctttgtaaaccgccctgattcttactgtagcattttgcggccagatgaaaagtggaatgaactaggaggatgtgtgattcccactggtcgcctgcagactggcatccttcgaaccaactgtgtggactgtttagatcgcaccaacacagcacagtttatggtgggaaaatgtgctctggcctatcagctgtattcactgggactgattgacaaacctaatctacagtttgatacagatgcagttaggttatttgaggaactctatgaagatcatggtgataccctatcccttcagtatggtggttctcaacttgttcatcgtgtgaaaacctacagaaagatagcaccatggacccagcactccaaagacatcatgcaaaccctgtctagatattacagcaatgctttttcagatgccgatagacaagattccattaatctcttcctgggagttttccatcccactgaagggaaacctcatctctgggagctcccaacagatttttatttgcatcacaaaaataccatgagacttttgccaacaagaagaagttatacttactggtggacaccagaggtgataaagcatttaccattgccctatgatgaagttatctgtgctgtgaacttaaagaagttgatagtgaagaaattccacaaatatgaagaagagattgatatccacaatgagttctttcggccatatgagttgagcagctttgatgataccttttgcttggctatgacaagctcagcacgtgactttatgcctaagaccgttggaattgatccaagtccatttactgtgcgtaaaccagatgaaactggaaaatcagtattgggaaacaaaagcaatagagaagaagctgtattacagcggaaaacggcagccagcgccccgccgccccccagcgaggaggctgtgtccagcagctctgaggatgactctgggactgatcgggaagaagagggctctgtgtctcagcgctccactcccgtgaagatgactgatgcaggagacagtgccaaagtgaccgagaatgtggtccaacccatgaaggagctatatggaattaacctctcagatggcctctcagaagaagatttctccatttattcaagatttgttcagctggggcagagtcaacataaacaagacaagaatagccagcagccctgttctaggtgctcagatggagttataaaactaacacccatctcagctttctcgcaagataacatctatgaagttcagcccccaagagtagacagaaaatctacagagatcttccaagcccacatccaggccagccaaggtatcatgcagcccctaggaaaagaggactcctccatgtaccgagagtacatcaggaaccgctacctgtgaaaagagcgcaggtccacctggtggacacgtctgattagcttagaacctgtcttgtctcatcttcaaaaggtaacttattaaaagtcctttgcgtctgaagcctttctccttttctgtcatttgcaaattccaaattatagctaataaagatgactagataac

SEQ ID NO: 112 - DNA, 5975 bp, Homo sapiens
gaaaagttgaacaagattcaaaggagacagtaaaattatcccatgaagatgaccatattcttgaggacgctggatcttctgatatttctagtgatgctgcttgtacaaatccaaataagacagaaaacagccttgtaggtttgcctagttgtgtagatgaagtgactgaatgtaatttggaattgaaggataccatgggtattgctgataaaactgagaacacccttgaaagaaataaaattgaaccgttgggttattgtgaagatgcggagtctaataggcagttggagagcactgagtttaataaatcaaacttagaggtggttgatactagtacttttggaccggaaagtaatatcttggaaaatgctatttgtgatgtgcctgaccaaaattcaaaacagttgaatgctatagaaagtactaaaatagagtcccatgaaacagcaaaccttcaggatgacagaaacagccagtcaagtagcgtttcttacttagagtcaaaaagtgtaaaatccaaacatacaaaacctgtaattcattctaagcaaaacatgaccacagatgctccgaagaaaattgttgcagcaaagtatgaagtaatacatagcaaaactaaagttaatgtcaaaagtgtgaaacgaaatactgatgtaccagaatctcagcaaaattttcataggccagtcaaagtcagaaaaaaacaaattgataaggagccaaagattcagagttgcaattctggggttaaatctgtgaaaaaccaagctcattctgtactgaaaaaaacattacaggatcaaactttagtacaaattttcaagcccttaactcattctttgagtgataagtcacacgctcatcctggttgcttgaaagaacctcatcatcctgcacaaactggacatgtatcacattctagccagaaacagtgtcataagcctcagcaacaggccccagcaatgaaaaccaatagtcacgtgaaggaagagcttgaacacccaggcgttgagcattttaaggaagaggataaactgaaactgaaaaaacctgagaagaacctacaaccccgccaaagaagaagcagcaaaagtttttctttagatgagccaccattgttcattccagataacatagctaccataagaagagaaggctctgatcatagctcctcatttgaaagcaaatatatgtggactcccagcaagcagtgtgggttttgcaaaaaaccacatggcaacaggtttatggttggctgtgggagatgtgatgactggtttcatggtgattgtgttgggttaagtctttctcaagcacagcagatgggcgaggaagacaaagaatatgtctgtgtaaaatgttgtgctgaagaagacaaaaagactgaaatactagatccagatactttggaaaaccaagctacagttgaattccatagtggagataaaacaatggagtgtgaaaagcttggattatcaaaacacacaacaaatgatagaaccaaatatatagatgatacagtgaagcacaaggtcaaaattttaaaacgggagtctggtgaaggcagaaattcatcagactgtagagataatgaaattaaaaaatggcagctagctcctcttcgtaagatgggacaaccagttttacctcggagatcctcagaagaaaaaagtgaaaaaataccgaaagagtctacaactgttacttgcacaggagaaaaagcttcaaaaccaggtactcatgagaagcaagagatgaaaaagaagaaagttgaaaaaggagtgcttaatgtacatcctgctgcttctgcttccaagccttctgcagatcagatcaggcaaagtgtcagacattctctcaaagacattcttatgaagagacttacagactcaaatttgaaggtaccagaggaaaaggcagcaaaagttgccacaaaaattgagaaagagcttttctctttttttcgggacacagatgctaaatataagaacaaatatagaagtttgatgtttaatttgaaagatcctaaaaacaatatattatttaaaaaagtactgaaaggagaagtaactcctgatcatcttatcagaatgagtccagaagaactagcttctaaagagttagctgcttggagacgaagagaaaacagacataccatagaaatgattgagaaagagcagagagaagtggaacgacggccaatcaccaaaataactcataaaggtgaaatagaaattgagagtgatgccccaatgaaagaacaggaagcagccatggagattcaggaaccagccgccaataagtcattggagaagccagaaggatctgaaaaacaaaaagaggaggttgactctatgtctaaagataccactagtcaacacagacagcatctttttgatctcaactgcaaaatctgcataggtcgaatggcaccacctgtagatgatctttctccaaaaaaagtaaaagttgttgtaggagtagctcgcaaacattcagacaatgaagcagaaagtatagcagatgcattatcttcaacctcaaatattttggcttctgaattctttgaggaggagaaacaggagtctccaaagtcaacgttctctcctgctccacgtccagagatgcctggaactgttgaagttgagtctacctttctggctcgattgaacttcatctggaaaggttttatcaacatgccttctgtggcaaaatttgttaccaaagcctatccagtatctggctccccagaatacctgacagaggacctaccagatagtattcaagtaggtggcaggatatcacctcagacagtttgggattatgtggaaaaaataaaagcatcaggaaccaaggaaatttgtgtggttcgcttcacaccagtaactgaagaagatcaaatttcttatactttgctctttgcatacttcagtagcagaaagcgctatggagtagctgctaacaacatgaagcaggttaaagatatgtaccttattcctttgggtgccacagataaaattccacaccctcttgtgccttttgatggacctgggcttgaactgcatagacctaatctattgttgggcttaattattcgtcagaaactgaagcgacagcacagtgcctgtgctagtactagtcatatagctgagactcctgaaagtgcaccaccaatagcattgccacctgataaaaaaagtaaaatagaagtttctacagaagaagcaccagaggaagaaaatgacttttttaattcttttacaactgtattacacaagcagagaaataaacctcagcagaatcttcaggaagaccttccaacagcagttgaacctttaatggaagtcaccaaacaggagccaccaaaacctttaagatttcttcctggcgtgttgattggctgggagaatcaacctactactctggaattagcaaataaacctcttcctgtggatgatatacttcaaagccttttgggcaccactggtcaagtatatgaccaggcccagtcagtgatggaacaaaacactgttaaagaaattccatttttaaatgagcagaccaactcaaaaatagagaaaacagataatgtggaagtaactgatggtgaaaacaaggagataaaagttaaagtagataatatttcagaatctacagataagtcagcagaaatagaaacatcagtagtagggtcctcttccatttctgcagggtctttgacgagtcttagtctcagaggtaagccaccagatgtttctacagaagcatttttaacaaatttatcaattcagtcaaaacaagaggaaactgtggagagtaaagagaaaacattaaaaagacagcttcaggaagatcaagagaataatttgcaagataaccagacttcaaatagttctccatgcagatctaatgtaggaaaaggaaacatagatggtaatgtgagctgtagtgaaaaccttgttgctaatacagcgaggtctccacagtttatcaacctgaaaagggatcctaggcaagcagcaggacgaagtcagcctgtaactacttcagaaagcaaagatggagatagttgccggaatggagaaaaacacatgctgcctggcctgtcacacaacaaggagcacttaacagaacaaatcaatgtagaggaaaagttgtgttctgcagagaaaaactcgtgtgttcagcagagtgacaatttaaaagttgcacaaaactcaccatcagtagaaaacatacagacttctcaagcagaacaagcaaaacccttacaggaggatattttaatgcaaaatattgaaactgtgcacccatttcgaagaggatcagcagtagcgacatctcattttgaagttggaaacacatgtccatcagaatttccttctaaaagcatcacctttacttccagaagcaccagccccagaacaagtacaaacttttcacccatgaggccacagcagcccaaccttcagcatctcaagtctagcccacctggatttccatttccagggcctcctaattttcccccacaaagcatgtttggatttccaccacatttgccacctccattacttccccctccaggctttggctttgctcaaaatcccatggttccctggccacctgttgttcatctcccaggtcagccacagcgtatgatgggtcctctctcacaagcatcaaggtatataggcccgcagaatttttaccaggttaaagacattcggaggccagaaaggcgccatagtgacccttggggtaggcaagaccaacagcaactggataggccatttaataggggtaaaggggaccgccagagattttatagtgattcacaccatttgaaaagagagcgacatgaaaaggaatgggagcaagaatctgaaaggcatagacgcagagacagaagccaagacaaggacagagacagaaaaagcagggaggaagggcacaaagataaagagagggcacggttatcacatggtgatcgaggaacagatggaaaagcaagcagagatagtaggaatgtagacaagaagccagataaacctaaaagtgaagactatgagaaggacaaagaacgagagaaaagtaaacacagagaaggagaaaaggacagggataggtaccacaaagatagggaccacactgacagaactaaaagcaaaaggtaaaatttgcaggctgcttcaggattacatttaaataactgttaaaatgttgtatcttgtaaacaaaagaaagattgcctgctaggattgtgccatctttaaaatttttactattggtcatttgcagaacagtaaattctgtgtgttggtacagagtgctctgtaccagtgctcatcatcccttcttcataccaacggtccctagttataggaatttaatatttttaaaagttttacattgctgtatattcaaagatttgttttattaatatgcaataaaggcttagaaattttagttttattccttaattggtaaatatggttaactatggaatatatttacttcctctagtgaatgtcctttatataatgactaatttgggagtaatgtgtgctctgtaagtttgttttaaattgcactgtttttaaagaaactgtagaggagcaacaaaaatccaagcaacttcataatcagattatgctaatcatttagttgagcagtttttgaccaagaatcagaagcccaaggggtacatttattgctttaatctgcactcattgaagtcatttattaccatatactacagctttgtggtaggccattattttcattttcatttttggctcttcagaaacttgaatacttaagcttgtacatgatcttgtgttttgctatcctttttactgtaaaatgtaaatattttaagggatattttgattctaaatatgataaaataatttctcacctattttgtgtgtgtgacttgaaattcagtagtaaaagaatttcttctttaaagcttt

SEQ ID NO: 113 - DNA, 4408 bp, Homo sapiens
cgcggctggcggcgggcacccctccgccgtggcgtcggcagcagtccccgagcccgcaggctcatgcggcccctttggttgctcctcgcagtgggcgtctttgactgggcaggggcttcggacggcggcggcggagaggctagagccatggacgaggagatcgtgtccgagaagcaagccgaggagagccaccggcaggacagcgccaacctgctcatcttcatcctgctgctcaccctcaccattctcacaatctggctcttcaagcaccgccgggcccgcttcctgcacgaaaccggcctggctatgatttatggtcttttggtgggccttgtgcttcggtatggcattcatgttccgagtgatgtaaataatgtgaccctgagctgtgaagtgcagtcaagtccaactaccttactggttacttttgatccagaagtatttttcaacatattacttcctcctatcatattttatgcaggttatagcctgaaaaggagacatttttttcgaaatcttgggtctatcctagcatacgcttttcttggaacagcaatttcttgtttcgttattgggtcaataatgtatggctgtgtaacgctgatgaaggtaacgggacaacttgcaggagatttttactttacagattgcctactgtttggtgccattgtatcagcaactgatccagtgactgttcttgctatattccacgagcttcaagttgatgttgaactctatgcacttctttttggtgaaagtgtcctcaatgatgctgttgccatagtgctgtcctcctcaatagtggcataccagccagctggagacaacagtcacacctttgatgtcacagcgatgttcaagtctattgggatcttccttggaatcttcagtggatcttttgcaatgggtgctgctactggagtggtgacagctttagtgacaaagttcaccaaattacgggagttccagttgttggagacaggcctgttcttcttgatgtcctggagtaccttcctcttggctgaagcatggggcttcacaggtgtagttgcagtattgttttgtggcatcacacaagcacattatacgtataataatttgtccacggagtctcagcatagaactaaacagttgtttgagcttctcaatttcttggcagagaatttcatcttctcctacatggggctgacactgttcaccttccagaaccatgtctttaacccaacatttgtagtaggagcatttgttgctattttcttgggaagagctgccaatatttaccccttgtccctcttacttaatttgggtagaagaagtaagattggatcaaattttcaacacatgatgatgtttgctggccttcgtggtgcaatggcatttgccttggccattcgagatactgccacttatgcacggcaaatgatgttcagcaccacgcttctgattgtgttttttaccgtgtgggtatttggtggtggcaccactgcaatgctgtcatgcttgcatatcagggttggtgttgattcagaccaagaacacttgggtgttcctgaaaatgaaaggagaactaccaaagcagagagtgcttggcttttccggatgtggtacaactttgatcataactatctgaagcctctgctgacccacagcgggcctccgctgacaacaacactccctgcctgctgtggacccatcgccaggtgcctcaccagcccccaggcttacgaaaaccaggaacagttgaaagatgatgattctgatcttattctcaatgatggtgacatcagtttgacatatggagattctactgtgaacactgaaccggccacatccagcgccccaaggagatttatgggaaacagttctgaagatgccttggatcgggagcttgcatttggggaccatgaactggtcattcgaggaacacgcctggttcttccaatggatgattctgaacccccgctaaatttgttagataatacgagacatggtccagcctaagcttactaatactcacttagtgatttgtaaaatttgcacatgtgattgtgaagaaatttgtactacctaaaagtcccagtgcatgtctctgaatgtgtaagctatataaatgctatttatatggcatagaaagaatataaatatcctgtacacggcagattgtgaacaaactatattcctttaagttttcctggttgcactctgtagactggatctgttttaggaagttactttcacagtgatgttgtgtgttctgttagttttatgtctcagttaaagtgtaaaaagtgacggattttctctttcttaaacttacctgacacttaaccagagtaccagttctcgtgatgtgaattaatttttttgtgtgctaggggagggagagtgaggagggagtgttatttccttgggaacctagggaggagaggttcctttgttgggaaacttttgttgatagctgctgcctttgtcctgatcgttttctttcccttttctctggtggcctgttgtggtgcaacgagctgatggcatttgatcttgccccattcaggttggggagtgaagtgtggggacccttttcccccgcttgctgtgaaagcacagattcattgactacagtacactgttgttcagaaaagaaggctgcaaatgacttctgagactttatgtcttttcttccagaccaagaccgtagaaggagtcacatctagccggcttagccaaagtacaggtgtatatagttcagggcacttgatttagatttggaggggctggggtgggcagagagcaagaggcgagtaaagagaatggtggtttcagagatctctcttcccaaatgtgtaaatattctataccagataagtttaaataagaaatttaattgctgcttaatttttgattatgtactttatctgtatagcaggctttgtcgtcagaagtttttatatcgatttaaattgctgctctttagcagccaaacaggagcaaaatgtaaaatttttgaacttactgtgtctaatcatcatttgttagtctgtagttaatgtcaacagttaatttatgaacccacgatcgttccacactgcaccaaagtcagtcataagagaaatcgaatattctggagcactgattgcagcagggtggctcctttgtgtgcagcaggtgtagtagtcttcattttcatggtacgttttaatattaattacctaagctgccatgcattttttttttacagttctcaaggaagagcacagaacaatttctcatttcatatttggagtatgaaagtagattctattttgtaatgctgataatacctaaagatgcattgaatgcttggaagaatgctttttgatgttgattttgacctgttcatgattcagaagaaaaacaaacttttttggattttttttccctcaggtctgagtagcattgccttaaatcttatccagttagaacattgatttatttacatgatgttcagattttccagtgaaaaatacccttctgaacaaaacatgtacttactctccgaaaggcatctatctgtgctattgcaaacactccttgagattttaggggaattctaatgttgtaccctttcgtggcagctttgactgttggcatagccatttgttatgtagtggtagcgactttcctgctatgcaggaatccctcccatgacgtgtatgttttacatgatgtgtgcctcttcacgcagtaaatagtttcttgttaatgtatgtttgaggagtttgaacgtcagtgtcacttacccacaaagttattcaagttgtaaaaggttataaataatttaacaactaccttttttattctgtcgggttactgacctcactttatgtaaatacttcgcatgacaaattcagtaactcgtctatttcagcatgcataagacttttcactagggaaactgataaagcttgagtcaactaaatctgccttcatactttatcaaggggaaccaagcctgctgtgcttacatcagcatctggaagactttcctctcctctaatctgtgtacacatctccaagcaaggaagaaaaaacaaactctgctcagacgcctatgaaacacctgaatgaactttgatgaagtacagtctgagttaccatcatgcacaagtagaactgctcttggacttgttttcctgttgtttgtggaacctacgcgtttgaatggcttgaacgttgcatcttttaaagttattttttaaggtttcttggcatttatcctagttgtccgtgtttggcaatgtgctgttaaagtaatagacttttaatctttatgtattttttgttttctctggagtacttggacagatgttatagtggtttcttttaggaaaatctgtcattaaaaaagttatagccttgcaaataaccactc

SEQ ID NO: 114 - DNA, 3188 bp, Homo sapiens
  misc_feature (1)..(3188): n=a,t,g or c
attcgcggccgctgcaagaaccagcgcaagagggaagcggagttatagctaccccggccgcggagccggctcactgcactacccccgcccccttctttcctccagacgccgaagtcgcgggcgctcatggcgggcctggaggtactgttcgcatcggcagcgccggccatcacctgcaggcaggacgcgctcgtctgcttcttgcattgggaagtggtgacacacggttactgcggcttgggtgtcggtgaccagccgggtcccaatgataagaagtcagaactgctgccagctgggtggaacaacaataaagacctgtatgtcctccggtatgagtataaggatgggtccagaaagctccttgtgaaagccatcaccgtggagagcagcatgatcctcaatgtgctggaatatggctcacagcaagtggcagacttgaccctgaacttggatgattatattgatgcagaacacctgggtgacttccacaggacctacaagaacagtgaggagcttcggtctcgtattgtgtctggaatcatcacacctatccatgagcagtgggaaaaggctaatgtaagcagtccccaccgggagttcccccctgctaccgccagagaggtggacccactccggattcctccacaccacccacacaccagtcggcagcctccctggtgtgatcccctgggcccgtttgttgtcgggggagaagacttagacccttttgggcctcggagaggtggcatgattgtggatcccctgagatctggcttcccaagagcacttattgacccttcctcaggcctcccgaaccgacttcctccaggcgctgtgcccccaggagctcgctttgacccctttggacccattgggaccagcccacccggacctaacccagaccatctccccccgccgggctacgatgacatgtacctgtgaaggcctcaagaatgtaacatcccaggcttccctccattctcctggagctgccaccgctgtccccatcagcaaccatgttcttgcaggctgggggcaagggattctgctcatgtgtgtggagaccggctgggatagcctccccaccccttatcagagncaagacacctgctggagctctccacctagctggagatagctcccaaagagaaatcagtgtgtctcttncaccatcagctcctccccttacaccaccagctcctctccacttcccangggagactccggcanccttcagcaacatatatcctcgaccagatgcagtgctataagaacagaacgcattttggatgttattattaagaaccaaatgtcaatacagaattcatgttgccggtttcccacttttctttttacattaatgcatagctgcttccatttatgagactttagagtttgagtttctgtagggctgaatgactctttttcctgcccagggcccattcttgcttctcaggcaccttccgtttattaattgccattgctcctgacatcactaagatgggtccccttctggctgcatgaatggaaatgagtgactggaaatcccataggccacaagaatgactttcacaagggcaggaacattgtggaaagactgcatcattctgatgaggcaaaatcctccagctattcctgtctgggccagttttgtaggtccatctgtgcatgggcagcagtagtcacaaagccaagganaaaacagagcagacctgaaggctaatcttatttttgccactaacttagtgantgaccctaagcaagttccttctcctcttagggccttgtgccaagcctatgaaattggaggtgnctttcctgctctaaagcattttgatgtctcattctgtgtttggtaacccctataaactggggcagaggaaaagaatgatggttcaaggccatacttcccttgaaccttgtgtggttcttgcctaactctgtggtttttggaccccatggggcccagacagagcacaggagcatgggctgcctctgagtgtggtgttgaacttcgggaggagcagggagccctgcaccttgtgtcctggcccacctgacctttggtgttctccggatccttttcagcccgaggcctgacagacgcgggcagtgatgagccctgttctggagtggaaagagcacgatagagcaccaggctaagaggcacgagatcaaggcggtagtcacttccgctctgcagctagcatttcaaccatatgtggatcctttcatttctcagctccctggattccttcccctaaattaggacctattatttacctgtaggtaagcaagctactgtagctcttctgaggtatctcccaggctgttttctgtagcctcagantgcctatctncttagcctgagaacaggtagatgnaaactaaactgatgcctaggcccagggtcagtctcagatggaagctgggcctgggtggggaggctagcatgcgtggctccctgggtatttctgtcagtccccatggcaagcagtgatttagtaaaacaccccagagtcagggaagccaaccaccttgaaacctttaggacatctctgctttggagaaagacccagagatcaggcagaggtgcagattcantcattactcataacctttgagagatgtcacntgggnggagtgttagtctttgttttggagntgggccattcttgcaccccccaggacttagagcagtttgntcataaagacatcctttattataaaaggaagtatttataggatgatagagaccatcagatagaagcagggggggtagataacttttaggnccttgatgtgtggagaagataaaatttaaacaataaatttgccacttagattttctancaccacagtccgacgaaagatagttatatacaacattctgttttctgataacaactgtgattcaccttcagaattggccattttttttgtgagtttccttgcatcaaggacactgagaaacacagtcattgtcttaggtgttctatgggaggaagtgaatagagcctttaggaacttcctggtcaagcttatggtgcttattttgatctgggccacttccctccttccagtcatgagtaatcatcaaggagcaagttggagtgtttcaggtgtatattttgtagaacccaaaagattggagccttaacaataaacatcagagcggccgcgaattc

SEQ ID NO: 115 - DNA, 297 bp, Homo sapiens
  misc_feature (1)..(297): n=a,t,g or c
cagctgttcaatatgtttaattttaggtggggctataggagggaggaaagaagggagtgacaggttttctcatttttcaaattattctttggcaaagaacaagttaaacattttactaagactgtatatcaacattttactagacttattttatgaagaatagtgaacgtgtagcaaacttgantttccaaagcgaaacatatggataaaagtgaaggccgggtgcggtggctcacacctgtaatcccagcactttgggatgtcaaggcgggcagactgtttgagctctggagtttg

SEQ ID NO: 116 - DNA, 232 bp, Homo sapiens
gaagcagtattgattctttattgggagtacatttttttaggtctcttaaactttaatttcacacagtaaattttgaatctcataaggaagcatatttgaacctagtcaatttaatcttagtgttcccttgaaaactttttttccctacaaaattttaagtgaaaaatacaatagtaaattaagattacactggggaaaaaaatgcaggtatcactttactccattgttatct

SEQ ID NO: 117 - DNA, 338 bp, Homo sapiens
  misc_feature (1)..(338): n=a,t,g or c
ctataacatcatgctacctagaagaaaaagaaatgaaggtaagcagtcagccaggaaagtcaggaaaaatgatatgctacttgtaaagagctcccctatattgtatcattctgaaatgtccaattttcaaagagtcagagtagtacagaaatgttcaatgttaaatcactactcaacataagcaatctgactttgatggttcacaagctcttccagatcttgtngtgccttaaagttctcactaacaatatcaattatcagtgcactacagatatataggaaaagaaaatcccaggtaacagaaaagccagatcacctgcctccaagatgccgggcac

SEQ ID NO: 118 - DNA, 314 bp, Homo sapiens
  misc_feature (1)..(314): n=a,t,g or c
gccaagcaatcaagcaaaacacaagaccaataganttagtagacagaagccttggggacaatggcagtgcccttnctgagtaagacatgaatgccatctggaggntccatttgaaactacagtgcagtaaccaaagaacctaatgttttcaagcataaaggtactttttgtgaacaggtgggcaacacaggcaggattaactaccttcattctatggacttaaattcctatttctttctagcttccagtagaagactcttgagaatattgttgttgagtgaagtactttccgctgaaatgggaaatgaacccct

SEQ ID NO: 119 - DNA, 389 bp, Homo sapiens
  misc_feature (1)..(389): n=a,t,g or c
tttattattataaatgaaaataccagagttttaaaacggcacttaatcatgtcanannntcagagtcntccaaataaancagattctngaaaanaatnaaacttganacaanggaggcaaaattaacccttgtcagggaaggcattgccataaacgaaaggacccataactgcattaagcagagagggactgactgtcaatgaagcttctctatttgcaatttattcagcaaaagcgaacaatttttaaaaagtctctaatgcaaaatttagttcaagtatcaaaggtctgatcaattttaaaaggcattagttttatttttaataaattgaactggccttagatgaaagatatagttctgttcnctattttatancttatttaccgag

SEQ ID NO: 120 - DNA, 436 bp, Homo sapiens
  misc_feature (1)..(436): n=a,t,g or c
tatgaaagaaaatgtaaacattttatttggcagttgtttctgtacacatgaataaataaatggaaaagtacatattaatatttctttttggagtaacagataccattaaacgcttatttacacatcttcactgcaaagaacagttacacaattaaattttgtcttataaaaggtaacttcccacatcactggnactggnacagttaaggatggagatactggtagtgcttggttctagcagtctcaatgtttgaaaggcattcatttgcaagtgtgataagaagagtcatcatgcattgagttncatccgggtcatgtactgtaggaaaatttctggatgggcagccacagaatttgggtgtctcatggcggcttaaggtccaactatggacatgtttggtaaatcngtgtntttcccttaaaaccggaggncaaa

SEQ ID NO: 121 - DNA, 206 bp, Homo sapiens
tcttctgtaatatgtgtcaaagatattatgaaaaaaagattagaagtcctttcccccatttttagtaatcttgatattatgaaacaagtgagtactaaaacaaaaacaacaataaatatgagcactacagcaaacatgacatactgtaatagaattttattgaaaaaaataacacgtacttactgaagtttttttttttttttttt

SEQ ID NO: 122 - DNA, 416 bp, Homo sapiens
  misc_feature (1)..(416): n=a,t,g or c
acacccagactcagtgacttttatttttcatttccctaaaagtttcccaaatatganttaaattgtcaaggataagaaatggattagccagatagtaacctacctagcgatttctctttcaaaacctttgagcaacctaccagtattattttcaaagcctctaattctacataatttatgcctgataaatttaatttagaagtccaaagtatcacgaagtcattcaactttttttttaagtctcacatgacggcgcagagccctgggcatggggggggaagctgcctgcagagntcgcgggctgtgccccgtgcattccaccggaggccacggagggctttcttcattcctgccttccttcggtcacctctctnttttaaggnaaaagggntaaggttaaatatcacattaccnaa

SEQ ID NO: 123 - DNA, 346 bp, Homo sapiens
catctttaatgcagaggaggagatgggatgtcactcgctgtctggaggcacgtgggtggtgtgcgggccctcactggccagcctctgggtggccccgcctatcccagtatgaacgtagccaactcaagccctctactgtgtctcctcgaggctgatactcacagcccacgaagcctttgtagccttcatcttccagcagttgaaacagataggggaaattcagctctccggggctgctgggctcccctcggcctgggacctgtgccacctgcacatgcccaacaatgggcaggaactcccggatgtttcctgtcaggttcccatccatgatctgccagtgggaata

SEQ ID NO: 124 - DNA, 394 bp, Homo sapiens
  misc_feature (1)..(394): n=a,t,g or c
atncaaattaaaaacatgaaaattacaccaaaaagatggaactacttttgtagcacaactcagaacttctgttcgtaacaccggactagagaagaggtcgcttttggctgaatctaatgaccttagaagggaaaggccattgctgggcaggatctggtggcaacgcacacggaagtcctagaactctatgaagcctacctcaggccctgcgggtgcgtctggagttccaaggcatttgggggaaccaaagcaatttcagctaacagtgaccagtttttaggaatgggagcttatgatcagagggaccataaaccctcatccaccctaggagctcaatgccaggaaaaataaaaaataattncaaaaaataaaggggaaatagctttttgtgcta

SEQ ID NO: 125 - DNA, 411 bp, Homo sapiens
  misc_feature (1)..(411): n=a,t,g or c
tgggtcaaagggggctctgcaggtcgatgatctcctcaaacctgcaaagacatcccatctatgcaactggattggggggtgtcattccaaacaccctcagatcctgcccagatattcatctgtgaacaaggtatttcaacactaattttgaaacaattctacatctagcaggtcagtttatcattttccagaatctgaactactgtcaggatagactcaagtgagattaacacagggttaatcttcaatcttaacacaattatcaattagttctcccagtggaacgattaaggcttttgtcaacatgtaggcatttctgctgtnaacctataagtctncatattaccagttccccgggataggataggntattatgtcaggtcccaaggatagggagtttatgttttccat

SEQ ID NO: 126 - DNA, 387 bp, Homo sapiens
  misc_feature (1)..(387): n=a,t,g or c
tttatttgttctataatttaatagtatacctataaaataattacattatacttatagctttncttcatttataaacaaaacaaaaaaattaaatacaatttgagccattataaggtaaactttgtacatacgataaccccaganggagcttcacactgcaggcatatcatattgctttcattgctacacccacaattgggttcgaagagagtgtgctcgtgtttgcattctgtaagtncttnggcttaatccctcccctatctgtgtggggttccatgttaataaaatgatagggggttgggctttgcaggctgggtcagggggcttctcctccacttcacctcccaatccacccctaggcctccatttacaatcacgnaaatttcc

SEQ ID NO: 127 - DNA, 429 bp, Homo sapiens
cactaatacatacccctaaaagtcctatattgctactttctggatctcagtgaaatttatttccatactgactttctccagtccacagtgtatatgaatatgtacacatacagtgtttattagttgtcagtaaaaattctcatgaaactaaattccccatttatttaaaaggttagaaatgtttagtttgatgctggaaataaaatcattgaagtctatgtacagtaaatactttgaagtatatttttatggaaatcatcttttgggagacaaatgaaagatgtgcattttcctatatgaaataaaagaagtgctcaaggcaccccccaacactgacatggaggcgggtcttggagaccttgtaactggcctcccccacagctcaccccagagctaccataaatcatgtaatactatttatgcctctgg

SEQ ID NO: 128 - DNA, 439 bp, Homo sapiens
atttttgtagttttgggcaaaacattcactgttctgtttcagcatatttccttggaacatcttcatctctttccattttgcggacactccccttcttctattctcctttactcaaaacatatggtttagacccacatcatggctttcttgtgggaagcctggatgggactaggaaaacacatgtttccaacatggtgcatatctgtttgtgcagatatcagacaagatttaatcttgtctaacttatgcgtattgttttgatgtttgcctgtggttattctgggcacagcaatggtggacattattgaaaatgaactttattggcagatgaaagataatagaacatgaagatttatgaactaccataagctctgcatctctgggtcttcatttccaaagcagcacttggaaaaccaagcccagtttcaggcaaagagtt

SEQ ID NO: 129 - DNA, 363 bp, Homo sapiens
gagtgttaaaataattacacttaatattttaatagtgtgctgtgaaatacatagttttttgttttgttttggcaaatgtttcattttgttttaatgacttcggtccaatataaagaaaatgaaatacagtgaatagttcttctttcaagatgagctgtatttattactggaacggaagttgtcatatccgtgatcattagctttgaactttaagcacgactgcttttcctccaaggactgtttttcttcaaatgactggcaccagcagcataaagcatgacttaaagcagtttttgaaacttttgcccacccaatacagagcaattggggttaatgccgggaattccagtgaaagccaggttg

SEQ ID NO: 130 - DNA, 809 bp, Homo sapiens
atgcctgtcttcatcttgaaagaaaagctccaggtcccttctccagccacccagccccaagatggtgatgctgctgctgctgctttccgcactggctggcctcttcggtgcggcagagggacaagcatttcatcttgggaagtgccccaatcctccggtgcaggagaattttgacgtgaataagtatctcggaagatggtacgaaattgagaagatcccaacaacctttgagaatggacgctgcatccaggccaactactcactaatggaaaacggaaagatcaaagtgttaaaccaggagttgagagctgatggaactgtgaatcaaatcgaaggtgaagccaccccagttaacctcacagagcctgccaagctggaagttaagttttcctggtttatgccatcggcaccgtactggatcctggccaccgactatgagaactatgccctcgtgtattcctgtacctgcatcatccaactttttcacgtggattttgcttggatcttggcaagaaaccctaatctccctccagaaacagtggactctctaaaaaatatcctgacttctaataacattgatgtcaagaaaatgacggtcacagaccaggtgaactgccccaagctctcgtaaccaggttctacagggaggctgcacccactccatgttacttctgcttcgctttcccctaccccacccccccccataaagacaaaccaatcaaccacgacaaaggaagttgacctaaacatgtaaccatgccctaccctgttaccttgctagctgcaaaataaacttgttgctgacctgc

SEQ ID NO: 131 - DNA, 3175 bp, Homo sapiens
ggttcctggtcatacaccagtactaccaaggacagcttttttcctgcaagatctgttacctaaagcaataaaaaatggccagaggatcagtgtccgatgaggaaatgatggagctcagagaagcttttgccaaagttgatactgatggcaatggatacatcagcttcaatgagttgaatgacttgttcaaggctgcttgcttgcctttgcctgggtatagagtacgagaaattacagaaaacctgatggctacaggtgatctggaccaagatggaaggatcagctttgatgagtttatcaagattttccatggcctaaaaagcacagatgttgccaagacctttagaaaagcaatcaataagaaggaagggatttgtgcaatcggtggtacttcagagcagtctagcgttggcacccaacactcctattcagaggaagaaaagtatgcctttgtcaactggataaacaaagccctggaaaatgatcctgattgtcggcatgtcatcccaatgaacccaaacacgaatgatctctttaatgctgttggagatggcattgtcctttgtaaaatgatcaacctgtcagtgccagacacaattgatgaaagaacaatcaacaaaaagaagctaacccctttcaccattcaggaaaatctgaacttggctctgaactctgcctcagccatcgggtgccatgtggtcaacataggggctgaggacctgaaggaggggaagccttatctggtcctgggacttctgtggcaagtcatcaagattgggttgtttgctgacattgaactcagcagaaatgaagctctgattgctcttttgagagaaggtgagagcctggaggatttgatgaaactctcccctgaagagctcttgctgaggtgggctaattaccacctggaaaatgcaggctgcaacaaaattggcaacttcagtactgacatcaaggactcaaaagcttattaccacctgcttgagcaggtggctccaaaaggagatgaagaaggtgttcctgctgttgttattgacatgtcaggactgcgggagaaggatgacatccagagggcagaatgcatgctgcagcaggcggagaggctgggctgccggcagtttgtcacagccacagatgttgtccgagggaaccccaagttgaacttggcttttattgccaacctctttaacagataccctgccctgcacaaaccagagaaccaggacattgactggggggctcttgaaggtgagacgagagaagagcggacatttaggaactggatgaactccctgggtgttaaccctcgagtcaatcatttgtacagtgacttatcagatgccctggtcatcttccagctctatgaaaagatcaaagttcctgttgactggaacagagtaaacaaaccgccataccccaaactgggaggcaatatgaagaagcttgagaattgtaactacgcggtagaattggggaagaatcaagcgaagttctccctggttggcatcggtggacaagatctcaatgaaggaaaccgcactctcacactggccttgatttggcagctaatgagaaggtatacactgaatatcctcgaagaaattggtggtggccagaaggtcaatgatgacattattgtcaactgggtgaatgaaacattgagggaagcagagaaaagttcatccatctctagtttcaaggacccgaagattagtacaagtctgcctgttctggacctcatcgatgccatccaaccaggttccattaactatgaccttctgaagacagaaaatctgaatgatgatgagaaactcaacaatgcaaaatatgccatctctatggcccgaaaaattggagcaagagtgtatgccctgccagaagacctggttgaagtgaaccccaaaatggtcatgaccgtgtttgcctgcctcatggggaaaggaatgaagagggtgtgaggccaatggggctgggtgggaggcggtgcactcactcctgactgcccggcacagatgctccagggatgattcaagccattccaaagttcaacttggtgacactctataagattccaaaaagcacatattagtgcagccaagtagcctctcctgtatttaacaaaaagtgcttcattctttgcaggaggcccaacctcctatatataggtttctattcttgatttatttgcttcttcgaaaatctagaggaaaagaaagaagttattttccaggtacccttctcgcttttgccattagccaaggatagaagctgcagtggtattaattttgatataatctttcaaaccagcttgttgtggcttcccttttctttgttcaagatgagggccaggaggggaaacatcacacctgccctaaaccctgttcctggaggtcagcatttgatctgttgcaagcccctctttctgtcccctcttcctaccctgcctcccatgactttgctcctcacacttttggaaccatgccttccgggggggcccatctcttctggcggtccttgtctctgggccacttggagtgtgtgataaatcagtcaagctgttgaagtctcaggagtctctggtagcctgcagaagtaagcctcatcatcagagcctttcctcaaaactggagtcccaaatgtcatcaggttttgttttttttcagccactaagaacccctctgcttttaactctagaatttgggcttggaccagatctaacatcttgaatactctgccctctagagccttcagccttaatggaaggttggatccaaggaggtgtaatggaatcggaatcaagccactcggcaggcatggagctataactaagcatccttagggttctgcctctccaggcattagccctcacattagatctagttactgtggtatggctaatacctgtcaacatttggaggcaatcctaccttgcttttgcttctagagcttagcatatctgattgttgtcaggccatattatcaatgtttacttttttggtactataaaagctttctgccacccctaaactccaggggggacaatatgtgccaatcaatagcacccctactcacatacacacacacctagccagctgtcaagggcagaatgaatctatgctggataagaaatggtggaactgcgttatgaagagctaatttactggacaaagaattc

SEQ ID NO: 132 - DNA, 3890 bp, Homo sapiens
atgaaggtgataagcttattcattttggtgggatttataggagagttccaaagtttttcaagtgcctcctctccagtcaactgccagtgggacttctatgccccttggtcagaatgcaatggctgtaccaagactcagactcgcaggcggtcagttgctgtgtatgggcagtatggaggccagccttgtgttggaaatgcttttgaaacacagtcctgtgaacctacaagaggatgtccaacagaggagggatgtggagagcgtttcaggtgcttttcaggtcagtgcatcagcaaatcattggtttgcaatggggattctgactgtgatgaagacagtgctgatgaagacagatgtgaggactcagaaaggagaccttcctgtgatatcgataaacctcctcctaacatagaacttactggaaatggttacaatgaactcactggccagtttaggaacagagtcatcaataccaaaagttttggtggtcaatgtagaaaggtgtttagtggggatggaaaagatttctacaggctgagtggaaatgtcctgtcctatacattccaggtgaaaataaataatgattttaattatgaattttacaatagtacttggtcttatgtaaaacatacgtcgacagaacacacatcatctagtcggaagcgctccttttttagatcttcatcatcttcttcacgcagttatacttcacataccaatgaaatccataaaggaaagagttaccaactgctggttgttgagaacactgttgaagtggctcagttcattaataacaatccagaatttttacaacttgctgagccattctggaaggagctttcccacctcccctctctgtatgactacagtgcctaccgaagattaatcgaccagtacgggacacattatctgcaatctgggtcgttaggaggagaatacagagttctattttatgtggactcagaaaaattaaaacaaaatgattttaattcagtcgaagaaaagaaatgtaaatcctcaggttggcattttgtcgttaaattttcaagtcatggatgcaaggaactggaaaacgctttaaaagctgcttcaggaacccagaacaatgtattgcgaggagaaccgttcatcagagggggaggtgcaggcttcatatctggccttagttacctagagctggacaatcctgctggaaacaaaaggcgatattctgcctgggcagaatctgtgactaatcttcctcaagtcataaaacaaaagctgacacctttatatgagctggtaaaggaagtaccttgtgcctctgtgaaaaaactatacctgaaatgggctcttgaagagtatctggatgaatttgacccctgtcattgccggccttgtcaaaatggtggtttggctactgttgaggggacccattgtctgtgccattgcaaaccgtacacatttggtgcggcgtgtgagcaaggagtcctcgtagggaatcaagcaggaggggttgatggaggttggagttgctggtcctcttggagcccctgtgtccaagggaagaaaacaagaagccgtgaatgcaataacccacctcccagtgggggtgggagatcctgcgttggagaaacgacagaaagcacacaatgcgaagatgaggagctggagcacttgaggttgcttgaaccacattgctttcctttgtctttggttccaacagaattctgtccatcacctcctgccttgaaagatggatttgttcaagatgaaggtccaatgtttcctgtggggaaaaatgtagtgtacacttgcaatgaaggatactctcttattggaaacccagtggccagatgtggagaagatttacggtggcttgttggggaaatgcattgtcagaaaattgcctgtgttctacctgtactgatggatggcatacagagtcacccccaaaaacctttctacacagttggtgagaaggtgactgtttcctgttcaggtggcatgtccttagaaggtccttcagcatttctctgtggctccagccttaagtggagtcctgagatgaagaatgcccgctgtgtacaaaaagaaaatccgttaacacaggcagtgcctaaatgtcagcgctgggagaaactgcagaattcaagatgtgtttgtaaaatgccctacgaatgtggaccttccttggatgtatgtgctcaagatgagagaagcaaaaggatactgcctctgacagtttgcaagatgcatgttctccactgtcagggtagaaattacacccttactggtagggacagctgtactctgcctgcctcagctgagaaagcttgtggtgcctgcccactgtggggaaaatgtgatgctgagagcagcaaatgtgtctgccgagaagcatcggagtgcgaggaagaagggtttagcatttgtgtggaagtgaacggcaaggagcagacgatgtctgagtgtgaggcgggcgctctgagatgcagagggcagagcatctctgtcaccagcataaggccttgtgctgcggaaacccagtaggctcctggaggccatggtcagcttgcttggaatccagcaggcagctggggctgagtgaaaacatctgcacaactgggcactggacagcttttccttcttctccagtgtctaccttcctcctcaactcccagccatctgtataaacacaatcctttgttctcccaaatctgaatcgaattactcttttgcctcctttttaatgtcagtaaggatatgagcctttgcacaggctggctgcgtgttcttgaaataggtgttaccttctctgggccttggttttttaaaatctgtaaaattagaggattgcactagagaaacttgaatgctccattcaggcctatcattttattaagtatgattgacacagcccatgggccagaacacactctacaaaatgactaggataacagaaagaacgtgatctcctgattagagagggtggttttcctcaatggaaccaaatataaagaggacttgaacaaaaatgacagatacaaactatttctatcctgagtagtaatctcacacttcatcctatagagtcaaccaccacagataggaattccttattctttttttaatttttttaagacagagtctcactttgttgcccaggctggagcgcagtggggtgatctcatctccctgcaacctccgcctcctgggttgaagcgattcttgtgcctcagcttcccaagcagctgggattacaggtgcccgccaccacgcccagctaatttttgcatttttagtagagatgggtttcaccatgttggccatgctcgtctccaactcctgacctcaggtaatccgtctgccttggcctcccaaatgctgggattacagacatgaaccaccacgcctggctggaatacttactcttgtcgggagattgaaccactaaaatgttagagcagaattcattatgctgtggtcacaggggtgtcttgtctgagaacaaatacaattcagtcttctctttggggttttagtatgtgtcaaacataggactggaagtttgcccctgttcttttttcttttgaaagaacatcagttcatgcctgaggcatgagtgactgtgcatttgagatagttttccctattctgtggatacagtcccagagttttcagggagtacacaggtagattagtttgaagcattgaccttttatttattccttatttctctttcatcaaaacaaaacagcagctgtgggaggagaaatgagagggcttaaatgaaatttaaaataagctatattatacaaatactatctctgtattgttctgaccctggtaaatatatttcaaaacttcagatgacaaggattagaacactcattaagatgctattcttc

SEQ ID NO: 133 - DNA, 4398 bp, Homo sapiens
ggccaaaggtcaagatacttctctgggaaatgttgctgctgatgctgctttacaaagtcatacaatgagtgtttggtttaagaaagattttcatacttaaaagattttcatcttggaaatacatcaagtgaaaattaaattcttttgggaaacattttccttctgatatattatacttgtaatgggcgacatggcaaacaactcagttgcttacagtggtgtgaaaaactctttgaaggaagctaatcatgatggagactttggaattacgctcgcagagctgcgggctctcatggagctcaggtccacagatgcattacgaaaaatacaggaaagctatggagatgtctatggaatttgcaccaaattgaaaacatctcccaatgaaggtttaagtggaaaccctgcagatttagaaagaagagaagcagtgtttggaaagaattttatacctcctaaaaagccaaaaacctttcttcaattagtatgggaagcattacaagatgtcactttaattatattagaaattgcagccatagtatcattgggcctttctttttatcagcctccagaaggggataatgcactttgtggagaagtttctgttggggaggaagaaggtgaaggtgaaactgggtggattgaaggagctgcaatcctcttgtctgtagtgtgtgtggtgttagtaacagctttcaatgactggagtaaggagaaacagtttagaggtttgcagagccgaattgaacaagaacagaagttcactgtcatcaggggtggtcaggtcattcagatacctgtagctgacattactgttggagatattgctcaagtgaaatatggtgatcttcttccagctgacggcatacttattcaaggcaacgatcttaaaattgatgaaagctcattgactggtgaatcagatcatgttaaaaagtctttagataaggatcccttacttctatcaggtactcatgtaagggaaggctctggaagaatggtagttacagctgtaggtgtaaattctcaaactggaattatctttaccttacttggagctggaggtgaagaggaagagaagaaagatgagaagaaaaaggaaaagaaaaataagaaacaagatggagctattgagaatcgcaacaaagcaaaagcccaggatggtgcagccatggaaatgcagccattgaagagtgaagaaggtggagatggtgatgaaaaagataaaaagaaagcaaatttgccaaaaaaggaaaaatctgttttacaagggaaacttacaaaactggctgttcagattggcaaagcaggtctgttgatgtctgccatcacagttatcattctagtattatattttgtcattgacaccttctgggttcagaaaagaccatggcttgctgagtgcacaccaatttatatacaatactttgtgaagttcttcattattggagttacagttttagtggtcgcagtgccagaaggtcttccacttgcagtcacgatctcactggcttattcagtcaaaaaaatgatgaaagataataacttagtaaggcatctggatgcttgtgaaaccatgggaaatgctacagctatttgttcagataaaacaggaactttgacaatgaacagaatgacagtcgttcaagcttacataaatgaaaaacattataaaaaggttcctgaaccagaagctattccaccaaatattttgtcctatcttgtaacaggaatttctgtgaattgtgcttatacatcaaaaatattgccaccagagaaagagggtggattacctcgtcacgttggtaataaaactgaatgtgccttgttgggacttcttttggatttaaaacgggattatcaggatgttagaaatgaaataccagaagaagcactgtacaaagtctacaccttcaattctgttaggaagtccatgagtactgtcctgaaaaattcagatggaagttatcgaatattcagcaagggtgcatctgagataattctgaaaaagtgtttcaaaatcttgagtgctaatggtgaggcaaaagtattcagaccaagggaccgtgatgatattgtaaaaactgtgattgaaccgatggcatcagaaggcttgagaaccatatgtcttgcattcagagattttccagcaggagaaccagaaccagagtgggataatgaaaatgatattgtcaccggccttacatgcattgctgttgtggggattgaagatcctgtgagacctgaggtgccagatgcaattaaaaagtgtcagagggctggaattactgtgcggatggtcactggtgataatattaatactgctcgggccattgctaccaaatgtggtattttacatcctggggaagattttctgtgcctagaaggtaaagattttaacagaagaatacgaaatgaaaaaggagagattgagcaagagaggatagacaagatttggccaaaacttcgagtacttgcaagatcatctcctactgataagcatacactggttaaaggtataattgacagcactgtctcagaccaacgccaggttgtagctgtaactggtgatggtacaaatgatggcccagcactaaagaaagcagatgttggatttgcaatgggtattgctggaactgatgtagctaaagaagcatccgatattattctcacagatgacaactttacaagcattgttaaagcagttatgtggggacgaaatgtctatgacagcatctcaaaattccttcagttccaacttactgttaatgtagtagcagtgattgttgcttttacgggcgcctgcattactcaagactcaccgcttaaggctgtgcagatgctgtgggtaaacctcataatggatacactcgcttccctggctctggcaacggaaccacccactgagtctctcttgcttcggaaaccttatggtagaaataagcctctcatctcacgtacaatgatgaagaatattttgggtcatgcattctatcaacttgtagtagtctttacactcttatttgctggagaaaagttttttgacattgatagtggaagaaatgctcctttgcatgctcctccttcagaacattatactattgtttttaatacctttgtgctgatgcaacttttcaacgaaataaatgcccggaaaattcatggtgaaagaaatgtattcgaaggaatctttaacaatgccatcttctgcacaattgttttaggcacttttgtggtacagataataattgtgcagtttggtggaaaacctttcagttgttcagaactttcaatagaacagtggctatggtcaatattcctaggaatgggaacattactctggggccagcttatttcaacaattccaactagccgtttaaaattcctcaaagaagctggtcatggaacacaaaaggaagaaatacctgaggaggaattagcagaggatgttgaagagattgatcacgctgaaagggagttgcggcgtggccaaatcttgtggtttagaggtctgaacagaatccaaacacagattcgagtggtgaatgcatttcgtagttctttatatgaagggttagaaaaaccggaatcaagaagttcgattcacaactttatgacacatcctgagtttaggatagaagattcagagcctcatatcccccttattgatgacactgatgccgaagatgatgctcctacaaaacgtaactccagtcctccaccctctcccaacaaaaataacaatgctgttgacagtggaattcaccttacaatagaaatgaacaagtctgctacctcttcatccccaggaagcccactacatagtttggaaacatcactctgattgtaagctgaatgttaacacactagctgcattgtaaagaaacaaattgaaactgggtcttttcacatattgtgatggacaagctagtattcttgtctttggacttcaacagaagacacacttgtacgaatgtagatttatttttttaaaaaaaaaaaagcaaagctttctgccagactgagggtgctttttggggggtgggagaaatgaactgacagataaacagtaactcagcgtaagtgacctgtggatcatcagtagtacccaagcatggtcctgaacagtgtattagcagagctttagtttatctcagtcctggatgggagagagagggaggagtaaaactgggcaagacaaagagccctggatcgttgaattgatagtttaatttctgctgttggctgttaataatttggattatttatgtttataaatgatacagatctgtttacaaggtttgtagatactttttttgttcctgttcatagatgggaagcttccttataactgatgcagagaaaaattagtccttcaaatactgctgtattttcagg

SEQ ID NO: 134 - DNA, 5768 bp, Homo sapiens
tctacttatattcaatccacagggctacacctagttcttggtacacagtacatgctcagcaagagtctgttgaatgaacacatacatggtttatctgtttgtctcttccgagttcttgacttctgtctgctctgacctctggcagctttccactagtttctagctttcattctgcttacctggatttcggaactctagcctgccccactcttagataaacgcatgccctctgtggccctggaaccttagtgacttctgctataccaaagtctccacgcccagggtgacacgcagctgcagctccgtaaacctctaacatgatgtcagcaaatattaaaaaaaaaaagtttataaaaacaatgaataaactttgttaaaggtacaaatgaaaattagcaaacatgggaagataattgagtaaagagtttaaagttaaaaacgaattgcagtcattctaggggaaggaacagttgtatttgaaaacctgtatggttacatgaactgcctaaaaaacaagctaaggaaaattaaagctcagatttatatattttaagaaattaattgcaattaatttcctgggattaaatagcatttcctcaaccccagctgtcattaaaaagaggcaaatacagccaaggactggatcttctccggaaggctgacagcactgaccctcaagaaggcaccggctgacagacagaacattctgccctaatatgtgctgaaattccgctgagagcagagtggtacattgaaccctttaggggcttacaaaagaagtgtcctgtgttttagagtcacagagttttgcagaaacaagtatgaattcacctagtggccccctgcaccaggtctttcctgtgggcactgagtgcagacacatcaatatgtaatagcagaatgaatgactgaacgaacgattgaatgaaaagaaatgagaggcagcaggttgtcagattctatgaggcaatcacagcatcaggtgaccttagtatctatttgagaggactgccatttattctcgggagcgcacggctctaaagaggcccatatccaggcagtgagctctggtggggggcgcctttagatgcaagaaggaggaaacagctcgaaatccctgggcctgagcgcggcccgtgcaggccggagggtcaagaactctccaccggcggcagcggcccggtgtctgccccggcttcgccccggcctaaggctgcctgtgctataaatacgcggcccacatgccgcggtgacacggtgttccctgggctcggcgggacagataacatgaatgtgccctttaaacgtcccaagttgcagggacagcccccggcccagcctcgctcccggaagcgccttcgcccccgatgccctctgcagctgggaggagggggcgccccgcacctgcccagccaatgcgcggcgcgagcgccggccgcgacccgcctcctctcgcgagagcccggcggggatataagggggagctgcgggccaggcggcggccccctagcgtcgcgcagggtcggggactgcgcgcggtgccaggccgggcgtgggcgagagcacgaacgggctgcctgcgggctgagagcgtcgagctgtcaccatgggtgatcacgcttggagcttcctaaaggacttcctggccgggggcgtcgccgctgccgtctccaagaccgcggtcgcccccatcgagagggtcaaactgctgctgcaggtgaggaccgcgcggtgcaagaggcgggcgcgggcgcggcgggccgggcggggcgcgcgatgcggcgcgagctgcagggcgcggggcgccgcggaaaatctgcgccaggccacaggcccgggcgcccgcccgcccgcgggggaagaaggtgccctctgcgtagagacaggtccagcgtcagtcgcagattcctggtgtcgggtggcgcccggcgttcgggtgtctatatatggaaacccacccggagccggtttacgtgtgccagatcctgcgcccgtgacagcacgggcgtgcactcaggcccggaggcacctagtgattgccagtatttttggcaccgtcttatgcgcacgcacctttacaataaaaacatcaaaataatcatcacccaagaattcccttatcgtatctcatgcacaatgctgtatgtaggctgacgccttcatctttatgtaacctctgtgagagagttattcttctccattttacagatgaagctgaggttttgaaatattaagaaacaattttcggaataaactcagatcatcctgtctccaaatcttttcctcccctacctggtcgctgaatggtttatcatcctctcgtgttttcctccacctgcccaaaaggtcagggcccctcaatgaggaagagcccaatttgggagtcagaattactaacaacaaaacccccacaaattgctcacaacggcagcaaacccttaataattgattacttggattatctgcttgaaaactttggaggcctaatgtttagtggatttattctccttcctctattagagcatctagtagagatcctcatctccagggtgatcagagtgacactgagaaattgtcattttttggccatcatgtctattaaatccaaagccctttgaagcagggagtgttactcatttctgtcccccagtaagcccctcatacagttctcaaacctagggaaagtgaaataaataaatggctatagctttatataattcaatcaccttttcagtttatttggggcaatacctttccctcaaataccctaataattgaagcaacattggattattttggcttgttatccagtaactaacatggataacagtatccatttacacgtcctcgtatccatttgatttcctcatcctttttttcttcaaaaaaaaaatctaggaagtgcaaaccttttttttttctcctgtcctcttcccttctctctaccctgcctgtcctctgtcacccaccctcccctccaccaggtccagcatgccagcaaacagatcagtgctgagaagcagtacaaagggatcattgattgtgtggtgagaatccctaaggagcagggcttcctctccttctggaggggtaacctggccaacgtgatccgttacttccccacccaagctctcaacttcgccttcaaggacaagtacaagcagctcttcttagggggtgtggatcggcataagcagttctggcgctactttgctggtaacctggcgtccggtggggccgctggggccacctccctttgctttgtctacccgctggactttgctaggaccaggttggctgctgatgtgggcaagggcgccgcccagcgtgagttccatggtctgggcgactgtatcatcaagatcttcaagtctgatggcctgagggggctctaccagggtttcaacgtctctgtccaaggcatcattatctatagagctgcctacttcggagtctatgatactgccaagggtgagagaggggcatcggggagaaggagggtggtgtggaaagaggatcctatgggatctataactcacaaaggacctgatatatattgatcttgttttttctagtctctgggataattgaggcttctgaatgaggaggtgatgtgcataagttaatagctgaagcgttccttgtgtcctctactgaaataaactctggcctttagttattcagagaggaggaggggggagcctgtctccctctagacacagccatagcagttactgagtttaacttgaagccacttccaatgccctgtatacaagctgagcactgcccctccggggtccggagagggcagcagccacctttgctgtctgcctggtcatatgtgaagcacctgcacaggggcaggttccccgcaaggtcagagcatggagctggaggtgcagtggcctctctccctccacctgctttctgctgagaacaggcacttcatagccgttcggcttctgggctctgtccacagggatgctgcctgaccccaagaacgtgcacatttttgtgagctggatgattgcccagagtgtgacggcagtcgcagggctggtgtcctacccctttgacactgttcgtcgtagaatgatgatgcagtccggccggaaagggggtaagcttgtgctctactcatctaaacttgtttggttttgcccgaggagaacattttacagggctcctttcagtcttccttactggaaattaattttcaaaattatttgataaggacttagggaagaaagatggtattaattccccctaacgttctcaactatcctattagggaaaagtattttccattttattagagatgataagaacatgaatagtaagacatttagatgtgaatttaactaggtatccagcattatagagaccctaggccctcttcccttagagcctgggtgcaaaagctagggaaaagaagtagttagctacttcttacaaagaactcttgcttccctcctagttacaggtgttagtgggatggggtgtttagctgggtagagatggcctgaagcaatctgttgtgccagagaaagttttggcttctataggttgaaccatatgaaattgccactttaaaagtcaaaaacagtccaatgttagcagtttcgtatgtttcaacgaatagttacagccttttatttagactgcataacctcgtgcaggatcatctgaggctcagcctcagttcggtcctccataaaaaaaggtaaccgcgtagcataatactcctgctccactgcgcccttcttgtttcgcagttgggcagtccatgaattacttggttaattgccccagttcttcactgaccttgaactaatggagtaggaatgacaggagacccagcctgccagtgaagcaaggaaggagatgtccagtgggatgttgcatggagctgggactccatgcccagatgaccctgattttataaaactggtaacagtgtgtacagatatgtttcaggggaaaagtctctttcctccagcgttacggagccctcaccagcatttgtttccacagccgatattatgtacacggggacagttgactgctggaggaagattgcaaaagacgaaggagccaaggccttcttcaaaggtgcctggtccaatgtgctgagaggcatgggcggtgcttttgtattggtgttgtatgatgagatcaaaaaatatgtctaatgtaattaaaacacaagttcacagatttacatgaacttgatctacaagttcacagatccattgtgtggtttaatagactattcctaggggaagtaaaaagatctgggataaaaccagactgaaggaatacctcagaagagatgcttcattgagtgttcattaaaccacacatgtattttgtatttattttacatttaaattcccacagcaaatagaaaataatttatcatacttgtacaattaactgaagaattgataataactgaatgtgaaacatcaataaagaccacttaatgcacgctttctattttattgaactcttattaactgtaaaatgcatttttaaaagatcaaaaatgcatattttctagcatgattcatgtatcagtcagcagccaagcttctaaatgccagatattatattgagaatgtattatatgagaacgtacaatgcttaaagttccggttttcaaacttaggcaggtcatattctatctatcttatccagcgttactgtaggctagaaagtgataatggctttcataatcctgccttgtcttaggcactttcctgcag

SEQ ID NO: 135 - DNA, 2865 bp, Homo sapiens
ccagcggccgccgacgctaggaggccgcgctccgcccccgctaccatgaggccccggaaagccttcctgctcctgctgctcttggggctggtgcagctgctggccgtggcgggtgccgagggcccggacgaggattcttctaacagagaaaatgccattgaggatgaagaggaggaggaggaggaagatgatgatgaggaagaagacgacttggaagttaaggaagaaaatggagtcttggtcctaaatgatgcaaactttgataattttgtggctgacaaagacacagtgctgctggagttttatgctccatggtgtggacattgcaagcagtttgctccggaatatgaaaaaattgccaacatattaaaggataaagatcctcccattcctgttgccaagatcgatgcaacctcagcgtctgtgctggccagcaggtttgatgtgagtggctaccccaccatcaagatccttaagaaggggcaggctgtagactacgagggctccagaacccaggaagaaattgttgccaaggtcagagaagtctcccagcccgactggacgcctccaccagaagtcacgcttgtgttgaccaaagagaactttgatgaagttgtgaatgatgcagatatcattctggtggagttttatgccccatggtgtggacactgcaagaaacttgcccccgagtatgagaaggccgccaaggagctcagcaagcgttctcctccaattcccctggcaaaggtcgacgccaccgcagaaacagacctggccaagaggtttgatgtctctggctatcccaccctgaaaattttccgcaaaggaaggccttatgactacaacggcccacgagaaaaatatggaatcgttgattacatgatcgagcagtccgggcctccctccaaggagattctgaccctgaagcaggtccaggagttcctgaaggatggagacgatgtcatcatcatcggggtctttaagggggagagtgacccagcctaccagcaataccaggatgccgctaacaacctgagagaagattacaaatttcaccacactttcagcacagaaatagcaaagttcttgaaagtctcccaggggcagttggttgtaatgcagcctgagaaattccagtccaagtatgagccccggagccacatgatggacgtccagggctccacccaggactcggccatcaaggacttcgtgctgaagtacgccctgcccctggttggccaccgcaaggtgtcaaacgatgctaagcgctacaccaggcgccccctggtggtcgtctactacagtgtggacttcagctttgattacagagctgcaactcagttttggcggagcaaagtcctagaggtggccaaggacttccctgagtacacctttgccattgcggacgaagaggactatgctggggaggtgaaggacctggggctcagcgagagtggggaggatgtcaatgccgccatcctggacgagagtgggaagaagttcgccatggagccagaggagtttgactctgacaccctccgcgagtttgtcactgctttcaaaaaaggaaaactgaagccagtcatcaaatcccagccagtgcccaagaacaacaagggacccgtcaaggtcgtggtgggaaagacctttgactccattgtgatggaccccaagaaggacgtcctcatcgagttctacgcgccatggtgcgggcactgcaagcagctagagcccgtgtacaacagcctggccaagaagtacaagggccaaaagggcctggtcatcgccaagatggacgccactgccaacgacgtccccagcgaccgctataaggtggagggcttccccaccatctacttcgcccccagtggggacaaaaagaacccagttaaatttgagggtggagacagagatctggagcatttgagcaagtttatagaagaacatgccacaaaactgagcaggaccaaggaagagctttgaaggcctgaggtctgcggaaggtgggaggaggcagacgccctgcgtggcccatggtcggggcgtccaccggaggccggcaacaaacgacagtatctcggattcctttttttttttttttaattttttatactttgttgtttcacttcatgctctgaatactgaataaccatgaatgactgaatagtttagtccagatttttacagaggatacatctatttttatcattatttggggtttgaaaaatttttttttacaccttctaatttctttatttctcaaagcagataattcttctgtgtgaaaatgttttctttttttaatttaaggtttaaaattccttttccaaatcatgttgattttgctctttaaaaaaaaaaaaaaaaaaaaaaaaaaaaaaaaaaaaagaagggctgggaccaaccgggtgagatccacaagtctctggatgtggctgaaggcaaatacacaattgaagtactttctgttttgaagtgctttcccttttgaatctggtttgaaacatgcagcttctgtctctagcccaaggaaagaccaaaacatagggaaataaaagcatttatctttgtcttggaagtaattgttgaagttgtgcagttgatcagtgcacagttagctgcaatgtttatagaaattgattgttaaaccaaatttacactggcatgtgtggtgtagtttctaaaaggcacttcacatttgaaatttttcttaccttagaaagtttctagtgatctaaatgtctagttttgtattcttttgtgtgtgttcactgtttctcagtattaccacttgaataattctctgtacaggggggtttgtgctatacactgggatgtctaattgcagcaataaagcctttcttt

SEQ ID NO: 136 - DNA, 2625 bp, Homo sapiens
tcaggagaacctcagtctgacgacattgaagctagccgaatgaagcgagcagctgcaaagcatctaatagaacgctactaccaccagttaactgagggctgtggaaatgaagcctgcacgaatgagttttgtgcttcctgtccaacttttcttcgtatggataataatgcagcagctattaaagccctcgagctttataagattaatgcaaaactctgtgatcctcatccctccaagaaaggagcaagctcagcttaccttgagaactcgaaaggtgcccccaacaactcctgctctgagataaaaatgaacaagaaaggcgctagaattgattttaaagatgtgacttacttaacagaagagaaggtatatgaaattcttgaattatgtagagaaagagaggattattcccctttaatccgtgttattggaagagttttttctagtgctgaggcattggtacagagcttccggaaagttaaacaacacaccaaggaagaactgaaatctcttcaagcaaaagatgaagacaaagatgaagatgaaaaggaaaaagctgcatgttctgctgctgctatggaagaagactcagaagcatcttcctcaaggataggtgatagctcacagggagacaacaatttgcaaaaattaggccctgatgatgtgtctgtggatattgatgccattagaagggtctacaccagattgctctctaatgaaaaaattgaaactgcctttctcaatgcacttgtatatttgtcacctaacgtggaatgtgacttgacgtatcacaatgtatactctcgagatcctaattatctgaatttgttcattatcggaatggagaatagaaatctccacagtcctgaatatctggaaatggctttgccattattttgcaaagcgatgagcaagctaccccttgcagcccaaggaaaactgatcagactgtggtctaaatacaatgcagaccagattcggagaatgatggagacatttcagcaacttattacttataaagtcataagcaatgaatttaacagtcgaaatctagtgaatgaatttaacagtcgaaatctagtgaatgatgatgatgccattgttgctgcttcgaagtgcttgaaaatggtttactatgcaaatgtagtgggaggggaagtggacacaaatcacaatgaagaagatgatgaagagcccatccctgagtccagcgagctgacacttcaggaacttttgggagaagaaagaagaaacaagaaaggtcttcgagtggaccccctggaaactgaacttggtgttaaaaccctggattgtcgaaaaccacttatcccttttgaagagtttattaatgaaccactgaatgaggttctagaaatggataaagattatacttttttcaaagtagaaacagagaacaaattctcttttatgacatgtccctttatattgaatgctgtcacaaagaatttgggattatattatgacaatagaattcgcatgtacagtgaacgaagaatcactgttctctacagcttagttcaaggacagcagttgaatccatatttgagactcaaagttagacgtgaccatatcatagatgatgcacttgtccggctagagatgatcgctatggaaaatcctgcagacttgaagaagcagttgtatgtggaatttgaaggagaacaaggagttgatgagggaggtgtttccaaagaattttttcagctggttgtggaggaaatcttcaatccagatattggtatgttcacatacgatgaatctacaaaattgttttggtttaatccatcttcttttgaaacagagggtcagtttactctgattggcatagtactgggtctggctatttacaataactgtatactggatgtacattttcccatggttgtctacaggaagctaatggggaaaaaaggacttttcgtcgacttgggagactctcacccagttctatatcagagtttaaaagatttattggagtatgttgggaatgtggaagatgacatgatgatcactttccagatatcacagacaaatctttttggtaacccaatgatgtatgatctaaaggaaaatggtgataaaattccaattacaaatgaaaacaggaaggaatttgtcaatctttattctgactacattctcaataaatcagtagaaaaacagttcaaggcttttcggagaggttttcatatggtgaccaatgaatctcccttaaagtacttattcagaccagaagaaattgaattgcttatatgtggaagccgcaatctagatttccaagcactagaagaaactacagaatatgacggtggctataccagggactctgttctgattagggagttctgggaaatcgttcattcatttacagatgaacagaaaagactcttcttgcagtttacaacgggcacagacagagcacctgtgggaggactaggaaaattaaagatgattatagccaaaaatggcccagacacagaaaggttacctacatctcatacttgctttaatgtgcttttacttccggaatactcaagcaaagaaaaacttaaagagagattgttgaaggccatcacgtatgccaaaggatttggcatgctgtaa

SEQ ID NO: 137 - DNA, 1966 bp, Homo sapiens
tctttcttcatccccgcattcccaatatacccaggccacaagagccgagaactgtcgcccttccacgatgtggctccgtgcctttatcctggccactctctctgcttccgcggcttgggggcatccgtcctcgccacctgtggtggacaccgtgcatggcaaagtgctggggaagttcgtcagcttagaaggatttgcacagcctgtggccattttcctgggaatcccttttggcaagccgcctcttggacccctgaggtttactccaccgcagcctgcagaaccatggagctttgtgaagaatgccacctcgtaccctcctatgtgcacccaagatcccaaggcggggcagttactctcagagctatttacaaaccgaaaggagaacattcctctcaagctttctgaagactgtctttacctcaatatttacactcctgctgacttgaccaagaaaaacaggctgccggtgatggtgtggatccacggaggggggctgatggtgggtgcggcatcaacctatgatgggctggcccttgctgcccatgaaaacgtggtggtggtgaccattcaatatcgcctgggcatctggggattcttcagcacaggggatgaacacagccgggggaactggggtcacctggaccaggtggctgccctgcgctgggtccaggacaacattgccagctttggagggaacccaggctctgtgaccatctttggagagtcagcgggaggagaaagtgtctctgttcttgttttgtctccattggccaagaacctcttccaccgggccatttctgagagtggcgtggccctcacttctgttctggtgaagaaaggtgatgtcaagcccttggctgagcaaattgctatcactgctgggtgcaaaaccaccacctctgctgtcatggttcactgcctgcgacagaagacggaagaggagctcttggagacgacattgaaaatgaaattcttatctctggacttacagggagaccccagagagagtcaaccccttctgggcactgtgattgatgggatgctgctgctgaaaacacctgaagagcttcaagctgaaaggaatttccacactgtcccctacatggtcggaattaacaagcaggagtttggctggttgattccaatgttgatgagctatccactctccgaagggcaactggaccagaagacagccatgtcactcctgtggaagtcctatccccttgtttgcattgctaaggaactgattccagaagccactgagaaatacttaggaggaacagacgacactgtcaaaaagaaagacctgttcctggacttgatagcagatgtgatgtttggtgtcccatctgtgattgtggcccggaaccacagagatgctggagcacccacctacatgtatgagtttcagtaccgtccaagcttctcatcagacatgaaacccaagacggtgataggagaccacggggatgagctcttctccgtctttggggccccatttttaaaagagggtgcctcagaagaggagatcagacttagcaagatggtgatgaaattctgggccaactttgctcgcaatggaaaccccaatggggaagggctgccccactggccagagtacaaccagaaggaagggtatctgcagattggtgccaacacccaggcgggccagaagctgaaggacaaagaagtagctttctggaccaacctctttgccaagaaggcagtggagaagccaccccagacagaacacatagagctgtgaatgaagatccagccggccttgggagcctggaggagcaaagactggggtcttttgcgaaagggattgcaggttcagaaggcatcttaccatggctggggaattgtctggtggtggggggcaggggacagaggccatgaaggagcaagttttgtatttgtgacctcagctttgggaataaaggatcttttgaaggccaca

SEQ ID NO: 138 - DNA, 1792 bp, Homo sapiens
gaattccatatcatggcctgccgccgccgccgccgccgccggagctctgtagtatggcatcgaggagaatggagaccaaacctgtgataacctgtctcaaaaccctcctcatcatctactccttcgtcttctggatcactggggtgatcctgctggctgttggagtctggggcaaacttactctgggcacctatatctcccttattgccgagaactccacaaatgctccctatgtgctcatcggaactggcaccactattgttgtctttggcctgtttggatgctttgctacatgtcgtggtagcccatggatgctgaaactgtatgccatgtttctgtccctggtgttcctggctgagctcgtagctggcatttcagggtttgtgtttcgtcatgagatcaaggacaccttcctgaggacttacacggacgctatgcagacttacaatggcaatgatgagaggagccgggcagtggaccatgtgcagcgcagcctgagctgctgtggtgtgcagaactacaccaactggagcaccagcccctacttcctggagcatggcatcccccccagctgctgcatgaacgaaactgattgtaatccccaggatctacacaatctgactgtggccgccaccaaagttaaccagaagggttgttatgatctggtaactagtttcatggagactaacatgggaatcatcgctggagtggcgtttggaatcgcattctcccagttaattggcatgctgctggcctgctgtctgtcccggttcatcacggccaatcagtatgagatggtgtaaggagaagtctttcaagaatgacggaataagagacctgttttaaaaaggaactgcagcaatctttgaaagacttccaaagaatgttagagcacagtacataatacacttgccctgctccctctaccccttaccccacaacgtgcaactgacactcccacccagtctctgctccacctttcagcccacgtcacgtgtagtgtccattttgtgaagccctgttgtgccacagagtgtagccaggtccccctgcagctagtcctagtgaacctcaccccgaggccctgcatgggccagcccctccatctgtacttggtccaactgcaactcatcatcggtgactggttatcacaccatcgctggcccctttgggccctgcatgtagtgtgggaggctcctgttagctcctcactgtggtaaatgccacacacctttaagtagataagcagacgatagttatctgttcttttgacttaatctcatttggtttgattttccctctactaaggctttcctaccttcttcaggctgcctaagacatgtaacgaaacacttcaataattgtccatgaggagaaaaaaagcatgtgtcatgcatgaaggaaactgaacttgaggtggcctccttgcttgttacatacctgggtatgtgtaggcagtttagtgcatctttgcctctcagttgaaacctgtataaccctgttacaaagctgtgttgttgcttcttgtgaaggccatgatattttgtttttccccaattaattgctattgtgttattttactacttctctctgtattttttcttgcattgacattatagacattgaggacctcatccaaacaatttaaaaatgagtgtgaagggggaacaagtcaaaatatttttaaaagatcttcaaaaataatgcctctgtctagcatgccaacaagaatgcattgatattgtgaacatttgtgatatatgtattaataaatagagcaattacggaattc

SEQ ID NO: 139 - DNA, 655 bp, Homo sapiens
ccaatggccattagccttcacccatccgcacgacctcatttacatcccctattcttatcatcttccagaccacctcgagagccaggggttcagagcccctctttcctaatgagggctcccaggacaggatgaggtgcctgcctgaggtcacacggcagggagtgcagctccccctgccccgacctgctgagccccatcacttccgcagatcctggcattctctcagaagctgtactacgacaaggaacagacagtgagcatgaaggacaatgtcaggcccctgcagcagctggggcagcgcacggtgataaagtccggggccccgggtcggccgctgccctgggccctgcctgccctgctgggccccatgctggcctgcctgctggccggcttcctgcgatgatggctcacttctgcacgcagcctctctgttgcctcagctctccaagttccaggcttccggtccttagccttcccaggtgggactttaggcatgattaaaatatggacatatttttggagaaacctttctcaagtgtgtttttagccttccacaactaccccaccctgtccccctccacccacccctgttcctcctgttccagggcgggggctttaaggccaggagatttctccaagcaggtaccaccaggtg

SEQ ID NO: 140 - DNA, 1344 bp, Homo sapiens
cagaactcaggctgcctccagccagcctttgcccgctagactcactggccctgagcacttgaaggtgcagcaagtcactgagaatgagcactttcttctcggacacagcatggatctgcctggctgtccccacagtactatgtgggacagtattttgcaaatacaagaagagctcagggcagctgtggagctggatggtctgcctggcaggcctctgtgcagtctgcctgctcatcctgtcccctttttggggcttgatcctcttctcggtgtcatgcttcctcatgtatacttacttatctggccaagaattgttacctgtggatcagaaggcagtcctggtgacaggtggtgattgcgggcttggccatgctttgtgcaagtatctggatgagctgggcttcacggtatttgccggagttttgaatgaaaatggcccaggagctgaggaattgcgaagaacctgctctccgcgcctctcggtgctccaaatggacatcacgaagccagtgcagataaaagatgcttacagcaaggttgcagcaatgctgcaggacagaggactgtgggctgtgatcaacaatgctggggtgcttggctttccaactgatggggagcttcttcttatgactgactacaaacaatgcatggccgtgaacttctttggaactgtggaggtcacaaagacgtttttgcctcttcttagaaaatccaaagggaggctggtgaatgtcagcagcatgggaggaggggccccaatggaaaggctggcatcttatggctcatcaaaggcggctgtgaccatgttctcatcagttatgagactggagctttccaagtggggaattaaagttgcttccatccaacctggaggcttcctaacaaatatcgcaggcaccagtgacaagtgggaaaagctggagaaggacattctggaccacctccccgctgaggtacaggaagactacggccaggactacatcttagcacagcggaatttcctcctattgatcaactcgttagccagcaaggacttctctccggtgctgcgggacatccagcatgctatcttggcgaagagcccttttgcctattacacgccagggaaaggcgcttacttgtggatctgccttgctcactatttgcctattggcatatatgattactttgctaaaagacattttggccaagacaagcccatgcccagagctctaagaatgcctaactacaagaaaaaggccacctaggcaatggaagccctcaaagaagtcggaatgtcatagtcttgaaatgaaagggaaactgggaaactgggtttctcattaaagttgtttcccactctga

SEQ ID NO: 141 - DNA, 2828 bp, Homo sapiens
agcagccggcacggggacagccggccgcacaacggatctgcaggcgcggagcaaaatgcacccgccgcgccgcgcggtcctgcagccccgccacggccccgcggcccgcacccccccggggcgacagtgagcctctcccgccaccaccgggggccgagcggagggctctcgggtgggagagcgggaccagatctcgacagctgttcatttccaggaagccaccgcagccagagcgaaaggggaccttctgccaccagcggggcatcagccagcggcgcgcatggatttatgaagacactcatgcaagaagtgggcaggacttggacaaacttttccaccggctccgcgtccgccgctccccgcgcctcgtctcctttcccctcctctcccggcggccgccgctgcccgcgatggtggccgcgctgctgggcggcggcggcgaggcccgcggggggacagtgccgggcgcctggctgtgcctgatggcgctgctgcagctgctgggctcggcgccgcggggatcggggctggcgcacggccgccgcctcatctgctggcaggcgctgctgcagtgccagggggagccggagtgcagctacgcctacaaccagtacgccgaggcgtgcgcgccggtgctggcgcagcacggcgggggcgacgcgcccggggccgccgccgccgctttcccggcctcggccgcctctttctcgtcgcgctggcgctgcccgagtcactgcatctcggccctcattcagctcaaccacacgcgccgcgggcccgccctggaggactgtgactgcgcgcaggacgagaactgcaagtccaccaagcgcgccattgagccgtgcctgccccggacgagcggcggcggcgcgggcggccccggcgcgggcggggtcatgggctgcaccgaggcccggcggcgctgcgaccgcgacagccgctgcaacctggcgctgagccgctacctgacctactgcggcaaagtcttcaacgggctgcgctgcacggacgaatgccgcaccgtcattgaggacatgctggctatgcccaaggtggcgctgctcaacgactgcgtgtgcgacggcctcgagcggcccatctgcgagtcggtcaaggagaacatggcccgcctgtgcttcggcgccgagctgggcaacggccccggcagcagcggctcggacgggggcctggacgactactacgatgaggactacgatgacgagcagcgcaccgggggcgcgggtggtgagcagccgctggacgacgacgacggcgtcccgcacccaccgcgcccgggcagcggcgctgctgcatcgggcggccgcggggacctgccctatgggcctgggcgcaggagcagcggcggcggcggccgcttggcgccccggggcgcctggaccccactcgcctccatcttgctgctgctgcttgggccgctcttttagccctcgcgccccccgccgttggctgcgggagagcccgcgtcccactcccgtgctcgcctcgaccccgcgccgggcacctgtggcttgggacagatagaagggatggttggggatacttcccaaaactttttccaagtcaacttggtgtagccggttccccggccacgactctgggcacttcccctgaagctcctctccggagcttgacttcttggacctcctcccccgccccaattccaagctccagaaactcccaactcgtctgccgtccagaaagctagctgcagtgttcaggacgtccgggaggaagcaagcatgtgggggacagaacagtagtcctggactcgaaagggaaggtgctgaccagtggggccttagcaatttgaagggttgggaaggaggaattatatttgcaaaggggctgtctattagcatatttcctttgagggggcaaaaaaaagtgccagtatcgacttttacagattgtggccagtgaggatattataatcctatgtaaacagaaaagtcccacttaccgattcattctttcactgtttgtatctgcgcccagaattctcagtgacgtgggggtgagggtgggtggcgattgccttagagggaacccctaaattggttttggataagtttgagcccttgaccttaatttcattgctaccactctgatctcttagcacatttcttaggattaagggtccaaaaatgctgatctaaggggttgccatggtgttgaacaatgcaactttttatttaaaaaagctctgcactgccatgtatgaaagtctctttatgatgtttgtttttttgtcatttttgttctttacatcaagaaattttatgtttaaatatgcggagaatgtatattgcctctgctcctatcagggttgctaaaccctggtacatcgtatataaaatgtattaaaactggggtttgttaccagttgctgtactttgtatatagaatttttataaattgtatgcttcagaaataatttatttttaaaaagaaattaaaagttttaaactcacatccatattacacctttcccccctgaaatgtatagaatccatttgtcatcaggaatcaaaacccacagtccattgtgaagtgtgctatatttagaacagtcttaaaatgtacagtgtattttatagaattgaagttaacattcttattttcaagagaatttatggacgttgtagaaatgtacaaatgcatttccaaactgccttaaacgttgtatttttatagacatgtttttttaaaaatcctaagtttttaaataactatggatttgtgtattttttttggttatttgttttattaaaacatgtacatcagtaaagagttttaaacaatga

SEQ ID NO: 142 - DNA, 2848 bp, Homo sapiens
cgcggcactcgcgcgcgatcccggccggcggcgcgccggcgggccaggcggcgccacagcccatggagctcgagaacatcgtagcgaacacggtgctactcaaggcccgggaaggtggcggtggaaatcgcaaaggcaaaagcaagaaatggcggcagatgctccagttccctcacatcagccagtgcgaagagctgcggctcagcctcgagcgtgactatcacagcctgtgcgagcggcacgccattgggcgcctgctgttccgagagttctgtgccacgaggccggagctgagccgctgcgtcgccttcctggatggggtggccgagtatgaagtgaccccggatgacaagcggaaggcatgtgggcggcacgtaacgcagaattttctgagccacacgggtcctgacctcatccctgaggtcccccggcagctggtgacgaactgcacccagcggctggagcagggtccctgcaaagaccttttccaggaactcacccggctgacccacgagtacctgagcgtggccccttttgccgactacctcgacagcatctacttcaaccgtttcctgcagtggaagtggctggaaaggcagccagtgaccaaaaacaccttcaggcaataccgagtcctgggcaaaggtggctttggggaggtgtgcgcctgccaggtgcgggccacaggtaagatgtatgcctgcaagaagctagagaaaaagcggatcaagaagcggaaaggggaggccatggcgctgaacgagaagcagatcctggagaaagtgaacagtaggtttgtagtgagcttggcctacgcctatgagaccaaggacgcgctgtgcctggtgctgacactgatgaacgggggcgacctcaagttccacatctaccacatgggccaggctggcttccccgaagcgcgggccgtcttctacgccgccgagatctgctgtggcctggaggacctgcaccgggagcgcatcgtgtacagggacctgaagcccgagaacatcttgctggatgaccacggccacatccgcatctctgacctgggactagctgtgcatgtgcccgagggccagaccatcaaagggcgtgtgggcaccgtgggttacatggctccggaggtggtgaagaatgaacggtacacgttcagccctgactggtgggcgctcggctgcctcctgtacgagatgatcgcaggccagtcgcccttccagcagaggaagaagaagatcaagcgggaggaggtggagcggctggtgaaggaggtccccgaggagtattccgagcgcttttccccgcaggcccgctcactttgctcacagctcctctgcaaggaccctgccgaacgcctggggtgtcgtgggggcagtgcccgcgaggtgaaggagcaccccctctttaagaagctgaacttcaagcggctgggagctggcatgctggagccgccgttcaagcctgacccccaggccatttactgcaaggatgttctggacattgaacagttctctacggtcaagggcgtggagctggagcctaccgaccaggacttctaccagaagtttgccacaggcagtgtgcccatcccctggcagaacgagatggtggagaccgagtgcttccaagagctgaatgtctttgggctggatggctcagttcccccagacctggactggaagggccagccacctgcacctcctaaaaagggactgctgcagagactcttcagtcgccaagattgctgtggaaactgcagcgacagcgaggaagagctccccacccgcctctagcccccagcccgaggcccccaccagcagttggcggtagcagctactccgagcgccgtttacagttttgcacagtgatcttccccattgtccactcaagtcgtggcctggggaacacagacggagctgtccccagtgtcctccgtccctcagcccctggcctggctgagtttggcagggcctgggccatccctgggacaaaggtgcgtcccttcagctcttctccgtggagctcggggctttctgtatttatgtatttgtacgaatgtatatagcgaccagagcattcttaattcccgccgcagacctggcgcccccgccttggctcctgggggcagccagccctggctggagagcgggacgtggcagaggagccactgccaaactcaaggctcctctggcccagcttggatggctgagggtggtcacacctgagccttcagcactgtgctgccaccccggcctctgagtaagactcgtgcctccccctgctgccctgggctcaggctgctacctctggggcccaaagctgtcccttctcagtgcttgtcagcgctgggtctggggcctctgtatgccctaggcctgtgccaaagtggccagagattgggctgcctgtgatacccatcagcccactgccccggccggcccagataggtctgcctctgccttccagctcccacagcctggtccctgatactgggctctgtcctgcagacacctctttcagaaacgcccaagcccagccctaggagggggtggggcatccctggtcaaccctcaaacattccggactcccctcataacaatagacacatgtgcccagcaataatccgccccttcctgtgtgcgcctgtggggtgcgtgctctctgtgtgtacctgtgtgggtgaaggggatagggcgaggctgtgcctgtgccccaggtcccagccctggcccttcccagactgtgatggccatcctggtcccagtgttagggtagcatgggattacagggccctgttttttccatatttaaagccaatttttattactcgttttgtccaacgtaaaag

SEQ ID NO: 143 - DNA, 3175 bp, Homo sapiens
cagatcgggaagaaaaatatggaatgtgttttaccgctgactgaacacaaccaaatgaactgtcctgacagtagtttgcaaaccagcagctagcagtttgtccagcctctaacattgtccagcactttccagagcaaactcactgtttacaagaactcttggccttacgaagtttataacctcaagctttgtttatttaaaatattcctgcaaaagaaaagtacccggcacccactttccaaaatggccatggatgagtatttgtggatggtcattttgggtttcatcatagctttcatcttggccttttctgttggtgcaaacgatgttgccaactcctttggtacagccgtgggctctggtgtggtgaccttgaggcaggcatgcattttagcttcaatatttgaaaccaccggctccgtgttactaggcgccaaagtaggagaaaccattcgcaaaggtatcattgacgtgaacctgtacaacgagacggtggagactctcatggctggggaagttagtgccatggttggttccgctgtgtggcagctgattgcttccttcctgaggcttccaatctcaggaacgcactgcattgtgggttctactataggattctcactggtcgcaatcggtaccaaaggtgtgcagtggatggagcttgtcaagattgttgcttcttggtttatatctccactgttgtctggtttcatgtctggcctgctgtttgtactcatcagaattttcatcttaaaaaaggaagaccctgttcccaatggcctccgggcactcccagtattctatgctgctaccatagcaatcaatgtcttttccatcatgtacacaggagcaccagtgctcggccttgttctccccatgtgggccatagccctcatttcctttggtgtcgccctcctgttcgctttttttgtgtggctcttcgtgtgtccgtggatgcggaggaaaataacaggcaaattacaaaaagaaggtgctttatcacgagtatctgacgaaagcctcagtaaggttcaggaagcagagtccccagtatttaaagagctaccaggtgccaaggctaatgatgacagcaccatcccgctcacgggagcagcaggggagacactggggacctcggaaggcacttctgcgggcagccaccctcgggctgcatacggaagagcactgtccatgacccatggctctgtgaaatcgcccatctccaacggcaccttcggcttcgacggccacaccaggagcgacggtcatgtgtaccacaccgtgcacaaagactcggggctctacaaagatctgctgcacaaaatccacatcgacaggggccccgaggagaagccagcccaggaaagcaactaccggctgctccgccgaaacaacagttacacctgctacaccgcagccatttgtgggctgccagtgcacgccacctttcgagctgcggactcatcggccccagaggacagtgagaagctggtgggcgacaccgtgtcctactccaagaagaggctgcgctacgacagctactcgagctactgtaacgcggtggcagaggcggagatcgaggcggaggagggcggcgtggagatgaagctggcgtcggagctggccgaccctgaccagccgcgagaggaccctgcagaggaggagaaggaggagaaggacgcacccgaggttcacctcctgttccatttcctgcaggtcctcaccgcctgtttcgggtcctttgctcacggcggcaatgacgtgagtaatgccatcggtcccctggtagccttgtggctgatttacaaacaaggcggggtaacgcaagaagcagctacacccgtctggctgctgttttatggaggagttggaatctgcacaggcctctgggtctgggggagaagagtgatccagaccatggggaaggacctcactcccatcacgccgtccagcggcttcacgatcgagctggcctcagccttcacagtggtgatcgcctccaacatcgggcttccagtcagcaccacgcactgtaaggtgggctcggtggtggccgtgggctggatccgctcccgcaaggctgtggactggcgcctctttcggaacatcttcgtggcctggttcgtgaccgtccctgtggctgggctgttcagcgctgctgtcatggctcttctcatgtatgggatccttccatatgtgtgatttgtcttcttccagctgcaaacagctaaagggatggtctggtgttggcgtgtgggagacatgtgtgctcgtgccgcacatacacatcctggccgtgcacggctctctcatgaccagctctctgcctcccttccaggaggctccatcccacactgttcacccaggctgcggagactcaccttcccgagctaacttaactactgtacataataatatgtattaaactggtatcgtggtgatataatgtggtgcagttacttatatattaaatatctattgtatccatagaataggcagcattatttcaaacatattcaagttgggagtggagatcattgcctagaagtcaatattcaataaatcttgtacataactatttcgatggcaaatgttaagccttctaaaaggaaagtgtagattggaaaatgattttttttccaaatgatgtttttgccttctaatatactgtaaggtaatgagcttcagaacaggcaacctgaccctgcagaggtcgcgtgctgtgggatgacagcgggacgggagctcacaagtgctttcactgaagatttgttcatatactgtgtattgattgttgtgtaatatatcatcattgcttttgtaaatacgtaaaactgtaattttttaatggtgtgcttcccttatactttttgatcagagaattttggaaagtaccaaagaagcaggggaatcattggccagtgttacgttttcacattgtctgtctcccaccctcactgatcacgcctgccccagagcagtgtgtggcggtgacaccgtcacccagcatgcgccacgccgtcgtcccaccagcagtgccaccgccaccacaccccagatcccacccaccttgcagtggctttcttgtcatcagagtagagaatgcacaggtgttggtgagggcgtgtggctgagcactacatgtcaagtcagagtcagtttctatccaattctc

SEQ ID NO: 144 - DNA, 5433 bp, Homo sapiens
atgggatggctgtggatctttggggcagccctggggcagtgtctgggctacagttcacagcagcaaagggtgccatttcttcagcctcccggtcaaagtcaactgcaagcgagttatgtggagtttagacccagccagggttgtagccctggatactatcgggatcataaaggcttgtataccggacggtgtgttccctgcaattgcaacggacattcaaatcaatgccaggatggctcaggcatatgtgttaactgtcagcacaacaccgcgggagagcactgtgaacgctgccaggagggctactatggcaacgccgtccacggatcctgcagggcctgcccatgtcctcacactaacagctttgccactggctgtgtggtgaatgggggagacgtgcggtgctcctgcaaagctgggtacacaggaacacagtgtgaaaggtgtgcaccgggatatttcgggaatccccagaaattcggaggtagctgccaaccatgcagttgtaacagcaatggccagctgggcagctgtcatcccctgactggagactgcataaaccaagaacccaaagatagcagccctgcagaagaatgtgatgattgcgacagctgtgtgatgaccctcctgaacgacctggccaccatgggcgagcagctccgcctggtcaagtctcagctgcagggcctgagtgccagcgcagggcttctggagcagatgaggcacatggagacccaggccaaggacctgaggaatcagttgctcaactaccgttctgccatttcaaatcatggatcaaaaatagaaggcctggaaagagaactgactgatttgaatcaagaatttgagactttgcaagaaaaggctcaagtaaattccagaaaagcacaaacattaaacaacaatgttaatcgggcaacacaaagcgcaaaagaactggatgtgaagattaaaaatgtcatccggaatgtgcacattcttttaaagcagatctctgggacagatggagagggaaacaacgtgccttcaggtgacttttccagagagtgggctgaagcccagcgcatgatgagggaactgcggaacaggaactttggaaagcacctcagagaagcagaagctgataaaagggagtcgcagctcttgctgaaccggataaggacctggcagaaaacccaccagggggagaacaatgggcttgctaacagtatccgggattctttaaatgaatacgaagccaaactcagtgaccttcgtgctcggctgcaggaggcagctgcccaagccaagcaggcaaatggcttgaaccaagaaaacgagagagctttgggagccattcagagacaagtgaaagaaataaattccctgcagagtgatttcaccaagtatctaaccactgcagactcatctttgttgcaaaccaacattgcgctgcagctgatggagaaaagccagaaggaatatgaaaaattagctgccagtttaaatgaagcaagacaagaactaagtgacaaagtaagagaactttccagatctgctggcaaaacatcccttgtggaggaggcagaaaagcacgcgcggtccttacaagagctggcaaagcagctggaagagatcaagagaaacgccagcggggatgagctggtgcgctgtgctgtggatgccgccaccgcctacgagaacatcctcaatgccatcaaagcggccgaggacgcagccaacagggctgccagtgcatctgaatctgccctccagacagtgataaaggaagatctgccaagaaaagctaaaaccctgagttccaacagtgataaactgttaaatgaagccaagatgacacaaaagaagctaaagcaagaagtcagtccagctctcaacaacctacagcaaaccctgaatattgtgacagttcagaaagaagtgatagacaccaatctcacaactctccgagatggtcttcatgggatacagagaggtgatattgatgctatgatcagtagtgcaaagagcatggtcagaaaggccaacgacatcacagatgaggttctggatgggctcaaccccatccagacagatgtggaaagaattaaggacacctatgggaggacacagaacgaagacttcaaaaaggctctgactgatgcagataactcggtgaataagttaaccaacaaactacctgatctttggcgcaagattgaaagtatcaaccaacagctgttgcccttgggaaacatctctgacaacatggacagaatacgagaactaattcagcaggccagagatgctgccagtaaggttgctgtccccatgaggttcaatggtaaatctggagtcgaagtccgactgccaaatgacctggaagatttgaaaggatatacatctctgtccttgtttctccaaaggcccaactcaagagaaaatgggggtactgagaatatgtttgtgatgtaccttggaaataaagatgcctcccgggactacatcggcatggcagttgtggatggccagctcacctgtgtctacaacctgggggaccgtgaggctgaactccaagtggaccagatcttgaccaagagtgagactaaggaggcagttatggatcgggtgaaatttcagagaatttatcagtttgcaaggcttaattacaccaaaggagccacatccagtaaaccagaaacacccggagtctatgacatggatggtagaaatagcaatacactccttaatttggatcctgaaaatgttgtattttatgttggaggttacccacctgattttaaacttcccagtcgactaagtttccctccatacaaaggttgtattgaattagatgacctcaatgaaaatgttctgagcttgtacaacttcaaaaaaacattcaatctcaacacaactgaagtggagccttgtagaaggaggaaggaagagtcagacaaaaattattttgaaggtacgggctatgctcgagttccaactcaaccacatgctcccatcccaacctttggacagacaattcagaccaccgtggatagaggcttgctgttctttgcagaaaacggggatcgcttcatatctctaaatatagaagatggcaagctcatggtgagatacaaactgaattcagagctaccaaaagagagaggagttggagacgccataaacaacggcagagaccattcgattcagatcaaaattggaaaactccaaaagcgtatgtggataaatgtggacgttcaaaacactataattgatggtgaagtatttgatttcagcacatattatctgggaggaattccaattgcaatcagggaaagatttaacatttctacgcctgctttccgaggctgcatgaaaaatttgaagaaaaccagtggtgtcgttagattgaatgatactgtgggagtaaccaaaaagtgctcggaagactggaagcttgtgcgatctgcctcattctccagaggaggacaattgagtttcactgatttgggcttaccacctactgaccacctccaggcctcatttggatttcagacctttcaacccagtggcatattattagatcatcagacatggacaaggaacctgcaggtcactctggaagatggttacattgaattgagcaccagcgatagcggcggcccaatttttaaatctccacagacgtatatggatggtttactgcattatgtatctgtaataagcgacaactctggactacggcttctcatcgatgaccagcttctgagaaatagcaaaaggctaaaacacatttcaagttcccggcagtctctgcgtctgggcgggagcaattttgagggttgtattagcaatgtttttgtccagaggttatcactgagtcctgaagtcctagatttgaccagtaactctctcaagagagatgtgtccctgggaggctgcagtttaaacaaaccaccttttctaatgttgcttaaaggttctaccaggtttaacaagaccaagacttttcgtatcaaccagctgttgcaggacacaccagtggcctccccaaggagcgtgaaggtgtggcaagatgcttgctcaccacttcccaagacccaggccaatcatggagccctccagtttggggacattcccaccagccacttgctattcaagcttcctcaggagctgctgaaacccaggtcacagtttgctgtggacatgcagacaacatcctccagaggactggtgtttcacacgggcactaagaactcctttatggctctttatctttcaaaaggacgtctggtctttgcactggggacagatgggaaaaaattgaggatcaaaagcaaggagaaatgcaatgatgggaaatggcacacggtggtgtttggccatgatggggaaaaggggcgcttggttgtggatggactgagggcccgggagggaagtttgcctggaaactccaccatcagcatcagagcgccagtttacctgggatcacctccatcagggaaaccaaagagcctccccacaaacagctttgtgggatgcctgaagaactttcagctggattcaaaacccttgtataccccttcttcaagcttcggggtgtcttcctgcttgggtggtcctttggagaaaggcatttatttctctgaagaaggaggtcatgtcgtcttggctcactctgtattgttggggccagaatttaagcttgttttcagcatccgcccaagaagtctcactgggatcctaatacacatcggaagtcagcccgggaagcacttatgtgtttacctggaggcaggaaaggtcacggcctctatggacagtggggcaggtgggacctcaacgtcggtcacaccaaagcagtctctgtgtgatggacagtggcactcggtggcagtcaccataaaacaacacatcctgcacctggaactggacacagacagtagctacacagctggacagatccccttcccacctgccagcactcaagagccactacaccttggaggtgctccagccaatttgacgacactgaggatccctgtgtggaaatcattctttggctgtctgaggaatattcatgtcaatcacatccctgtccctgtcactgaagccttggaagtccaggggcctgtcagtctgaatggttgtcctgaccagtaacccaagcctatttcacagcaaggaaattcaccttcaaaagcactgattacccaatgcacctccctccccagctcgagatcattcttcaattaggacacaaaccagacaggtttaatagcgaatctaattttgaattctgaccatggatacccatcactttggcattcagtgctacatgtgtattttatataaaaatcccatttcttgaagataaaaaaattgttattcaaattgttatgcacagaatgtttttggtaatattaatttccactaaaaaattaaatgtctttt

SEQ ID NO: 145 - DNA, 3231 bp, Homo sapiens
cgtgaaggcaaagagaacacgctgcaaaaggcttccaagaatcctcgacatggcaaggaggagctcgttccagtcgtgtcagataatatccctgttcacttttgccgttggagtcagtatctgcttaggattcactgcacatcgaattaagagagcagaaggatgggaggaaggtcctcctacagtgctatcagactccccctggaccaacatctccggatcttgcaagggcaggtgctttgaacttcaagaggctggacctcctgattgtcgctgtgacaacttgtgtaagagctataccagttgctgccatgactttgatgagctgtgtttgaagacagcccgtggctgggagtgtactaaggacagatgtggagaagtcagaaatgaagaaaatgcctgtcactgctcagaggactgcttggccaggggagactgctgtaccaattaccaagtggtttgcaaaggagagtcgcattgggttgatgatgactgtgaggaaataaaggccgcagaatgccctgcagggtttgttcgccctccattaatcatcttctccgtggatggcttccgtgcatcatacatgaagaaaggcagcaaagtcatgcctaatattgaaaaactaaggtcttgtggcacacactctccctacatgaggccggtgtacccaactaaaacctttcctaacttatacactttggccactgggctatatccagaatcacatggaattgttggcaattcaatgtatgatcctgtatttgatgccacttttcatctgcgagggcgagagaaatttaatcatagatggtggggaggtcaaccgctatggattacagccaccaagcaaggggtgaaagctggaacattcttttggtctgttgtcatccctcacgagcggagaatattaaccatattgcggtggctcaccctgccagatcatgagaggccttcggtctatgccttctattctgagcaacctgatttctctggacacaaatatggccctttcggccctgaggagagtagttatggctcaccttttactccggctaagagacctaagaggaaagttgcccctaagaggagacaggaaagaccagttgctcctccaaagaaaagaagaagaaaaatacataggatggatcattatgctgcggaaactcgtcaggacaaaatgacaaatcctctgagggaaatcgacaaaattgtggggcaattaatggatggactgaaacaactaaaactgcgtcggtgtgtcaacgtcatctttgtcggagaccatggaatggaagatgtcacatgtgatagaactgagttcttgagtaattacctaactaatgtggatgatattactttagtgcctggaactctaggaagaattcgatccaaatttagcaacaatgctaaatatgaccccaaagccattattgccaatctcacgtgtaaaaaaccagatcagcactttaagccttacttgaaacagcaccttcccaaacgtttgcactatgccaacaacagaagaattgaggatatccatttattggtggaacgcagatggcatgttgcaaggaaacctttggatgtttataagaaaccatcaggaaaatgctttttccagggagaccacggatttgataacaaggtcaacagcatgcagactgtttttgtaggttatggcccaacatttaagtacaagactaaagtgcctccatttgaaaacattgaactttacaatgttatgtgtgatctcctgggattgaagccagctcctaataatgggacccatggaagtttgaatcatctcctgcgcactaataccttcaggccaaccatgccagaggaagttaccagacccaattatccagggattatgtaccttcagtctgattttgacctgggctgcacttgtgatgataaggtagagccaaagaacaagttggatgaactcaacaaacggcttcatacaaaagggtctacagaagagagacacctcctctatgggcgacctgcagtgctttatcggactagatatgatatcttatatcacactgactttgaaagtggttatagtgaaatattcctaatgctactctggacatcatatactgtttccaaacaggctgaggtttccagcgttcctgaccatctgaccagttgcgtccggcctgatgtccgtgtttctccgagtttcagtcagaactgtttggcctacaaaaatgataagcagatgtcctacggattcctctttcctccttatctgagctcttcaccagaggctaaatatgatgcattccttgtaaccaatatggttccaatgtatcctgctttcaaacgggtctggaattatttccaaagggtattggtgaagaaatatgcttcggaaagaaatggagttaacgtgataagtggaccaatcttcgactatgactatgatggcttacatgacacagaagacaaaataaaacagtacgtggaaggcagttccattcctgttccaactcactactacagcatcatcaccagctgtctggatttcactcagcctgccgacaagtgtgacggccctctctctgtgtcctccttcatcctgcctcaccggcctgacaacgaggagagctgcaatagctcagaggacgaatcaaaatgggtagaagaactcatgaagatgcacacagctagggtgcgtgacattgaacatctcaccagcctggacttcttccgaaagaccagccgcagctacccagaaatcctgacactcaagacatacctgcatacatatgagagcgagatttaactttctgagcatctgcagtacagtcttatcaactggttgtatatttttatattgtttttgtatttattaatttgaaaccaggacattaaaaatgttagtattttaatcctgtaccaaatctgacatattatgcctgaatgactccactgtttttctctaatgcttgatttaggtagccttgtgttctgagtagagcttgtaataaatactgcagcttgagaaaaagtggaagcttctaaatggtgctgcagatttgatatttgcattgaggaaatattaattttccaatgcacagttgccacatttagtcctgtactgtatggaaacactgattttgtaaagttgcctttatttgctgttaactgttaactatgacagatatatttaagccttataaaccaatcttaaacataataaatcacacattcagtttt

SEQ ID NO: 146 - DNA, 500 bp, Homo sapiens
tgccgctgcagcagcgcagttccagtccgttgctttactttttgcttcaccgacatagtcattatgccgaagagaaagtctccagagaatacagagggcaaagatggatccaaagtaactaaacaggagcccacaagacggtctgccagattgtcagcgaaacctgctccaccaaaacctgaacccaaaccaagaaaaacatctgctaagaaagaacctggagcaaagattagcagaggtgctaaagggaagaaggaggaaaagcaggaagctggaaaggaaggtactgcaccatctgaaaatggtgaaactaaagctgaagaggcacagaaaactgaatctgtagataacgagggagaatgaattgtcatgaaaaattggggttgattttatgtatctcttgggacaacttttaaaagctatttttaccaagtattttgtaaatgctaattttttaggactctactagttggcatacgaaaatatataaggatggacat

SEQ ID NO: 147 - DNA, 4788 bp, Homo sapiens
tttttagaaaaaaaaaatatatttccctcctgctccttctgcgttcacaagctaagttgtttatctcggctgcggcgggaactgcggacggtggcgggcgagcggctcctctgccagagttgatattcactgatggactccaaagaatcattaactcctggtagagaagaaaaccccagcagtgtgcttgctcaggagaggggagatgtgatggacttctataaaaccctaagaggaggagctactgtgaaggtttctgcgtcttcaccctcactggctgtcgcttctcaatcagactccaagcagcgaagacttttggttgattttccaaaaggctcagtaagcaatgcgcagcagccagatctgtccaaagcagtttcactctcaatgggactgtatatgggagagacagaaacaaaagtgatgggaaatgacctgggattcccacagcagggccaaatcagcctttcctcgggggaaacagacttaaagcttttggaagaaagcattgcaaacctcaataggtcgaccagtgttccagagaaccccaagagttcagcatccactgctgtgtctgctgcccccacagagaaggagtttccaaaaactcactctgatgtatcttcagaacagcaacatttgaagggccagactggcaccaacggtggcaatgtgaaattgtataccacagaccaaagcacctttgacattttgcaggatttggagttttcttctgggtccccaggtaaagagacgaatgagagtccttggagatcagacctgttgatagatgaaaactgtttgctttctcctctggcgggagaagacgattcattccttttggaaggaaactcgaatgaggactgcaagcctctcattttaccggacactaaacccaaaattaaggataatggagatctggttttgtcaagccccagtaatgtaacactgccccaagtgaaaacagaaaaagaagatttcatcgaactctgcacccctggggtaattaagcaagagaaactgggcacagtttactgtcaggcaagctttcctggagcaaatataattggtaataaaatgtctgccatttctgttcatggtgtgagtacctctggaggacagatgtaccactatgacatgaatacagcatccctttctcaacagcaggatcagaagcctatttttaatgtcattccaccaattcccgttggttccgaaaattggaataggtgccaaggatctggagatgacaacttgacttctctggggactctgaacttccctggtcgaacagttttttctaatggctattcaagccccagcatgagaccagatgtaagctctcctccatccagctcctcaacagcaacaacaggaccacctcccaaactctgcctggtgtgctctgatgaagcttcaggatgtcattatggagtcttaacttgtggaagctgtaaagttttcttcaaaagagcagtggaaggacagcacaattacctatgtgctggaaggaatgattgcatcatcgataaaattcgaagaaaaaactgcccagcatgccgctatcgaaaatgtcttcaggctggaatgaacctggaagctcgaaaaacaaagaaaaaaataaaaggaattcagcaggccactacaggagtctcacaagaaacctctgaaaatcctggtaacaaaacaatagttcctgcaacgttaccacaactcacccctaccctggtgtcactgttggaggttattgaacctgaagtgttatatgcaggatatgatagctctgttccagactcaacttggaggatcatgactacgctcaacatgttaggagggcggcaagtgattgcagcagtgaaatgggcaaaggcaataccaggtttcaggaacttacacctggatgaccaaatgaccctactgcagtactcctggatgtttcttatggcatttgctctggggtggagatcatatagacaatcaagtgcaaacctgctgtgttttgctcctgatctgattattaatgagcagagaatgactctaccctgcatgtacgaccaatgtaaacacatgctgtatgtttcctctgagttacacaggcttcaggtatcttatgaagagtatctctgtatgaaaaccttactgcttctctcttcagttcctaaggacggtctgaagagccaagagctatttgatgaaattagaatgacctacatcaaagagctaggaaaagccattgtcaagagggaaggaaactccagccagaactggcagcggttttatcaactgacaaaactcttggattctatgcatgaagtggttgaaaatctccttaactattgcttccaaacatttttggataagaccatgagtattgaattccccgagatgttagctgaaatcatcaccaatcagataccaaaatattcaaatggaaatatcaaaaaacttctgtttcatcaaaagtgactgccttaataagaatggttgccttaaagaaagtcgaattaatagcttttattgtataaactatcagtttgtcctgtagaggttttgttgttttattttttattgttttcatctgttgttttgttttaaatacgcactacatgtggtttatagagggccaagacttggcaacagaagcagttgagtcgtcatcacttttcagtgatgggagagtagatggtgaaatttattagttaatatatcccagaaattagaaaccttaatatgtggacgtaatctccacagtcaaagaaggatggcacctaaaccaccagtgcccaaagtctgtgtgatgaactttctcttcatactttttttcacagttggctggatgaaattttctagactttctgttggtgtatcccccccctgtatagttaggatagcatttttgatttatgcatggaaacctgaaaaaaagtttacaagtgtatatcagaaaagggaagttgtgccttttatagctattactgtctggttttaacaatttcctttatatttagtgaactacgcttgctcattttttcttacataattttttattcaagttattgtacagctgtttaagatgggcagctagttcgtagctttcccaaataaactctaaacattaatcaatcatctgtgtgaaaatgggttggtgcttctaacctgatggcacttagctatcagaagaccacaaaaattgactcaaatctccagtattcttgtcaaaaaaaaaaaaaaaaaagctcatattttgtatatatctgcttcagtggagaattatataggttgtgcaaattaacagtcctaactggtatagagcacctagtccagtgacctgctgggtaaactgtggatgatggttgcaaaagactaatttaaaaaataactaccaagaggccctgtctgtacctaacgccctatttttgcaatggctatatggcaagaaagctggtaaactatttgtctttcaggaccttttgaagtagtttgtataacttcttaaaagttgtgattccagataaccagctgtaacacagctgagagacttttaatcagacaaagtaattcctctcactaaactttacccaaaaactaaatctctaatatggcaaaaatggctagacacccattttcacattcccatctgtcaccaattggttaatctttcctgatggtacaggaaagctcagctactgatttttgtgatttagaactgtatgtcagacatccatgtttgtaaaactacacatccctaatgtgtgccatagagtttaacacaagtcctgtgaatttcttcactgttgaaaattattttaaacaaaatagaagctgtagtagccctttctgtgtgcaccttaccaactttctgtaaactcaaaacttaacatatttactaagccacaagaaatttgatttctattcaaggtggccaaattatttgtgtaatagaaaactgaaaatctaatattaaaaatatggaacttctaatatatttttatatttagttatagtttcagatatatatcatattggtattcactaatctgggaagggaagggctactgcagctttacatgcaatttattaaaatgattgtaaaatagcttgtatagtgtaaaataagaatgatttttagatgagattgttttatcatgacatgttatatattttttgtaggggtcaaagaaatgctgatggataacctatatgatttatagtttgtacatgcattcatacaggcagcgatggtctcagaaaccaaacagtttgctctaggggaagagggagatggagactggtcctgtgtgcagtgaaggttgctgaggctctgacccagtgagattacagaggaagttatcctctgcctcccattctgaccacccttctcattccaacagtgagtctgtcagcgcaggtttagtttactcaatctccccttgcactaaagtatgtaaagtatgtaaacaggagacaggaaggtggtgcttacatccttaaaggcaccatctaatagcgggttactttcacatacagccctcccccagcagttgaatgacaacagaagcttcagaagtttggcaatagtttgcatagaggtaccagcaatatgtaaatagtgcagaatctcataggttgccaataatacactaattcctttctatcctacaacaagagtttatttccaaataaaatgaggacatgtttttgttttctttgaatgctttttgaatgttatttgttattttcagtattttggagaaattatttaataaaaaaacaatcatttgctttttg

SEQ ID NO: 148 - DNA, 4788 bp, Homo sapiens; identical to SEQ ID NO: 147

SEQ ID NO: 149 - DNA, 539 bp, Homo sapiens
cgagttccccgaggtgtacgtgcccaccgtcttcgagaactatgtggccgacattgaggtggacggcaagcaggtggagctggcgctgtgggacacggcgggccaggaggactacgaccgcctgcggccgctctcctacccggacaccgacgtcattctcatgtgcttctcggtggacagcccggactcgctggagaacatccccgagaagtgggtccccgaggtgaagcacttctgtcccaatgtgcccatcatcctggtggccaacaaaaaagacctgcgcagcgacgagcatgtccgcacagagctggcccgcatgaagcaggaacccgtgcgcacggatgacggccgcgccatggccgtgcgcatccaagcctacgactacctcgagtgctctgccaagaccaaggaaggcgtgcgcgaggtcttcgagacggccacgcgcgccgcgctgcagaagcgctacggctcccagaacggctgcatcaactgctgcaaggtgctatgagggccgcgccgtcgcgcctgcccctgccggc

SEQ ID NO: 150 - DNA, 5749 bp, Homo sapiens
cgcgggagccaacttcaggctgctcagaggaagcccgtgcagtcagtcacctgggtgcaagagcgttgctgcctcgggctctcccgctgcagggagagcggcactcgctggcctggatgtggttggatttaggggggctccgcagcaggggtttcgtggcggtggcaagcgctgcaacaggtagacggcgagagacggaccccggccgaggcagggatggagaccaaaggctaccacagtctccctgaaggtctagatatggaaagacggtggggtcaagtttctcaggctgtggagcgttcttccctgggacctacagagaggaccgatgagaataactacatggagattgtcaacgtaagctgtgtttccggtgctattccaaacaacagtactcaaggaagcagcaaagaaaaacaagaactactcccttgccttcagcaagacaataatcggcctgggattttaacatctgatattaaaactgagctggaatctaaggaactttcagcaactgtagctgagtccatgggtttatatatggattctgtaagagatgctgactattcctatgagcagcagaaccaacaaggaagcatgagtccagctaagatttatcagaatgttgaacagctggtgaaattttacaaaggaaatggccatcgtccttccactctaagttgtgtgaacacgcccttgagatcatttatgtctgactctgggagctccgtgaatggtggcgtcatgcgcgccattgttaaaagccctatcatgtgtcatgagaaaagcccgtctgtttgcagccctctgaacatgacatcttcggtttgcagccctgctggaatcaactctgtgtcctccaccacagccagctttggcagttttccagtgcacagcccaatcacccagggaactcctctgacatgctcccctaatgctgaaaatcgaggctccaggtcgcacagccctgcacatgctagcaatgtgggctctcctctctcaagtccgttaagtagcatgaaatcctcaatttccagccctccaagtcactgcagtgtaaaatctccagtctccagtcccaataatgtcactctgagatcctctgtgtctagccctgcaaatattaacaactcaaggtgctctgtttccagcccttcgaacactaataacagatccacgctttccagtccggcagccagtactgtgggatctatctgtagccctgtaaacaatgccttcagctacactgcttctggcacctctgctggatccagtacattgcgggatgtggttcccagtccagacacgcaggagaaaggtgctcaagaggtcccttttcctaagactgaggaagtagagagtgccatctcaaatggtgtgactggccagcttaatattgtccagtacataaaaccagaaccagatggagcttttagcagctcatgtctaggaggaaatagcaaaataaattcggattcttcattctcagtaccaataaagcaagaatcaaccaagcattcatgttcaggcacctcttttaaagggaatccaacagtaaacccgtttccatttatggatggctcgtatttttcctttatggatgataaagactattattccctatcaggaattttaggaccacctgtgcccggctttgatggtaactgtgaaggcagcggattcccagtgggtattaaacaagaaccagatgacgggagctattacccagaggccagcatcccttcctctgctattgttggggtgaattcaggtggacagtccttccactacaggattggtgctcaaggtacaatatctttatcacgatcggctagagaccaatctttccaacacctgagttcctttcctcctgtcaatactttagtggagtcatggaaatcacacggcgacctgtcgtctagaagaagtgatgggtatccggtcttagaatacattccagaaaatgtatcaagctctactttacgaagtgtttctactggatcttcaagaccttcaaaaatatgtttggtgtgtggggatgaggcttcaggatgccattatggggtagtcacctgtggcagctgcaaagttttcttcaaaagagcagtggaagggcaacacaactatttatgtgctggaagaaatgattgcatcattgataagattcgacgaaagaattgtcctgcttgcagacttcagaaatgtcttcaagctggaatgaatttaggagcacgaaagtcaaagaagttgggaaagttaaaagggattcacgaggagcagccacagcagcagcagcccccacccccacccccacccccgcaaagcccagaggaagggacaacgtacatcgctcctgcaaaagaaccctcggtcaacacagcactggttcctcagctctccacaatctcacgagcgctcacaccttcccccgttatggtccttgaaaacattgaacctgaaattgtatatgcaggctatgacagctcaaaaccagatacagccgaaaatctgctctccacgctcaaccgcttagcaggcaaacagatgatccaagtcgtgaagtgggcaaaggtacttccaggatttaaaaacttgcctcttgaggaccaaattaccctaatccagtattcttggatgtgtctatcatcatttgccttgagctggagatcgtacaaacatacgaacagccaatttctctattttgcaccagacctagtctttaatgaagagaagatgcatcagtctgccatgtatgaactatgccaggggatgcaccaaatcagccttcagttcgttcgactgcagctcacctttgaagaatacaccatcatgaaagttttgctgctactaagcacaattccaaaggatggcctcaaaagccaggctgcatttgaagaaatgaggacaaattacatcaaagaactgaggaagatggtaactaagtgtcccaacaattctgggcagagctggcagaggttctaccaactgaccaagctgctggactccatgcatgacctggtgagcgacctgctggaattctgcttctacaccttccgagagtcccatgcgctgaaggtagagttccccgcaatgctggtggagatcatcagcgaccagctgcccaaggtggagtcggggaacgccaagccgctctacttccaccggaagtgactgcccgctgcccagaagaactttgccttaagtttccctgtgttgttccacacccagaaggacccaagaaaacctgtttttaacatgtgatggttgattcacacttgttcaacagtttctcaagtttaaagtcatgtcagaggtttggagccgggaaagctgtttttccgtggatttggcgagaccagagcagtctgaaggattccccacctccaatcccccagcgcttagaaacatgttcctgttcctcgggatgaaaagccatatctagtcaataactctgattttgatattttcacagatggaagaagttttaactatgccgtgtagtttctggtatcgttcgcttgttttaaaagggttcaaggactaacgaacgttttaaagcttacccttggtttgcacataaaacgtatagtcaatatggggcattaatattcttttgttattaaaaaaacacaaaaaaataataaaaaaatatatacagattcctgttgtgtaataacagaactcgtggcgtggggcagcagctgcctctgagccctcgctcgtccacggtcttctgcatcactggtatacacactcgttagcgtccatttcttatttaattagaatggataagatgatgttaaatgccttggtttgatttctagtatctattgtgttggctttacaaataattttttgcagtcttttgctgtgctgtacattactgtatgtataaattatgaaggacctgaaataaggtataaggatcttttgtaaatgagacacatacaaaaaaaatctttaatggttaataggatgaatgggaaagtatttttgaaagaattctattttgctggagactatttaagtactatctttgtctaaacaaggtaatttttttttgtaaagtgcaatgtcctgcatgcataatgaaccgtttacagtgtatttaagaaagggaaagctgtgccttttttagcttcatatctaatttaccattattttacagtctctgttgtaaataaccacactgaaacctcttcggttgtcttgaaacctttctactttttctgtactttttgttttgttcttggtctcccgcttggggcatttgtgggactccagcacgttttctggcttctgcttcatcctgctccatcggggaatgacacactgcggtgtctgcagctcctggaaggtgtcatttgacaacacatgtgggagaggaggtccttggagtgctgcagctttgggaaagcctgcctcgtttcccttttcctctagaagcagaaccagctctacgagagtgagactgggaacttgatggctcagagagcatcttttcctcccattttagaaaatcagattttctcctgtgggaaaaaaaaattccatgcactctctctctgttaaagatcagctattcccttctgatcttggaaagaggttctgcactcctggaaccggtcacaggaacgcacagatcatggcaggatgcgctgggacggcccatcttggcaaggttcagtctgaatggcatggagaccgggagatagaggggttttagatttttaaaaggtaggttttaaaaataagttttatacataaacagttttggagaaaaattacagatcatataagcaagacagtggcactaaaatgtttaattcattaatctgtttgtttggcactgatgcaatgtatggcttttctcttgccccaaatcacaaacatatgtatctttggggaaactaacaatatgattgcactaaataaactactttgaatagaggccaaattaatcttttaaaaatgatgataatcatcaggtttactcagtgaaatcatattaattattttccaaaatctaaaagctgtagctggagaagcccatggccacgaggaagcagcaattaattagatcaacacttttctccagggttcaccatgcaggcaacattaccttgtctttcaaaagacacctgccttagtgcaaggggaaacctgtgaaagctgcactcagagggaggagtctttcttacataatttgcaatttcaggaatttaatttataggcagatctttaaatacagtcaacttacggtgcacagtaatatgaaagccacactttgaaggtaataaatacacagcatgcagactgggagttgctagcaaacaaatggcttacttacaaaagcagcttttagttcagacttagtttttataaaatgagaattctgacttacttaaccaggtttgggatggagatggtctgcatcagctttttgtattaacaaagttactggctctttgtgtgtctccaggtaactttgcttgattaaacagcaaagccatattctaaattcactgttgaatgcctgtcccagtccaaattgtctgtctgctcttatttttgtaccatattgctcttaaaaatcttggtttggtacagttcataattcaccaaaaagttcatataatttaaagaaacactaaattagtttaaaatgaagcaatttatatctttatgcaaaaacatatgtctgtctttgcaaaggactgtaagcagattacaataaatcctttacttt

SEQ ID NO: 151 - DNA, 1111 bp, Homo sapiens
ccgcgcgctcgccccgccgctcctgctgcagccccaggcccctcgccgccgccaccatggacgccatcaagaagaagatgcagatgctgaagctcgacaaggagaacgccttggatcgagctgagcaggcggaggccgacaagaaggcggcggaagacaggagcaagcagctggaagatgagctggtgtcactgcaaaagaaactcaagggcaccgaagatgaactggacaaatactctgaggctctcaaagatgcccaggagaagctggagctggcagagaaaaaggccaccgatgctgaagccgacgtagcttctctgaacagacgcatccagctggttgaggaagagttggatcgtgcccaggagcgtctggcaacagctttgcagaagctggaggaagctgagaaggcagcagatgagagtgagagaggcatgaaagtcattgagagtcgagcccaaaaagatgaagaaaaaatggaaattcaggagatccaactgaaagaggccaagcacattgctgaagatgccgaccgcaaatacgaagaggtggcccgtaagctggtcatcattgagagcgacctggaacgtgcagaggagcgggctgagctctcagaaggcaaatgtgccgagcttgaagaagaattgaaaactgtgacgaacaacttgaagtcactggaggctcaggctgagaagtactcgcagaaggaagacagatatgaggaagagatcaaggtcctttccgacaagctgaaggaggctgagactcgggctgagtttgcggagaggtcagtaactaaattggagaaaagcattgatgacttagaagacgagctgtacgctcagaaactgaagtacaaagccatcagcgaggagctggaccacgctctcaacgatatgacttccatataagtttctttgcttcacttctcccaagactccctcgtcgagctggatgtcccacctctctgagctctgcatttgtctattctccagctgaccctggttctctctcttagcatcctgccttagagccaggcacacactgtgctttctattgtacagaagctcttcgtttcagtgtcaaataaacactgtgtaagctaaaaaaa

SEQ ID NO: 152 - DNA, 1316 bp, Homo sapiens
gcttctgtctcctacagccacctgaagtccaaaaagggtcagtctacctcccgccataaaaaactcatgttcaagacagaagggcctgactcagactgacattctccacttcttgttccccactgacagcctccctcccccatctctccctcccctgccattttgggttttgggtctttgaacccttgcttgcaataggtgtgcgtcagaagcacccaggacttccatttgctttgtcccggggctccactgaacaagttggcctgcactggtgttttgttgtggggaggaggatggggagtaggacataccagcttagattttaaggtttttactgtgagggatgtttgggagatgtaagaaatgttcttgcagttaagggttagtttacaatcagccacattctaggtaggggcccacttcaccgtactaaccagggaagctgtccctcatgttgaattttctctaacttcaaggcccatatctgtgaaatgctggcatttgcacctacctcacagagtgcattgtgagggttaatgaaataatgtacatctggccttgaaaccaccttttattacatggggtctaaaacttgacccccttgagggtgcctgttccctctccctctccctgttggctggtgggttggtagtttctacagttgggcagctggttaggtagagggagttgtcaagtcttgctggcccagccaaaccctgtctgacaacctcttggtccaccttagtacctaaaaggaaatctcaccccatcccacaccctggaggatttcatctcttgtatatgatgatctggatccaccaagacttgttttatgctcagggtcaatttcttttttcttttttttttttttttttctttttctttgagactgggtctcgctttgttgcccaggctggagtggagtggcgtgatcttggcttactgcagcctttgcctccccggctcgagcagtcctgcctcagcctccggagtagctgggaccacaggttcatgccaccatggccagccaacttttgcatgttttgtagagatggggtctcacagtgttgcccaggctggtctcaaactcctgggctcaggcgatccacctgtctcagcctcccagagtgctgggattacaattgtgagccaccacgtccagctggaagggtcaacatcttttacattctgcaagcacatctgcattttcaccccacccttcccctccttctccctttttatatcccatttttatatcgatctcttattttacaataaaactttgctgccacctgtgtgtctgaggggtgaacgcc

SEQ ID NO: 153 - DNA, 3079 bp, Homo sapiens
gggccctacagagggtccgccatgttccccggcggcgccgccgcttggctctggtagccgccgcccccgcccccaaccccgcccggcccagagcctagccgagccccgggcccagcatggccgccccggagccggcccgggctgcaccgcccccacccccgcccccgccgccccctcccggggctgaccgcgtcgtcaaagctgtccctttccccccaacacatcgcttgacatctgaagaagtatttgatttggatgggatacccagggttgatgttctgaagaaccacttggtgaaagaaggtcgagtagatgaagaaattgcgcttagaattatcaatgagggtgctgccatccttcggagagagaaaaccatgatagaagtagaagctccaatcacagtgtgtggtgacatccatggccaattttttgatctgatgaaactttttgaagtaggaggatcacctgctaatacacgatacctttttcttggcgattatgtggacagaggttattttagtatagagtgtgtcttatatttatgggttctgaagattctatacccaagcacattatttcttctgagaggcaaccatgaatgcagacaccttactgaatattttacctttaagcaggaatgtaaaattaagtattcggaaagagtctatgaagcttgtatggaagcttttgatagtttgcctcttgctgcacttttaaaccaacagtttctttgtgttcatggtggactttcaccagaaatacacacactggatgatattaggagattagatagattcaaagagccacctgcatttggaccaatgtgtgacttgttatggtccgatccttctgaagattttggaaatgaaaaatcacaggaacattttagtcacaatacagttcgaggatgttcttatttttataactatccagcagtgtgtgaatttttgcaaaacaataatttgttatcgattattagagctcatgaagctcaagatgcaggctatagaatgtacagaaaaagtcaaactacagggttcccttcattaataacaattttttcggcacctaattacttagatgtctacaataataaagctgctgtattaaagtatgaaaataatgtgatgaatattcgacagtttaactgttctccacatccttactggttgcctaattttatggatgtcttcacgtggtctttaccgtttgttggagaaaaagtgacagaaatgttggtaaatgttctgagtatttgctctgatgatgaactaatgactgaaggtgaagaccagtttgatggttcagctgcagcccggaaagaaatcataagaaacaaaattcgagcaattggcaagatggcaagagtcttctctgttctcagggaggagagtgaaagtgtgctgacactcaagggcctgactcccacagggatgttgcctagtggagtgttagctggaggacggcagaccctgcaaagtgccacagttgaggctattgaggctgaaaaagcaatacgaggattctctccaccacatagaatctgcagttttgaagaggcaaagggtttggataggatcaatgagagaatgccacctcggaaagatgctgtacagcaagatggtttcaattctctgaacaccgcacatgccactgagaaccacgggacgggcaaccatactgcccagtgacccactacttcccagggactctcacatctcgggccccaaatggacagatcacccgaggagctggaggggtcggccaagctgactgtaaatttcacagtctctctgaagaaaccattgtgcttctgagaccctagcccccttcctggatggaggcttgagggccctgggacatgtgctatctgataagattgggtcatcgctgccaaggtggagagcagtgagcaaggggcttggggcaatttccagtggagggcatccacacctccattttatgcttgtggttcacacatttaagtttacaaatcagatttcttttccccttcagtagaattagattttgtttttcaatcatgatttcaaatgcaatcctaagagctaatgtggacttttctttttccatgaaatgtctttaaaggatgaattagcatggtcttaaaatacatttctgaggttactagctgtattttgaattgtgagcaaaatgccgagaaacccagttggcatttatacaaaatgttgacctcaggtctatagttcttaaatgtggctaattctgtaacatagtcttggtattttttaattatgaatgcatatcctatttccaggcaggctctcttacttgaacacaaatccaaaaactaatttagagtcttttttgcccagatcttttaagacttacaccccagagatttaagaagaaaacctctaaatttcaaaattatgaagaattacagaattactcatttaaggtactttaaaagaagtttgtacattgtcaaagtaaattttaattcaaatcatgtctgtaaaacttgacgtattttgtgtatgcatgttttcattttgcaaatatttaatatatagacctatgatgtacaggtacgacatgtataggttacctagatgttatgagaaattttagtttattgtgagtactcaagttgcttagagagccaccagggtgatttgctgctggctttctatcatttttatgttttaatgcaaaggaaattttaaaatgttctggaagtgtttttgattaagcaatgcagcctagaagcaatggttctgttcaatcattcagatgttagtggaagcataaaagtcaagactgcatgttgaaacctttcttttgatagttactgaactgcttggttaaactaaatggaaccatgtgctaatttttcacaattattgacctgtattgattgccactgtagtttggtatttccctttactttggtggcctgcttccctcatgccctggaatacaactcagagctccaggcagcggaaccatctattgttttgtttgccagaaagtgcaccctgtatggtctcctgtctaagttggaaatattatgcatgtgcaggactattcgagtatt

SEQ ID NO: 154 - DNA, 642 bp, Homo sapiens
atgcccggagccggccgcagcagcatggctcacgggcccggcgcgctgatgctcaagtgcgtggtggtcggcgacggggcggtgggcaagacgtgcctactcatgagctatgccaacgacgccttcccggaggagtacgtgcccaccgtcttcgaccactacgcagtcagcgtcaccgtggggggcaagcagtacctcctaggactctatgacacggccggacaggaagactatgaccgtctgaggcctttatcttacccaatgaccgatgtcttccttatatgcttctcggtggtaaatccagcctcatttcaaaatgtgaaagaggagtgggtaccggaacttaaggaatacgcaccaaatgtaccctttttattaataggaactcagattgatctccgagatgaccccaaaactttagcaagactgaatgatatgaaagaaaaacctatatgtgtggaacaaggacagaaactagcaaaagagataggagcatgctgctatgtggaatgttcagctttaacccagaagggattgaagactgtttttgatgaggctatcatagccattttaactccaaagaaacacactgtaaaaaaaagaataggatcaagatgtataaactgttgtttaattacgtga

SEQ ID NO: 155 - DNA, 1081 bp, Homo sapiens
gctgcccgtcctggcgagccgcgcctacgcggcccctgccccaggccaggccctgcagcgagtgggcatcgttgggggtcaggaggcccccaggagcaagtggccctggcaggtgagcctgagagtccgcgaccgatactggatgcacttctgcgggggctccctcatccacccccagtgggtgctgaccgcagcgcactgcgtgggaccggacgtcaaggatctggccgccctcagggtgcaactgcgggagcagcacctctactaccaggaccagctgctgccggtcagcaggatcatcgtgcacccacagttctacaccgcccagatcggagcggacatcgccctgctggagctggaggagccggtgaaggtctccagccacgtccacacggtcaccctgccccctgcctcagagaccttccccccggggatgccgtgctgggtcactggctggggcgatgtggacaatgatgagcgcctcccaccgccatttcctctgaagcaggtgaaggtccccataatggaaaaccacatttgtgacgcaaaataccaccttggcgcctacacgggagacgacgtccgcatcgtccgtgacgacatgctgtgtgccgggaacacccggagggactcatgccagggcgactccggagggcccctggtgtgcaaggtgaatggcacctggctgcaggcgggcgtggtcagctggggcgagggctgtgcccagcccaaccggcctggcatctacacccgtgtcacctactacttggactggatccaccactatgtccccaaaaagccgtgagtcaggcctggggtgtccacctgggtcactggaggaccagcccctcctgtccaaaacaccactgcttcctacccaggcggcgactgccccccacaccttccctgccccgtcctgagtgccccttcctgtcctaagccccctgctctcttctgagccccttcccctgtcctgaggacccttccccatcctgagcccccttccctgtcctaagcctgacgcctgcaccgggccctccggccctcccctgcccaggcagctggtggtgggcgctaatcc

SEQ ID NO: 156 - DNA, 1631 bp, Homo sapiens
tttaacacccatagtaggcctaaaagcagccaccaattaagaaagccacagcacgtacacccactccagggatctgccagcaccctgtggggcccagactacaggctgatggcggaggcttcgagtgacccgggtgctgaggagcgggaagagttgctggggcccactgctcagtggagcgtggaggacgaggaggaggccgtccacgagcaatgccagcatgagagagacaggcagcttcaggcccaggacgaggagggaggcggccatgtccccgagcggccgaagcaggagatgctcctcagcctgaagccctcggaggcccctgaactggatgaggacgagggctttggcgactggtcccagaggccagagcagcggcagcagcacgagggggcgcagggcgccttggacagcggagagcccccccagtgcaggagtcctgagggggagcaagaggacaggcccggcctgcatgcctacgaaaaggaggacagtgatgaagtccacctggaggagttgagtctgagcaaggaggggccaggcccagaggacactgtccaggacaacctgggggccgcaggggctgaggaggaacaggaggagcaccagaaatgtcagcagcccaggacacccagccccttggtcttggaggggaccatcgaacagagctcgcctcccctgagccctaccaccaaactcatcgacaggaccgagtccctaaaccgctccatagagaagagtaacagtgtgaagaaatcccagccagacttgcccatctccaagattgatcagtggctggaacaatacacccaggccatcgagaccgctggccggacccccaagctagcccgccaggcctccatagagctgcccagcatggctgtggccagtaccaagagtcggtgggagacgggtgaggtacaggctcagtctgcggccaagactccgtcctgcaaggatattgtggctggagacatgagcaagaaaagcctctgggagcagaagggaggctccaagacctcatcaacaattaagagcaccccatctgggaagaggtataagtttgtggccaccgggcatgggaagtatgagaaggtgcttgtggaagggggcccggctccctaggcgtcccatctcgcttcctgggtctgcaggtccagccggctggcaccctccatgtacccaggggagattccagccagacacccgccccccggccctggctaagaagttgcttcctgttgccagcatgacctaccctcgcctctttgatgccatccgctgccacctccttttgctcctggaccctttagcctctctgcccttccactctctgaccaccgcccccgccctccccacccagctccgcttcttgttacttgggggaggaaagaaactcctgatcattggccaaagggacttacccctggagaggccaagtgccttctaggaagttaggaggttgaggcacagcctgtgcagagagggtgggtcacccccccagatccaaggggaaactgcaggtcaagggctgataacggccatgcaggatgcttgatgctgcgtcccccgctgcttgccgccccccaccccgccattttgtataataaagctccctgtgtattctc

SEQ ID NO: 157 - DNA, 2945 bp, Homo sapiens
ccagccccccttcccttccctgaccccttcttgccatcgccccagacatggggaacgcggcgaccgccaagaaaggcagcgaggtggagagcgtgaaagagtttctagccaaagccaaagaagactttttgaaaaaatgggagaatccaactcagaataatgccggacttgaagattttgaaaggaaaaaaacccttggaacaggttcatttggaagagtcatgttggtaaaacacaaagccactgaacagtattatgccatgaagatcttagataagcagaaggttgttaaactgaagcaaatagagcatactttgaatgagaaaagaatattacaggcagtgaattttcctttccttgttcgactggagtatgcttttaaggataattctaatttatacatggttatggaatatgtccctgggggtgaaatgttttcacatctaagaagaattggaaggttcagtgagccccatgcacggttctatgcagctcagatagtgctaacattcgagtacctccattcactagacctcatctacagagatctaaaacctgaaaatctcttaattgaccatcaaggctatatccaggtcacagactttgggtttgccaaaagagttaaaggcagaacttggacattatgtggaactccagagtatttggctccagaaataattctcagcaagggctacaataaggcagtggattggtgggcattaggagtgctaatctatgaaatggcagctggctatcccccattctttgcagaccaaccaattcagatttatgaaaagattgtttctggaaaggtccgattcccatcccacttcagttcagatctcaaggaccttctacggaacctgctgcaggtggatttgaccaagagatttggaaatctaaagaatggtgtcagtgatataaaaactcacaagtggtttgccacgacagattggattgctatttaccagaggaaggttgaagctccattcataccaaagtttagaggctctggagataccagcaactttgatgactatgaagaagaagatatccgtgtctctataacagaaaaatgtgcaaaagaatttggtgaattttaaagaggaacaagatgacatctgagctcacactcagtgtttgcactctgttgagagataaggtagagctgagaccgtccttgttgaagcagttacctagttccttcattccaacgactgagtgaggtctttattgccatcatccgtgtgcgcactctgcatccacctatgtaacaaggcaccgctaagcaagcattgtctgtgccataacacagtactagaccactttcttacttctctttgggttgtctttctcctctcctacatccatttcttccttttcaatttcattggttttctctaaacagtgctccattttattttgttggtgtttcagatgggcagtgttatggctacgtgatatttgaagggaaggataagtgttgctttcagtagttattgccaatattgttgttggtcaatggcttgaagataaactttctaataattattatttctttgagtagctcagacttggttttgccaaaactcttggtaatttttgaagatagactgtcttatcaccaaggaaatttatacaaattaagactaactttcttggaattcactattctggcaataaattttggtagactaatacagtacagctagacccagaaatttggaaggctgtagatcagaggttctagttccctttccctccttttatatcctcctctccttgagtaatgaagtgaccagcctgtgtagtgtgacaaacgtgtctcattcagcaggaaaaactaatgatatggatcatcacccagattctctcacttggtaccagcatttctgtaggtattagagaagagttctaagttttctaaaccttaactgttccttaaggattttagccagtattttaatagaacatgattaatgaaagtgacaaattttaaattttctctaatagtcctcatcataaactttttaaaggaaaataagcaaactaaaaagaacattggtttagataaatacttatactttgcaaagtcaaaaatggcttgatttttggaaacaatatagaggtattcatatttaaatgagggtttacatttgttttgttttgtaaccgttaaaaagaagttgtttccagctaattattgtggtgtactatatttgtgagcctagggtaggggcactgctgcaacttctgctttcatcccatgcctcatcaatgaggaaagggaacaaagtgtataaaacctgccacaattgtattttaattttgaggtatgatattttcagatatttcataatttctaacctctgttctctcagtaaacagaatgtctgatcgatcatgcagatacaatgttggtatttgagaggttagtttttttcctacacttttttttgccaactgacttaacaacattgctgtcaggtggaaatttcaagcacttttgcacatttagttcagtgtttgttgagaatccatggcttaacccacttgttttgctatttttttctttgcttttaattttccccatctgattttatctctgcgtttcagtgacctaccttaaaacaacacacgagaagagttaaactgggttcattttaatgatcaatttacctgcatataaaatttatttttaatcaagctgatcttaatgtatataatcattctatttgctttattatcggtgcaggtaggtcattaacaccacttcttttcatctgtaccacaccctggtgaaacctttgaagacataaaaaaaacctgtctgagatgttctttctaccaatctatatgtctttcggttatcaagtgtttctgcatggtaatgtcatgtaaatgctgatattgatttcactggtccatctatatttaaaacgtgc

SEQ ID NO: 158 - DNA, 1236 bp, Homo sapiens
agcctaaccctcacatgcatttttctctccctctgtatagggtgacagtggagggcctctggtttgcttcgagaaggacaaatacattttacaaggagtcacttcttggggtcttggctgtgcacgccccaataagcctggtgtctatgttcgtgtttcaaggtttgttacttggattgagggagtgatgagaaataattaattggacgggagacagagtgacgcactgactcacctagaggctgggacgtgggtagggatttagcatgctggaaataactggcagtaatcaaacgaagacactgtccccagctaccagctacgccaaacctcggcattttttgtgttattttctgactgctggattctgtagtaaggtgacatagctatgacatttgttaaaaataaactctgtacttaactttgatttgagtaaattttggttttggtcttcaacattttcatgctctttgttcaccccaccaattttaaatgggcagatggggggatttagctgcttttgataaggaacagctgcacaaaggactgagcaggctgcaaggtcacagaggggagagccaagaagttgtccacgcatttacctcatcagctaacgagggcttgacatgcatttttactgtctttattcctgacactgagatgaatgttttcaaagctgcaacatgcatggggagtcatgcgaaccgattctgttattgggaatgaaatctgtcaccgactgcttgacttgagcccaggggacacagagcagagagctgtatatgatggagtgaaccggtccatggatgtgtaacacaagaccaactgagagtctgaatgttattctggggcacacgtgagtctaggattggtgccaagagcatgtaaatgaacaacaagcaaatattgaaggtggaccacttatttcccattgctaattgcctgcccggttttgaaacagtctgcagtacacacggtgacaggagaatgacctgtgggagagatacatgtttagaaggaagagaaaggacaaaggcacacgttttaccatttaaaatattgttaccaaacaaaaatatccattcaaaatacaatttaacaatgcaacagtcatcttacagcagagaaatgcagagaaaagcaaaactgcaagtgactgtgaataaagggtgaatgtagtctcaaatcctcaaagagctgtgtttatttcattgacaaatagattatttgtattca

SEQ ID NO: 159 - DNA, 2520 bp, Homo sapiens
cccgggaaagtcctcagcatgatggtgttcgttggggcgggtgggcctcaagaccatgactgcagtgttgcgacaggacggacttctaaggcaaccggggtggggacggagaggtggacccggtgcttggcaaggggccctggaccggaagacggaggactgagtagtcggggcggggggggggggggacaacagtctagaaatgcgcagacatggaattagggtcacgagtttcgtttgggtcatgttcagatggagaggctgtgggatgcctttagcaacctagaccacttgcattgcagccgagctagcagcagctggtgccccgccaggccccgcgtaccttcccagggtcttggatccgcatccccgagaccctcgatttgcatacgccgctcacagcccggccaggccccgcctccgatcccgctctttgcacctcatcagggcaaggggcaggctcgggctggggagccggcgcgggcacggcggcagcccgccgagggggacgcagggcacgtcgccccgccccggcccgcccgccagctgcggcggcgcgtcgggaagtgcttggggcggcgagcatggcggcagcggctgcaggcctgggcggcggcggcgccggcccgggacccgaggccggggacttcctggcccgctaccggctggtatcgaacaagctgaagaagcggttcctgcggaagccgaacgtggcggaggccggcgagcagttcggacagctgggccgggagctgcgcgcccaggagtgtctgccctacgcggcctggtgccagctggcggtggcgcgctgccagcaggcgctcttccacgggcccggggaggcgctggccctcaccgaggccgcccgcctcttcctgcggcaggagcgcgacgcgccagcgctggtctgccccgccgcctacggggagccgctgcaggccgccgccagcgccctgggcgccgcggtgcgtctgcacctcgagctgggccagccggccgccgccgccgccctctgcctcgagctggccgccgccctgcgcgacctgggccagccggccgccgccgccggtcacttccagcgcgccgcccagctccagctgccccagctgcccctggccgcgctgcaggcgcttggcgaggccgcctcctgccagctgctggcgcgcgactacaccggcgccctggcggtcttcacgcgcatgcagcgcctggcgcgggagcacggcagccacccggtgcagtcactgccgccgcccccgccgccggcaccccagcccgggcccggggcgacgcccgccctaccggccgcgctgcttcctccgaactccggctcggcggcgccctctcccgcgccctgggcgccttctcggacgtgctggtccgctgcgaggtgtcccgcgtgctgctgctgctcctcctgcaaccaccgcccgccaagctgctgccggagcacgcccagaccctggagaagtactcctgggaggcttttgacagccacgggcaggagagcagcggccagcttcccgaggagctctttctgctgctccagtctttggtcatggctacccacgaaaaggacacggaagccatcaagtcgctgcaggtggagatgtggccactgttgactgctgagcagaaccacctccttcacctcgttctgcaagaaaccatctccccctaggacagggagtctgatccatcccattcacccagtgacttctttttgcccaggcctggactttttgcatcagtcacgttaaccagatgactttgcctgttaccaaacctcatgcatccacgtttgcgtctggggaggaataaaaagacatcgttcccgcttctgcgttttgttattcctactgccgccataggaattatttcgttggctgaacgttaccagcaccccgagaacacattttgatagaatcagagtagaggacatggctgtcttctaaaaagccacgacatgaaaatgacaatccctttcgtctccttcctccgctgcttccacctaacgcagcctcctgcctccgcctttgtttcatagtgaggattttattttgcacggcgccctccctctaaatacctaccctagatgatttcatcctgcccctcacttcttaacatattcctgtgtctttgtaatggccaaatttctccttccactcgtccgcacggtacgtcttcatgggagtcattttattccttacagcttccttgtaaccacagccctaaatccatgataaagctactcttgtactcttcactcatgtgtggttttggtgtccgtcgtctataaaatgtgactctcttacctacttgtcaggaggccagcagcagaaccagatagctgtttgggctccaggatgtattcgttcctttgaaatttgcgctatgcctcctatgtgggcaacgaacctgcagagatcatctatgatgtcctccgtactcgggtgactgcaatgcagatacatccagtgcagcgggtctggtgccgatgcatcgatttgcattgaattc

SEQ ID NO: 160 - DNA, 1511 bp, Homo sapiens
ggtcagctccaaaacaatccggaacggccagctccgggggagcacgactgggcgagaggcacagaaatggacaccagaaataaggcccagctccttgtgctcctgactcttctcagtgtgctcttctcacagacttcggcatggcctctttacagggcaccttctgctctcaggttgggtgacagaataccctttgagggagcaaatgaacctgatcaagtttcattaaaagaagacattgacatgttgcaaaatgcattagctgaaaatgacacaccctattatgatgtatccagaaatgccaggcatgctgatggagttttcaccagtgacttcagtaaactcttgggtcaactttctgccaaaaagtaccttgagtctcttatgggaaaacgtgttagcagtaacatctcagaagaccctgtaccagtcaaacgtcactcagatgcagtcttcactgacaactatacccgccttagaaaacaaatggctgtaaagaaatatttgaactcaattctgaatggaaagaggagcagtgagggagaatctcccgactttccagaagagttagaaaaatgatgaaaaagacctttggagcaaagctgatgacaacttcccagtgaattcttgaaggaaaatgatacgcaacataattaaattttagattctacataagtaattcaagaaaacaacttcaatatccaaaccaaataaaaatattgtgttgtgaatgttgtgatgtattctagctaatgtaataactgtgaagtttacattgtaaatagtatttgagagttctaaattttgtctttaactcataaaaagcctgcaatttcatatgctgtatatcctttctaacaaaaaaatatattttaatgataagtaatgctaggttaatccaattatatgagacgtttttggaagagtagtaatagagcaaaattgatgtgtttatttatagagtgtacttaactattcaggagagtagaacagataatcagtgtgtctaaatttgaatgttaagcagatggaatgctgtgttaaataaacctcaaaatgtctaagatagtaacaatgaagataaaaagacattcttccaaaaagattttcagaaaatattatgtgtttccatattttataggcaacctttatttttaatggtgttttaaaaaatctcaaatttggattgctaatcaccaaaggctctctcctgatagtctttcagttaaggagaacgacccctgcttctgacactgaaacttccctttctgcttgtgttaagtatgtgtaaaatgtgaagtgaatgaaacactcagttgttcaataataaatatttttgccataatgactcagaatattgctttggtcatatgagcttccttctgtgaaatacattttggagacacaactatttttccaaaataattttaagaaatcaaagagagaaaataaagaccttgcttatgattgcagataaaaaaaaaaaaaaaaaaaaaaaaaaaaaaaaaaaa

SEQ ID NO: 161 - DNA, 11990 bp, Homo sapiens
ctgcagatggatggtggggatagttgtacaacaatgtgaatgtacttgacgccactgaactgtatactaaaaaatggctcaaatggtgaattttattttatgtatattttatcacaatgtaaaagtgactcagctgtcaatgtactaaaatggaaccatctctaacgtgtatgtcattgaaaaaagattgattcagaagtagggggctcacataagaaaatgtggttgtgtgtacatgaatgtactctgaaggaaccagtaacaaccaaaacctggttgtctctgaagcagtgtttggggtggctgggtgtcaaagggggaaggagacttacttttcattttatgcctttttgcacatcttgaattttgtaccatatacactacccatccaaatcccttgtcggtatttttagtgtgtcccatccgagtggtcctctcggaggctgaactctccctccagcggtgctgcccagctcacagcatgttttggagtgctcctctttcacctgccttccaagcctcgggtgtgatttgcagccctccatggtagcaaatcctcaggggcgaactgaattttgaaaacctcccaagtggttcgggccaagtctggtggttgttgattttgactagagattagatggcatgatatttgtcttctgcctcttttcaccaaggaactgaggacttgggctggtccaaaggccatttccttatgtggtctggagactattcacagagaagagctccagaaatgttgtcccagtagcatcatagaaataggtgtagagtccccttcaggaagattaatctggttctttgggctgtaagtgatcaaagcaataccaaatgccttaaattaaaaaaaaaaaaaaaaaaaaacggaaagtttgttgccaaggccaggaaggacagtgtgggagctcaactcacaaagttgagggaagcactgcaggaaccaaggggctggcctgctcctcctctccagcctcctctgcttcttacatattgacctctctttcttcctactcccccagggggcaggaaacatggcttccacaggttccagttgaagaatcccagttccgtctataaattccagggaaggtctctgattggccctactcattcccaggcccattccttgacccagtcactgaagtcagggagatgcagtaataagactggctggaatcagggtctttaggggtggagggatggggaggaggcacagcatgtcatcaaaataaggaaattgcaaaagaaagcttgcaggctactttgaatgacaatgagaaagacggtgctgcctgagtgtgttaaggatccacatggtctccaaaatcctccaggagcatacagtctagtctgggagatgagacacaaaaataaccagaacacaacagcttgcactgactcgagggctggataagaatatctggaactcccccatctatttcagaagcttgtctcttggatgaaaattagacacttaatgggaaagggctttgaaaagagtgcagtaacaaagccccctttacaatttacccggcacattcacacccatcctgaggccaaagccacaggctgtgaggtctcactgtctcagcttcctgagctataaaatgggaatgatgctagtctctacctcctagggttggagaattgggggtcatgggtgtgaagtgctcagcagcttggcccacactaggtggtcagtacatgtaaggtattattgttgctacatacattagtagggcctgggcctctttaaacctttatagggtagcatggcaaggctaaccatcctcactttatatctgacaagctggggctcagagaggacgtgcctgagctggggctcagacaaggacacacctactagtaacccctccagctggtgatggcaggtctagggtaggaccagtgactggctcctaatcgagcactctattttcaggtttgcattgcaaaagggtcagtccaagagggacctggagagccaagtggaggtgtagagcacggccagtacccatggagaatggtggatgtccttaggggttagcaagtgccgtgtgctaaggagggggctttggaggttggcaggccctctgtggggctccatttttgtgggggtgggggctggagcattatagggggtgggaagtgattggggctgtcaccctagccttccttatctgacgcccacccatgcctcctcaggtacccccctgcccccacagctcctctcctgtgccttgtttcccagccatgcgttctcctctataaatacccgctctggtatttggggttggcagctgttgctgccagggagatggttgggttgacatgcggctcctgacaaaacacaaacccctggtgtgtgtgggcgtgggtggtgtgagtagggggatgaatcagggagggggcgggggacccagggggcaggagccacacaaagtctgtgcgggggtgggagcgcacatagcaattggaaactgaaagcttatcagaccctttctggaaatcagcccactgtttataaacttgaggccccaccctcgacagtaccggggaggaagagggcctgcactagtccagagggaaactgaggctcagggccagctcgcccatagacatacatggcagctttggccaggatccctccgcctgccaggctctccctgccctcccttcctgcctagagacccccaccctcaagcctggctggtctttgcctgagacccaaacctcttcgacttcaagagaatatttaggaacaaggtggtttagggcctttcctgggaacaggccttgaccctttaagaaatgacccaaagtctctccttgaccaaaaaggggaccctcaaactaaagggaagcctctcttctgctgtctcccctgaccccactcccccccaccccaggacgaggagataaccagggctgaaagaggccgctgggggctgcagacatgcttgctgcctgccctggcgaaggattggtaggcttgccgtcacaggacccccgctggctgactcaggggcgcaggctcttgcgggggagctggcctcccgcccccacggccacgggccctttcctggcaggacagcgggatcttgcagctgtcaggggaggggaggcgggggctgatgtcaggagggatacaaatagtgccgacggctgggggccctgtctcccctcgccgcatccactctccggccggccgcctgcccgccgcctcctccgtgcgcccgccagcctcgcccgcgccgtcaccatgagccaggcctactcgtccagccagcgcgtgtcctcctaccgccgcaccttcggcggcgccccggtcttctcgctcggctccccgctgagctcgcccgtgttcccgcgggcgcctttcggctctaagggctcctccagctcggtgacgtcccgcgtgtaccaggtgtcgcgcacgtcgggaggggccgggggcctggggtcgctgcgggccagccggctggggaccacccgcacgccctcctcctacggcgcaggcgagctgctggacttctcactggccgacgcggtgaaccaggagtttctgaccacgcgcaccaacgagaaggtggagctgcaggagctcaatgaccgttcgccaatctacatggagaaggtgcgcttcctggagcagcagaacgcgctcgccgccgaagtgaaccggctcaagggccgcgagccgacgcgagtggccgagctctacgaggaggagctgcgggagctgcggcgccaggtggaggtgctcactaaccagcgcgcgcgcgtcgacgtcgagcgcgacaacctgctcgacgacctgcagcggctcaaggccaagtgagggcccggcaccccagactcctctttctgcgggcagggcacaggaggctaggcctgggggctggggtcccgctgtcaccacctgccttctcccggggcccgaccgctcctcccccatgtggagaaagggtcctccacctgtgtgtttcaaggggccgtgacctccaggtctctccccctgcgatcccatcttgccacaggagttttcttggggacatagatcagggggtggatatgggagaatttaggggacccggtgccctgtggacagccccgttaaaaagcattttaagatgctggggcgatatttatggggtcaggtagttgatgggcagaggaagggctgcaggaggcccagagcgagtgtagccagagggagaagggaggctgataggagacagggaaagcagggcaagggccagagtccaagcaacagctctcagtctcagcgttgatgaggccctgggggaggtggggggaggggggagcttggccctggggcttgccgagactgtgtctttttacaaggtgaatggacaggctggagaaaaagggagtaggtgggggtcacagctctcagagagcttgggaggacctgactgtagacttcaccaggctccaagaacgaaaagggcagcaagtgtagcatatttcgctctggtcccacttctgacaggccaagtgagcacagtcaccctcctgccaccaaagtcataaatattaattgagcagctatatggccaggctggagctgggaaccagaaacacagaggtggataaaatagacacagtttctagagacccagggaggtcacacagtctggtggggacatagacttcaagggtgtggctcctgggcagagattgggccacttcctctgccctctctgggtgggtggggcctctccactccctgtctctcctgcctctacccagcagccaggccctccccctctgtcctggacccaccccctggtcagccccgccagtcgtttccactgccagctttatcacccgcaactgtctgtctttctgtctgtcccacccaggctgcaggaggagattcagttgaaggaagaagcagagaacaatttggctgccttccgagcggtgagtgcccttcttttccccttgcatggcctctcgcgtttgctctgccccacctgggtcgcggagaccatgtccttctcgcttggcctctcccaggacgtggatgcagctactctagctcgcattgacctggagcgcagaattgaatctctcaacgaggagatcgcgttccttaagaaagtgcatgaagaggtatacttggcccctcttcctggggtcactgggccattggggaaagcagccggaaagtggggtttggggtgaggctctggctgggaataggggtgtgagggtcgtgtgtgggccctgagagggactgaagcccagtcatgccctacaggagatccgtgagttgcaggctcagcttcaggaacagcaggtccaggtggagatggacatgtctaagccagacctcactgccgccctcagggatatccgggctcagtatgagaccatcgcggctaagaacatttctgaagctgaggagtggtacaagtcgaaggtgggtggcctcgcccggggactgggatctccgtccccctggaatcccaaggcctttggattgttgcttgcctgtggtaccatccatgggaggagagcccagaggttcatgctcccaagctcatccctacccgtgccctgcatccttctcatttttgggcccctttctctgcccttaggtgtcagacctgacccaggcagccaacaagaacaacgacgccctgcgccaggccaagcaggagatgatggaataccgacaccagatccagtcctacacctgcgagattgacgccctcaagggcactgtgagtccctgcccacctgggccaggccctgccccttctctgtctgcagttcacaccctcactttgtgaccttggccatcatagatcctctctggccttcatctacttaaatctacaatagggtaaaaccagacaagtggattccagttggatgctaaggaatcaggggttcctgggcatctacctatgtggggacttgtgaggctgatgcaatgttcctttgtatctattttattctgagtgttccacatatagcttaatttgagttcagggttcaacatggccaggacctgaccattctggggttgcctgccagccccaaagctttctttgggctgctagtgtcctcttcccttccttgacctgggttccccctctcctgcagaacgattccctgatgaggcagatgcgggaattggaggaccgatttgccagtgaggccagtggctaccaggacaacattgcacgcctggaggaggaaatccggcacctcaaggatgagatggcccgccatctgcgcgagtaccaggacctgctcaacgtgaagatggccctggatgtggagattgccacctaccggaagctgctggagggagaggagagccggtgaggggccaggcaggagccgagtgggaggtgcggggtgctgggtggtccatttctgtccccaggaggctcgagattactgattacctcaacaagacctggaaacaattttttttttttttgagatggagtttcgctcttgtcgcccagtctggagtgcaatggcaccatcttggctcactgcaacctccgcctcctgggttcaagcaattctcctgcctcagcttcccgagcagctgggattacaggcgcctaccaccacacctggctaatttttgtatttttagtagagaggggtttcactatgttgggcagctggtctcgaactcctgacctcaggtgatctgcctacctcagcctccaaagtactgggattacaggcgtgcgccgcgcccggcgtggaaacaattttatacaagaggccactgctctataaccgcagagaattaaccaaggccacctgggtaaaaagcaatttaattaacagcatttataaaaagagaaatataagtattcccttatccaccttcagaattaagaaccagcagcaaaaaaaaccatattcagcaaccaataataaaatattactgccagtcaagggagagatgaaagcagaatggggagtatgaggagggaaacggagggagcagatagaggcaaatagagagagggagggagagaccttcacagggataggctaagagaaggtaaagagatgcatacagaaggcatgagtttgcacacacatgcacacatgtcagcatatcacatgtcggaggaaaagacacagacgatatgctcagagcaacccactctagacacagaaacacatacactggaagggacaccagggaactgtcggatacagaatgtctatatcttttttttttttttttgagcagagtctgctctgtacagccgctaggtagcgtgtgtatctccctacactgcaacctgctcctcccaggctcaagcgctctcctgtctcagcctccctgtagctggatacaggatcgacagtgccaacacactcagactcgattttttgtatttttagtagagatgaggtttcaccatgttggtcaggctggactctaactcctgacctcaagtaattcgcctgcctcagcctcccaaagtgctgggattataggcatgagccactgtgcctggcctagaaatgttctatatcttgatttggactggtagttacacagacgtggacattgatcaaaactcattgaattgtacattaaagatctgtgcatttcactgtatgtaaatttaacctcaatttaaaacagatcagttactccaaaaactggtaccccttgatactcataaaaataactatctgaaatttttaaaaaggagcagacatgtttagatacaggtacaaacataaagagaaacttcagattttgtaaaatcacgtctacatatgatggcctttgaaggtagctaaaggcatgttgcattttcccagcattaggcctaaatagtaagctctcagaactggctggctggagggtgggcatgagcaatggatatcacccacagctgctactagtaccaacttcagtgccaggagcaagaaggaaatcctggtgctcttgagggtgcggtggggttgcacatccttagtgtcgcgcaacgcagttcacagttgaaataatgatccttccagaagagactatccctggggacagctctagctggcttcgaccccattccttagcagtatgggtggtgggagtgctggggtcgtgggactgggacagctgaggatggtgtttagaaaggaccaggtgagccttgatgggcgtgcagggaaagatcgggaggtctttttttttttttttagacagggcttgttctgtaccccaggctggagtgcagtggtgcaactccgctcactgcaagctccacctcctgggttcgcaccattctcctgcctcaccctcctgagtatctggaactacaggtgcccgccaccatgcccggctaatttttgtatttttagtagagacggggtttcactgtgttagccaggatggtctcgatctcctgacctggtgatccgcccgcctcggccttccaaagtgctgggattacagctgggcccggccgatgggagggttcttaactcttaggaggttttgtctcttcccttttaggatcaatctccccatccagacctactctgccctcaacttccgaggtgagtgtctgctggaggcggaggctggagttgcaggggccaggagtccagcatgggcactgcccaaggccagccaggagggaggatgggaccctggggctagggacagacctgagctagggaagaaaagggaccactgcgggtaggtcggggagtttaggtagaggtggatgaggcaacttatgacagagagagctttttatgtgattatattgtattgtatttaccatgtcccctgcaccttcttggagtattgggcctcagaagcagcctctgttctgaatcccaaactcatcccaaactctgaaagcaggagtgtccttggggccctggcttcaggagcatctcataccacctgccctctaagacacccacagcccattgtctgtttggcacattgccaagccccaccttggctgcttgtcgaacacctccagtttgttggagcaagatgttggatgcacgtttggaaaaaaatgccaaatcttagcaaagccaaacaatgaaaagaaagagctcttagggcactctgccattttgacattagtaatacgcagatcgggtggctttccaaccccagagagcagagaaacacaggataatgatgcattaggaaagcaagtcggagtccttggcagcttctcctttcctagatcaaaccttttctatcttcgatgtacatttccatcaggaaaaaaaacgcgctgcgtccagcgagtcacaacattcatcacaggctggttgctagctaaggaaattcgtaagcaccaaactcataataccaaggacctccatttgacctttcctacacaactcagagcctctcttttcagttagttgtttatacagacaccaagtatgagtcttgcatttaaaacttcatagtacaaaaaactccacccacattgcacagtgcttttccaaatcaatagctttgtggccatgataaggttggtaccacttcactccgtgtcctcagtgaggaaactgaggcacagaatggcaagtgactgagcatcagcacaatgagtcagtgccttattcctgctctgtctcacttaagacatcaagttgctcatctgaattttttttttcttttgaaacggagtctcgctctgtcgcccaggctggagtgcagtggtgcaatctcggctcaccgcaacctccgtcctcccaggttcaagcaattctcctgcctcagcctcctgagtagctgggattacaggcatgtgcaccagtccccctaattttgtatttttagtagagacgggttcacatgttggtcagggtggtctggaactcctggtactcatgatccactgccttggtccaaactactggcattacagatgtgaccaaccgcacctggccctgaaatcttaaagggagataggtactgtaaggtcctctaaagagtgtcttgagactgggctttggggttctatcttgaagaaggggagtcccaggagacaaatgtgtgcagggctctcctggggcctgggggtggagaggaactaggagggatggggaatgtcagtgctgtgcagcctgggcctcaggtgtcccctaccctcctgcaccatcctgcacatggagcaaatctgttggctcctgagaccatctaaactatgggacaggcgctgggggctgcagctgggtgctgggctgaaggaaaggtgttaaagtcttgaagaagtaacaagcctgtcttgagggggttggggtctgctagggctctgccaatgtggccccagatggactcccagcccctggtatagcccagcctggacttggtcaggctgagtgtgcgatggaccctgttacagaaaccagccctgagcaaaggggttctgaggtccataccaagaagacggtgatgatcaagaccatcgagacacgggatggggaggtaagtggtctgtctgggctccttacccttggttggggctatggatgtgtctggggggactgtcttccaccagctgtgcaggtctaggtcctggctagtgggcaagagagatcctgcgatcctgggtgggatgcctaggctgacgtcatcctgctagcacatgtgactggactcctctccccaggtcgtcagtgaggccacacagcagcagcatgaagtgctctaaagacgagagaccctctgccaccagagaccgtcctcacccctgtcctcactgctccctgaagcccagccttcttccgatcccaggacaccacacccagcctcagtcctccaaatcacagcctctgacccctcctcactggccatccctcgtggtccccaacagcgacatagcccatccctgcctggtcacaggcatgccccggccacctctgcggaccccagctgtgagccttggctgttggcagtgagtgagcctggctcttgtgctggatggagcccaggcgggagcggtggccctgtccctcccacctctgtgacctcaggcctacgctttggctctggagatagccccagagcagggtgttgggatactgcagggccaggactgagccccgcagacctccccagcccctagcccaggagagagaaagccaggcaggtagcctgggggactagccctgtggagactggggggcttgaaattgtccccgtggtctcttactttcctttccccagcccagggtggacttagaaagcaggggctacaagagggaatccccgaaggtgctggaggtgggagcaggagattgagaaggagagaaagtgggtgagatgctggagaagagaggagaggagagaggcagagagcggtctcaggctggtgggaggggcgcccacctccccacgccctccccccccctgctgcaggggctctggagagaaacaataaagagattcacacacaagccaagctggcccctgttgtcttgactgccaggtctcctgtgggtcccctggccggtgtgatacaacctgtcaccctgagatggactatactgaccttctacccagccagacttttcccagggcctcgcgccacttctgttcccagagccacctggccttgatgtctgtatgcagtgtatgggggtggaggggctggacagggcttttgttggggaaccacaaatacctctgcttaggccccagttccaggactgcaccccttgtgctctctactacaccttcaggtcagccaggctgggggacaccacctgctattccttttgaaggatgtacctgctccccactgactggctctgaagtagggctcccccagtcccttcttcaaagatgccaagagcccctttttttctctctctctttttttctttttgagatggagtcttgctgtgtcacccaggctggagtgcagcagtgtgatcaccgcttactgcagcctggacttcctgagctc

SEQ ID NO: 162 - DNA, 1635 bp, Homo sapiens
cagagtcagaaaactccccagctaaacacccgtaagacttcatacaacacaatactctatactgtgatgatcacagctgccaaggctacctaaaagaagacagttatctcatatttggctgccagctttttatctttctctcgaccacttaaaacttcagacttcctgtcctgctggtatcatggagaaagtccaatacctcactcgctcagctataagaagagcctcaaccattgaaatgcctcaacaagcacgtcaaaagctacagaatctatttatcaatttctgtctcatcttaatatgtctcttgctgatctgtatcatcgtgatgcttctctgaagttctgctacaacctctagatctgcagcttgccacatcagcttaaaatctgtcatcccatgcagacaggaaaacaatattgtataacagaccacttcctgagtagaagagtttctttgtgaaaaggtcaagattaagactaaaacttattgttaccatatgtattcatctgttggatcttgtaaacatgaaaagggctttattttcaaaaattaacttcaaaataagtgtataaaatgcaactgttgatttcctcaacatggctcacaaatttctatcccaaatcttttctgaagatgaagagtttagttttaaaactgcactgccaacaagttcacttcatatataaagcattatttttactcttttgaggtgaatataatttatattacaatgtaaaagcttctttaatactaagtatttttcaggtcttcaccaagtatcaaagtaataacacaaatgaagtgtcattattcaaaatagtccactgactcctcacatctgttatcttattataaagaactatttgtagtaactatcagaatctacattctaaaacagaaattgtattttttctatgccacattaacatcttttaaagttgatgagaatcaagtatggaaaagtaaggccatactcttacataataaaattccttttaagtaattttttcaaagaatcacagaattctagtacatgtaggtaaatcataaatctgttctaagacatatgatcaacagatgagaactggtggttaatatgtgacagtgagattagtcatatcactaatatactaacaacagaatctaatcttcatttaaggcactgtagtgaattatctgagctagagttacctagcttaccatactatatctttggaatcatgaaaccttaagacttcagaatgattttgcaggttgtcttccattccagcctaacatccaatgcaggcaaggaaaataaaagatttccagtgacagaaaaatatattatctcaagtattttttaaaaatatatgaattctctctccaaatattaactaattattagattatattttgaaatgaacttgttggcccatctattacatctacagctgacccttgaacatgggggttaggggagctgacaattcgtgggtccgcaaaatcttaactacctaatagcctactattgaccataaaccttactgataacataaacagtaaattaacacatattttgcgtgttatatgtattatacactatattcctacaataaagtaagctagagaaaatgttatttagaaaatcat

SEQ ID NO: 163 - DNA, 3541 bp, Homo sapiens
tccagtttgcttcttggagaacactggacagctgaataaatgcagtatctaaatataaaagaggactgcaatgccatggctttctgtgctaaaatgaggagctccaagaagactgaggtgaacctggaggcccctgagccaggggtggaagtgatcttctatctgtcggacagggagcccctccggctgggcagtggagagtacacagcagaggaactgtgcatcagggctgcacaggcatgccgtatctctcctctttgtcacaacctctttgccctgtatgacgagaacaccaagctctggtatgctccaaatcgcaccatcaccgttgatgacaagatgtccctccggctccactaccggatgaggttctatttcaccaattggcatggaaccaacgacaatgagcagtcagtgtggcgtcattctccaaagaagcagaaaaatggctacgagaaaaaaaagattccagatgcaacccctctccttgatgccagctcactggagtatctgtttgctcagggacagtatgatttggtgaaatgcctggctcctattcgagaccccaagaccgagcaggatggacatgatattgagaacgagtgtctagggatggctgtcctggccatctcacactatgccatgatgaagaagatgcagttgccagaactgcccaaggacatcagctacaagcgatatattccagaaacattgaataagtccatcagacagaggaaccttctcaccaggatgcggataaataatgttttcaaggatttcctaaaggaatttaacaacaagaccatttgtgacagcagcgtgtccacgcatgacctgaaggtgaaatacttggctaccttggaaactttgacaaaacattacggtgctgaaatatttgagacttccatgttactgatttcatcagaaaatgagatgaattggtttcattcgaatgacggtggaaacgttctctactacgaagtgatggtgactgggaatcttggaatccagtggaggcataaaccaaatgttgtttctgttgaaaaggaaaaaaataaactgaagcggaaaaaactggaaaataaagacaagaaggatgaggagaaaaacaagatccgggaagagtggaacaatttttcattcttccctgaaatcactcacattgtaataaaggagtctgtggtcagcattaacaagcaggacaacaagaaaatggaactgaagctctcttcccacgaggaggccttgtcctttgtgtccctggtagatggctacttccggctcacagcagatgcccatcattacctctgcaccgacgtggcccccccgttgatcgtccacaacatacagaatggctgtcatggtccaatctgtacagaatacgccatcaataaattgcggcaagaaggaagcgaggaggggatgtacgtgctgaggtggagctgcaccgactttgacaacatcctcatgaccgtcacctgctttgagaagtctgagcaggtgcagggtgcccagaagcagttcaagaactttcagatcgaggtgcagaagggccgctacagtctgcacggttcggaccgcagcttccccagcttgggagacctcatgagccacctcaagaagcagatcctgcgcacggataacatcagcttcatgctaaaacgctgctgccagcccaagccccgagaaatctccaacctgctggtggctactaagaaagcccaggagtggcagcccgtctaccccatgagccagctgagtttcgatcggatcctcaagaaggatctggtgcagggcgagcaccttgggagaggcacgagaacacacatctattctgggaccctgatggattacaaggatgacgaaggaacttctgaagagaagaagataaaagtgatcctcaaagtcttagaccccagccacagggatatttccctggccttcttcgaggcagccagcatgatgagacaggtctcccacaaacacatcgtgtacctctatggcgtctgtgtccgcgacgtggagaatatcatggtggaagagtttgtggaagggggtcctctggatctcttcatgcaccggaaaagtgatgtccttaccacaccatggaaattcaaagttgccaaacagctggccagtgccctgagctacttggaggataaagacctggtccatggaaatgtgtgtactaaaaacctcctcctggcccgtgagggaatcgacagtgagtgtggcccattcatcaagctcagtgaccccggcatccccattacggtgctgtctaggcaagaatgcattgaacgaatcccatggattgctcctgagtgtgttgaggactccaagaacctgagtgtggctgctgacaagtggagctttggaaccacgctctgggaaatctgctacaatggcgagatccccttgaaagacaagacgctgattgagaaagagagattctatgaaagccggtgcaggccagtgacaccatcatgtaaggagctggctgacctcatgacccgctgcatgaactatgaccccaatcagaggcctttcttccgagccatcatgagagacattaataagcttgaagagcagaatccagatattgtttccagaaaaaaaaaccagccaactgaagtggaccccacacattttgagaagcgcttcctaaagaggatccgtgacttgggagagggccactttgggaaggttgagctctgcaggtatgaccccgaagacaatacaggggagcaggtggctgttaaatctctgaagcctgagagtggaggtaaccacatagctgatctgaaaaaggaaatcgagatcttaaggaacctctatcatgagaacattgtgaagtacaaaggaatctgcacagaagacggaggaaatggtattaagctcatcatggaatttctgccttcgggaagccttaaggaatatcttccaaagaataagaacaaaataaacctcaaacagcagctaaaatatgccgttcagatttgtaaggggatggactatttgggttctcggcaatacgttcaccgggacttggcagcaagaaatgtccttgttgagagtgaacaccaagtgaaaattggagacttcggtttaaccaaagcaattgaaaccgataaggagtattacaccgtcaaggatgaccgggacagccctgtgttttggtatgctccagaatgtttaatgcaatctaaattttatattgcctctgacgtctggtcttttggagtcactctgcatgagctgctgacttactgtgattcagattctagtcccatggctttgttcctgaaaatgataggcccaacccatggccagatgacagtcacaagacttgtgaatacgttaaaagaaggaaaacgcctgccgtgcccacctaactgtccagatgaggtttatcagcttatgagaaaatgctgggaattccaaccatccaatcggacaagctttcagaaccttattgaaggatttgaagcacttttaaaataagaagcatgaataacatttaaattccacagattatcaa

SEQ ID NO: 164 - DNA, 2491 bp, Homo sapiens
ctggcaggcaggactgggatcgaggcccagaaaacggagcagcgggcaccagggaggcctggaacggggcgagcgccatgagcaacaaatgcgacgtggtcgtggtggggggcggcatctcaggtatggcagcagccaaacttctgcatgactctggactgaatgtggttgttctggaagcccgggaccgtgtgggaggcaggacttacactcttaggaaccaaaaggttaaatatgtggaccttggaggatcctatgttggaccaacccagaatcgtatcttgagattagccaaggagctaggattggagacctacaaagtgaatgaggttgagcgtctgatccaccatgtaaagggcaaatcataccccttcagggggccattcccacctgtatggaatccaattacctacttagatcataacaacttttggaggacaatggatgacatggggcgagagattccgagtgatgccccatggaaggctccccttgcagaagagtgggacaacatgacaatgaaggagctactggacaagctctgctggactgaatctgcaaagcagcttgccactctctttgtgaacctgtgtgtcactgcagagacccatgaggtctctgctctctggttcctgtggtatgtgaagcagtgtggaggcacaacaagaatcatctcgacaacaaatggaggacaggagaggaaatttgtgggcggatctggtcaagtgagtgagcggataatggacctccttggagaccgagtgaagctggagaggcctgtgatctacattgaccagacaagagaaaatgtccttgtggagaccctaaaccatgagatgtatgaggctaaatatgtgattagtgctattcctcctactctgggcatgaagattcacttcaatccccctctgccaatgatgagaaaccagatgatcactcgtgtgcctttgggttcagtcatcaagtgtatagtttattataaagagcctttctggaggaaaaaggattactgtggaaccatgattattgatggagaagaagctccagttgcctacacgttggatgataccaaacctgaaggcaactatgctgccataatgggatttatcctggcccacaaagccagaaaactggcacgtcttaccaaagaggaaaggttgaagaaactttgtgaactctatgccaaggttctgggttccctagaagctctggagccagtgcattatgaagaaaagaactggtgtgaggagcagtactctgggggctgctacacaacttatttcccccctgggatcctgactcaatatggaagggttctacgccagccagtggacaggatttactttgcaggcaccgagactgccacacactggagcggctacatggagggggctgtagaggccggggagagagcagcccgagagatcctgcatgccatggggaagattccagaggatgaaatctggcagtcagaaccagagtctgtggatgtccctgcacagcccatcaccaccacctttttggagagacatttgccctccgtgccaggcctgctcaggctgattggattgaccaccatcttttcagcaacggctcttggcttcctggcccacaaaagggggctacttgtgagagtctaaagagagagggtgtctgtaatcacactctcttcttactgtatttgggatatgagtttggggaaagagttgcaagtaaagttccatgaagacaaatagtgtggagtgaggcgggggagcatgaagataaatccaactctgactgtaaaatacaatggtatctctttctccgttgtggcccctgcttagtgtcccttacctggcttagcgttctgtttcaccagtttccaagtttattgccctcaaatctttagaatagttaaattggcttgtttaaggttcttgctgccccacaacacaccttgcccatgcacaggatgaattttttcctaccattatggctttgtgcttgttcttcctcttacctgtatagcctcacttccctagttctttgcattcgtccttaggtactgtattgttacagctgaaagacagtaaagaccatttagtcctcaccttctgttttagagttgagcaaactgaagcccacagaggtggaacttaattacctaagagccacaataagccactggtatctgggggactagaacacaaataattgcttttcccacctctttggatgttttccccaattatcctccttcactccctgtcatagttaccgatggtgtcccgttgtgtgggtttactctgtgctaagttgtcttacacttctcaaatgctactcagtatatagccttaactcttactgttttgtgcggtgtgtctccagctgattttaacttttttgatggtagaaattttatctcttcttccttttgtatcctccattgtatcttcatacaaaggacagtacacacttgggtaattaaaaataaaagttgattgaccat

SEQ ID NO: 165 - DNA, 1268 bp, Homo sapiens
tgttgtgtcttgttgcgggcaccgcagtcgccgtgaagatggcgtctaccagccgtttggatgctcttccaagagtcacatgtccaaaccatccagatgcgattttagtggaggactacagagccggtgatatgatctgtcctgaatgtggcttggttgtaggtgaccgggttattgatgtgggatctgaatggcgaactttcagcaatgacaaagcaacaaaagatccatctcgagttggagattctcagaatcctcttctgagtgatggagatttgtctaccatgattggcaagggcacaggagctgcaagttttgacgaatttggcaattctaagtaccagaatcggagaacaatgagcagttctgatcgggcaatgatgaatgcattcaaagaaatcactaccatggcagacagaatcaatctacctcgaaatatagttgatcgaacaaataatttattcaagcaagtatatgaacagaagagcctgaagggaagagctaatgatgctatagcttctgcttgtctctatattgcctgtagacaagaaggggttcctaggacatttaaagaaatatgtgccgtatcacgaatttctaagaaagaaattggtcggtgttttaaacttattttgaaagcgctagaaaccagtgtggatttgattacaactggggacttcatgtccaggttctgttccaacctttgtcttcctaaacaagtacagatggcagctacacatatagcccgtaaagctgtggaattggacttggttcctgggaggagccccatctctgtggcagcggcagctatttacatggcctcacaggcatcagctgaaaagaggacccaaaaagaaattggagatattgctggtgttgctgatgttacaatcagacagtcctatagactgatctatcctcgagccccagatctgtttcctacagacttcaaatttgacaccccagtggacaaactaccacagctataaattgaggcagctaacgtcaaattcttgaatacaaaactttgcctgttgtacatagcctatacaaaatgctgggttgagcctttcatgaggaaaaacaaaagacatggtacgcattccagggctgaatactattgcttggcattctgtatgtatatactagtgaaacatatttaatgatttaaatttcttatcaaatttcttttgtagcaatctaggaaactgtattttggaagatatttgaaattatgtaattcttgaataaaacatttttcaaaactc

SEQ ID NO: 166 - DNA, 3397 bp, Homo sapiens
atggcggccttcagcaagtacttgacggcgcggaactcctcgctggctggtgccgcgttcctgctgctctgcctgctccacaagcggcgccgcgccctcggcctgcacggtaagaaaagtggaaaaccaccattacagaacaatgagaaagaggggaaaaaagagcgagctgtggtggacaaggtgtttttctcaaggctcatacagattctgaaaatcatggtccctagaacattttgtaaagagacaggttacttggtacttattgctgttatgctggtgtctcgaacatattgtgatgtttggatgattcaaaatgggacactaattgaaagtggtatcattggtcgtagcaggaaagatttcaagagatacttactcaacttcatcgctgccatgcctcttatctctctggttaataacttcttgaagtatgggttaaatgagcttaaactgtgcttccgagtaaggctcactaaatacctctatgaggagtatcttcaagctttcacatattataaaatggggaatctggacaacagaatagctaatccagaccagctgcttacacaagatgtagaaaaattttgtaacagtgtagtcgatctgtattcaaatcttagtaagccatttttagacatagttttgtatatctttaagttaacgagtgcaattggagctcagggcccagcgagcatgatggcctacttggttgtttctgggctattcctaactcgacttcgaagacccattggtaagatgacaataactgagcaaaagtatgaaggagaatatagatatgttaattctcggctcatcacaaacagtgaagaaattgccttttacaatgggaataaaagagaaaagcagacagtccactcagtcttccgaaaactggtggaacacctacataatttcattttgtttcggttttcaatgggcttcattgatagtattattgccaaataccttgccactgttgttggttacctagttgtcagtcgccctttcttagatttgtctcatcctcgacatctcaagagtacacattcggaacttctagaggattactaccaaagtggaagaatgcttttgcgaatgtctcaagctctgggtcgaatagttttggctgggcgtgaaatgactagattggccggttttactgctcggattacagaattaatgcaagtactgaaggatttaaatcatggcaaatatgagcgcacaatggtctcacaacaggaaaagggtattgaaggagtacaagtcattcccttgatacctggtgctggagaaatcattattgcagataacattataaagtttgatcatgttcctttagcaacgccaaatggagatgttttgatccgagaccttaattttgaagttcgatctggggctaatgttctaatttgtggtccaaatggctgcggaaagagttcacttttccgtgttcttggtgaattatggcctctttttggaggacgtctaactaaacctgaaagaggaaaattattttatgttcctcagagaccttacatgacccttggaacacttcgagatcaagtgatatatccagatggacgagaagatcagaaaaggaagggaatttctgacctagtactgaaggaatacttagacaatgtccagttgggtcatatccttgaacgtgaaggaggctgggacagtgttcaggattggatggacgtactcagtggtggagaaaagcaaagaatggcgatggcaagattattttatcataaaccccagtttgccattttggatgaatgcacaagtgcagttagtgtcgacgtggaaggctacatttatagtcattgtcgaaaggttggcatcactctcttcactgtgtctcataggaaatctctttggaaacatcatgagtactacctgcatatggatggcagaggcaactatgaattcaaacagataacagaagatacagttgagtttggctcttagagaaatctggagaactatacctgcttcagtgaaataattacagaatatacttagaaaggcaaagtacattgtaaaataaagttgagcttagttttttttaaaaaaaaaaaacaaagcaacaaattaactagatacagaataatggagaacaagttgttaaaacatttaatattatataggatattgctaattgtgtatatgttggtttaattaataatatgtactaagaatgtccttattcttgtggttaaaaacctgcctaaattaaattgggcttcaatcactgtaacctgattcatcctgggatgtaaaccattcgaagtcagctaattggacttttatggctctatcttttccttcagtgaagaaccctatttaaaactgggtcatcatttgtcctgttctagcaagatagtcttcagtttcattttcctgtgccctgtggtagttggaaacaaatcataatgtattatttaaatgtttaacatcattgcataacagcgtttattatacagtggcagatttctttagctgccacagtaatactcattccttgtgtgtgtcttggagtgcatttgactccaggaaaagccattttggttttccttaactaaatgataaatgtacccctctcagtctgcagtattgagttgtttaaagtatatgtgcagtcttgcttacaaggaggggttaccatgtatcacacctaatcttcccaatgtttgggatattaaaacacaaagtccttaacatgccaggctcaaggtcttataagagttctagatttttaagagaattagacaaatttgtgtgtgttagaagcccattcattagaagtgtggtggttatttggtattaaactccaaatgagccataggaaggcactacatgaaataatgcactgagtatgcaatgctatcactgtctttgactgtgattttatgtttaaaaagtatgttctaaaattattatatatacatgggtgaattatgtttccgaggcactgttttatctctgtgaatcttgaataacttttttatatttgggttatgatgtcaaacgatcctaagcgaagatgatttcagttcatcaaatcatcattaatgactttatgtattatttgcacagggagaattgaaactgagtataatcaataagctagatacgaaatcagtttctcaaactgagcttcagaaaggggcattttgtactcttgtttttgcataactggttttgtttttttgcagaattaactataacaatcactggctaccgaagtaaactgatgtactgaattccataatacataacattcaatttttaccacttctgtttagcgaacttgtatacttattttctgttcagattaaaaaaaaaaaaaaaaaaaactcagatatcctataaaaaaaaaaggaat

SEQ ID NO: 167 - DNA, 2920 bp, Homo sapiens
cttgcagcaatggcttggattagatccacttgcattctcttttttaccttgctttttgcccacatagcagctgtaccgattaagcatcttcctgaagaaaatgtacatgatgcagattttggtgaacagaaggatatttcagaaatcaatttagctgcaggcttggacctctttcaaggggacatcctcttgcagaaatccagaaatggcctgagagacccaaacaccaggtggacgttccccattccttacatcttggctgataatttggggctgaatgctaaaggagccattctgtatgcctttgagatgttccgtctcaagtcctgtgtggatttcaagccctatgaaggagagagctcatatatcatatttcaacagtttgatgggtgctggtctgaggttggtgaccaacatgtgggacagaacatttccattggccaaggatgtgcctataaggccatcatagaacacgagatcctgcatgctttgggattttaccacgagcagtcaaggacggaccgggatgattatgtgaacatctggtgggaccaaattctttcaggttaccagcacaactttgacacctatgatgatagcttaatcacagacctcaatacaccctatgattatgagtctttgatgcactaccagcctttctcatttaacaagaatgcaagtgttcccaccatcacagccaagatccctgagtttaactccattatcggacaacgcctggatttcagtgccattgatttagagaggctgaaccgaatgtacaattgcaccacaactcacactcttttggaccactgtacttttgagaaggcaaacatctgtggaatgattcagggcaccagagatgacactgactgggcccatcaggacagtgctcaggctggagaagtggatcacaccttgttgggacaatgcacaggtgccggctacttcatgcagttcagcaccagctcggggtccgcggaagaggcagccctactggagtctcggattctttacccaaagaggaagcagcagtgcctgcaatttttctataaaatgacgggaagtccttcagacagactcgttgtctgggtcaggagggatgacagcacaggcaatgttcgcaagttggtgaaggtgcagacttttcaaggagatgatgaccacaattggaaaattgcccatgtggtgctcaaagaggaacagaagtttcgctaccttttccagggcacaaaaggcgaccctcagaactcaactgggggaatttacctagatgacatcactctgacagaaaccccctgccccacaggggtctggacagtccggaatttctcccaagtccttgagaacaccagcaaaggggacaagcttcagagccctcgattctacaattcggagggatatggttttggggtaactttatacccaaatagcagagaaagctctggttacttgagacttgcttttcatgtgtgcagtggggagaacgatgctatcctggagtggccggtagaaaacagacaggtgataattaccatccttgaccaggagcctgatgtccggaacaggatgtcctcaagcatggtgttcactacctcgaagtcgcacacatctccagcgataaatgacactgtcatctgggacaggccgtccagggtgggaacctatcatacagactgtaattgttttagaagcatcgacttgggctggagtggtttcatttcccaccaaatgctgaaaaggaggagtttcctgaaaaatgatgacctcatcatatttgtggactttgaagatatcacccacctcagccagactgaagttccctctaaaggcaaaagactgagcccccaaggcctcattctccaaggccaggagcagcaggtctccgaagaaggttcgggaaaggccatgttagaggaagccctacctgtcagcctgagccaggggcagcccagccgacagaagcggtcggtggagaacacaggccccctggaggaccataactggccacagtacttcagagacccatgtgacccaaacccttgccaaaatgacggcatctgtgtgaacgtgaaggggatggcgagctgcaggtgcatctctggacatgctttcttctacacgggggagcgctgtcagtcggccgaggtgcacggcagtgtcctgggcatggtgatcggaggcacggctggcgtgatcttcttgaccttctccatcatcgccatcctttcccaaaggccaaggaagtgacctgcctgctggcattggccagaccacagcagcacctcctccatgcaggccttaactttcccatgttcaatgcagtttggggcagcttttttatcagccttgctttggataggacctccaaggactaagcctccagccccatgtgtgacccttgtcatctctctgccccacataattatgttactttgctatgtgctcctaatgtatctagtgtgtcctgtgacaacactcatcacacttcattgtaaatcacttgttttattgactgtctttcctatagactgtaagctccatgagggcaggcacatgttgttctcattgaccgtgctggccccagtgcctagatgcatggctggcacattgttggcactcaacaatggttgaatgaataaaacaataaatgaatgaataactaagatatagaaactctcatttatattgcagattgaatatatatgatgaaattcttatgttgaatatgttagaatcaaatactcatttttcattagatacagtagtgtcatcactcttttaagatcttgttaaagatttcaaataaaggtacttctggcgagccaggctgcacagcatttgctttcctctgagattctaagagaaggcctttaataaatttaataaatattgagttagcaaaaaaaaaaaaaaaaaa

SEQ ID NO: 168 - DNA, 1105 bp, Homo sapiens
gctcggtgcgcgaccccggctcagaggactctttgctgtcccgcaagatgcggatgctgctggcgctcctggccctctccgcggcgcggccatcggccagtgcagagtcacactggtgctacgaggttcaagccgagtcctccaactacccctgcttggtgccagtcaagtggggtggaaactgccagaaggaccgccagtcccccatcaacatcgtcaccaccaaggcaaaggtggacaaaaaactgggacgcttcttcttctctggctacgataagaagcaaacgtggactgtccaaaataacgggcactcagtgatgatgttgctggagaacaaggccagcatttctggaggaggactgcctgccccataccaggccaaacagttgcacctgcactggtccgacttgccatataagggctcggagcacagcctcgatggggagcactttgccatggagatgcacatagtacatgagaaagagaaggggacatcgaggaatgtgaaagaggcccaggaccctgaagacgaaattgcggtgctggcctttctggtggaggctggaacccaggtgaacgagggcttccagccactggtggaggcactgtctaatatccccaaacctgagatgagcactacgatggcagagagcagcctgttggacctgctccccaaggaggagaaactgaggcactacttccgctacctgggctcactcaccacaccgacctgcgatgagaaggtcgtctggactgtgttccgggagcccattcagcttcacagagaacagatcctggcattctctcagaagctgtactacgacaaggaacagacagtgagcatgaaggacaatgtcaggcccctgcagcagctggggcagcgcacggtgataaagtccggggccccgggtcggccgctgccctgggccctgcctgccctgctgggccccatgctggcctgcctgctggccggcttcctgcgatgatggctcacttctgcacgcagcctctctgttgcctcagctctccaagttccaggcttccggtccttagccttcccaggtgggactttaggcatgattaaaatatggacatatttttggag

SEQ ID NO: 169 - DNA, 2558 bp, Homo sapiens
ctggaagccagtcctcaggcagccagcctcccctcctgcataggctgggatgaggcagcctttctggccatgcagctgtggggacagcttcccaagatgagggcaacagtttctcaattcctgactcagccattttccctcagcccccatcctgaggtggatttggggggcatgggaggcagggctctttccctgtttccctgcaggcttccaggaggtggggtgaggcagtggtgcatccctgggtgggtgggttctgagcaaccactgctgggcagcacagaaccagacatggagcaccttgtctctccaggtgtccctggccagtgtccttccacctgtccacaagcatggggaacatcttcgccaacctcttcaagggcctttttggcaaaaaagaaatgcgcatcctcatggtgggcctggatgctgcagggaagaccacgatcctctacaagcttaagctgggtgagatcgtgaccaccattcccaccataggtgaggtgggggccagcagggagtgggctgggctgggctgggccaaggtacaaggcctcaccctgcatcccgcacccaggcttcaacgtggaaaccgtggagtacaagaacatcagcttcactgtgtgggacgtgggtggccaggacaagatccggcccctgtggcgccactacttccagaacacacaaggtaagtggctggggcctggtcccatgggcactcctgcttctagagagggggggccagcccatagatggggcatcgatgcccatagatgcggcaggggggctgtgttcccatgaccatttgacactggctgcccggcaggcctgatcttcgtggtggacagcaatgacagagagcgtgtgaacgaggcccgtgaggagctcatgaggatgctggccgaggacgagctccgggatgctgtcctcctggtgttcgccaacaagcaggtaggcgcccgggccagcctggggaatgtgaggagccagtgtgggttccgcctggtggtaggggttactggaggctggtggggcccctttctctgtcctgtggacagcccttcccaccaacccttccttcccccaggacctccccaacgccatgaatgcggccgagatcacagacaagctggggctgcactcactacgccacaggaactggtacattcaggccacctgcgccaccagcggcgacgggctctatgaaggactggactggctgtccaatcagctccggaaccagaagtgaacgcgacccccctccctctcactcctcttgccctctgctttactctcatgtggcaaacgtgcggctcgtggtgtgagtgccagaagctgcctccgtggtttggtcaccgtgtgcatcgcaccgtgctgtaaatgtggcagacgcagcctgcggccaggctttttatttaatgtaaatagtttttgtttccaatgaggcagtttctggtactcctatgcaatattactcagctttttttattgtaaaaagaaaaatcaactcactgttcagtgctgagaggggatgtaggcccatgggcacctggcctccaggagtcgctgtgttgggagagccggccacgcccttggctttagagctgtgttgaaatccattttggtggttggtttttaacccaaactcagtgcattttttaaaatagttaagaatccaagtcgagaacacttgaacacacagaagggagaccccgcctagcatagatttgcagttacggcctggatgccagtcgccagcccagctgttcccctcgggaacatgaggtggtggtggcgcagcagactgcgatcaattctgcatggtcacagtagagatccccgcaactcgcttgtccttgggtcaccctgcattccatagccatgtgcttgtccctgtgctcccacggttcccaggggccaggctgggagcccacagccaccccactatgccgcaggccgccctacccaccttcaggcagcctatgggacgcagggccccatctgtccctcggtcgccgtgtggccagagtgggtccgtcgtccccaacactcgtgctcgctcagacactttggcaggatgtctggggcctcaccagcaggagcgcgtgcaagccgggcaggcggtccacctagacccacagcccctcgggagcaccccacctctgtgtgtgatgtagctttctctccctcagcctgcaagggtccgatttgccatcgaaaaagacaacctctacttttttcttttgtattttgataaacactgaagctggagctgttaaatttatcttggggaaacctcagaactggtctatttggtgtcgtggaacctcttactgctttcaatacacgattagtaatcaactgttttgtatacttgttttcagttttcatttcgacaaacaagcactgtaattatagctattagaataaaatctcttaactatttcaccggctctccagtgcttccacacaggcatgctgcccccaggagatggtgggtgcatcagccagctttactctaggaagtacaggtgactgcctagggccgccacctcagt

SEQ ID NO: 170 - DNA, 1071 bp, Homo sapiens
gcagttctggtcctcctaggagcggccgcctgcgcggcgcggccccgtggtcggatgctgggcggcagagaggccgaggcgcacgcgcggccctacatggcgtcggtgcagctgaacggcgcgcacctgtgcgcaggcgtcctggtggcggagcggtgggtgctgagcgcggcgcactgcctggaggacgcggccgacgggaaggtgcaggttctcctgggcgcgcactccctgtcgcagccggagccctccaagcgcctgtacgacgtgctccgcgcagtgccccacccggacagccagcccgacaccatcgaccacgacctcctgctgctacagctgtcggagaaggccacactgggccctgctgtgcgccccctgccctggcagcgcgtggaccgcgacgtggcaccgggaactctctgcgacgtggccggctggggcatagtcaaccacgcgggccgccgcccggacagcctgcagcacgtgctcttgccagtgctggaccgcgccacctgcaaccggcgcacgcaccacgacggcgccatcaccgagcgcttgatgtgcgcggagagcaatcgccgggacagctgcaagggtgactccgggggcccgctggtgtgcgggggcgtgctcgagggcgtggtcacctcgggctcgcgcgtttgcggcaaccgcaagaagcccgggatctacacccgcgtggcgagctatgcggcctggatcgacagcgtcctggcctagggtgccggggcctgaaggtcagggtcacccaagcaacaaagtcccgagcaatgaagtcatccactcctgcatctggttggtctttattgagcacctactatatgcagaaggggaggccgaggtgggaggatcattggatctcaggagttggagatcagcatgggccacgtagcgcgactccatctctacaaataaataaaaattagctgggcaattggcgggcatggaggtgggtgcttgtagttccagctactcaggaggctgaggtgggaggatgacttgaacgcaggaggctgaggctgcagtgagttgtgattgcaccactgccct

SEQ ID NO: 171 - DNA, 3244 bp, Homo sapiens
ccggccgcgagccccgggggccccgaggccgcagcttgcctgcgcgctctgagccttcgcaactcgcgagcaaagtttggtggaggcaacgccaagcctgagtcctttcttcctctcgttccccaaatccgagggcagcccgcgggcgtcatgcccgcgctcctccgcagcctggggtacgcgtgaagcccgggaggcttggcgccggcgaagacccaaggaccactcttctgcgtttggagttgctccccccaaccccgggctcgtcgctttctccatcccgacccacgcggggcgcggggacaacacaggtcgcggaggagcgttgccattcaagtgactgcagcagcagcggcagcgcctcggttcctgagcccaccgcaggctgaaggcattgcgcgtagtccatgcccgtagaggaagtgtgcagatgggattaacgtccacatggagatatggaagaggaccggggattggtaccgtaaccatggtcagctggggtcgtttcatctgcctggtcgtggtcaccatggcaaccttgtccctggcccggccctccttcagtttagttgaggataccacattagagccagaagagccaccaaccaaataccaaatctctcaaccagaagtgtacgtggctgcgccaggggagtcgctagaggtgcgctgcctgttgaaagatgccgccgtgatcagttggactaaggatggggtgcacttggggcccaacaataggacagtgcttattggggagtacttgcagataaagggcgccacgcctagagactccggcctctatgcttgtactgccagtaggactgtagacagtgaaacttggtacttcatggtgaatgtcacagatgccatctcatccggagatgatgaggatgacaccgatggtgcggaagattttgtcagtgagaacagtaacaacaagagagcaccatactggaccaacacagaaaagatggaaaagcggctccatgctgtgcctgcggccaacactgtcaagtttcgctgcccagccggggggaacccaatgccaaccatgcggtggctgaaaaacgggaaggagtttaagcaggagcatcgcattggaggctacaaggtacgaaaccagcactggagcctcattatggaaagtgtggtcccatctgacaagggaaattatacctgtgtggtggagaatgaatacgggtccatcaatcacacgtaccacctggatgttgtggagcgatcgcctcaccggcccatcctccaagccggactgccggcaaatgcctccacagtggtcggaggagacgtagagtttgtctgcaaggtttacagtgatgcccagccccacatccagtggatcaagcacgtggaaaagaacggcagtaaatacgggcccgacgggctgccctacctcaaggttctcaaggtttcggctgagtccagctcctccatgaactccaacaccccgctggtgaggataacaacacgcctctcttcaacggcagacacccccatgctggcaggggtctccgagtatgaacttccagaggacccaaaatgggagtttccaagagataagctgacactgggcaagcccctgggagaaggttgctttgggcaagtggtcatggcggaagcagtgggaattgacaaagacaagcccaaggaggcggtcaccgtggccgtgaagatgttgaaagatgatgccacagagaaagacctttctgatctggtgtcagagatggagatgatgaagatgattgggaaacacaagaatatcataaatcttcttggagcctgcacacaggatgggcctctctatgtcatagttgagtatgcctctaaaggcaacctccgagaatacctccgagcccggaggccacccgggatggagtactcctatgacattaaccgtgttcctgaggagcagatgaccttcaaggacttggtgtcatgcacctaccagctggccagaggcatggagtacttggcttcccaaaaatgtattcatcgagatttagcagccagaaatgttttggtaacagaaaacaatgtgatgaaaatagcagactttggactcgccagagatatcaacaatatagactattacaaaaagaccaccaatgggcggcttccagtcaagtggatggctccagaagccctgtttgatagagtatacactcatcagagtgatgtctggtccttcggggtgttaatgtgggagatcttcactttagggggctcgccctacccagggattcccgtggaggaactttttaagctgctgaaggaaggacacagaatggataagccagccaactgcaccaacgaactgtacatgatgatgagggactgttggcatgcagtgccctcccagagaccaacgttcaagcagttggtagaagacttggatcgaattctcactctcacaaccaatgaggaatacttggacctcagccaacctctcgaacagtattcacctagttaccctgacacaagaagttcttgttcttcaggagatgattctgttttttctccagaccccatgccttacgaaccatgccttcctcagtatccacacataaacggcagtgttaaaacatgaatgactgtgtctgcctgtccccaaacaggacagcactgggaacctagctacactgagcagggagaccatgcctcccagagcttgttgtctccacttgtatatatggatcagaggagtaaataattggaaaagtaatcagcatatgtgtaaagatttatacagttgaaaacttgtaatcttccccaggaggagaagaaggtttctggagcagtggactgccacaagccaccatgtaacccctctcacctgccgtgcgttctggctgtggaccagtaggactcaaggtggacgtgcgttctgccttccttgttaattttgtaataattggagaagatttatgtcagcacacacttacagagcacaaatgcagtatataggtgctggatgtatgtaaatatattcaaattatgtataaatatatattatatatttacaaggagttattttttgtattgattttaaatggatgtcccaatgcacctagaaaattggtctctctttttttaatagctatttgctaaatgctgttcttacacataatttcttaattttcaccgagcagaggtggaaaaatacttttgctttcagggaaaatggtataacgttaatttattaataaattggtaatatacaaaacaa

SEQ ID NO: 172 - DNA, 254 bp, Homo sapiens
ctccccacagttcacagtgacctttgagagtgacaaattcaaggtgaagctgccagatgggcacgagctgacttttcccaacaggctgggtcacagccacctgagctacctgagcgtaaggggcgggttcaacatgtcctctttcaagttaaaagaataaaagacttccagccgagattctctgtcctggttcttcttccgagtcacaccaggatcaacagagcttgggtgtgttcccctatccctacctgcag

SEQ ID NO: 173 - DNA, 1763 bp, Homo sapiens
ggggtacctcatgtgacaagttccaatttcttttcaagtcaattgaactgaaatctccttgttgctttgaaatcttagaagagagcccactaattcaaggactcttactgtaggagcaactgctggttctatcacaatgaaacggctggtttgtgtgctcttggtgtgctcctctgcagtggcacagttgcataaagatcctaccctggatcaccactggcatctctggaagaaaacctatggcaaacaatacaaggaaaagaatgaagaagcagtacgacgtctcatctgggaaaagaatctaaagtttgtgatgcttcacaacctggagcattcaatgggaatgcactcatacgatctgggcatgaaccacctgggagacatgaccagtgaagaagtgatgtctttgatgagttccctgagagttcccagccagtggcagagaaatatcacatataagtcaaaccctaatcggatattgcctgattctgtggactggagagagaaagggtgtgttactgaagtgaaatatcaaggttcttgtggtgcttgctgggctttcagtgctgtgggggccctggaagcacagctgaagctgaaaacaggaaagctggtgtctctcagtgcccagaacctggtggattgctcaactgaaaaatatggaaacaaaggctgcaatggtggcttcatgacaacggctttccagtacatcattgataacaagggcatcgactcagacgcttcctatccctacaaagccatggatctgaaatgtcaatatgactcaaaatatcgtgctgccacatgttcaaagtacactgaacttccttatggcagagaagatgtcctgaaagaagctgtggccaataaaggcccagtgtctgttggtgtagatgcgcgtcatccttctttcttcctctacagaagtggtgtctactatgaaccatcctgtactcagaatgtgaatcatggtgtacttgtggttggctatggtgatcttaatgggaaagaatactggcttgtgaaaaacagctggggccacaactttggtgaagaaggatatattcggatggcaagaaataaaggaaatcattgtgggattgctagctttccctcttacccagaaatctagaggatctctcctttttataacaaatcaatgaaatatgaagcactttctcttaacttaatttttcctgctgtatccagaagaaataattgtgtcatgattaatgtgtatttactgtactaattagaaaatatagtttgaggccgggcacgtggctcacgcgtaatcccgttacttgggaggccaaggcaggcattatcaatcttgaggccaggagttaaagagcagcctggctaacatggtgaaaccccatctctactaaaaatacaaaaaattagccgagcacggtggtgcatgcctgtaatcccagctacttgggaggctgaggcacgagattccttgaacccaagaggttgaggctatgttgagctgagatcacaccactgtactccagcctggatgacagagtggagactctgtttcaaaaaaacagaaaagaaaatatagtttgattcttcatttttttaaatttgcaaatctcaggataaagtttgctaagtaaattagtaatgtactatagatataactgtacaaaaattgttcaacctaaaacaatctgtaattgcttattgttttattgtcccgaattcagttggtttaatatattgtcctctgtaatttcgatccttcttaa

SEQ ID NO: 174 - DNA, 571 bp, Homo sapiens
tcgctgccatgaatgccttcctgctcttcgcactgtgcctccttggggcctgggccgccttggcaggaggggtcaccgtgcaggatggaaatttctccttttctctggagtcagtgaagaagctcaaagacctccaggagccccaggagcccagggttgggaaactcaggaactttgcacccatccctggtgaacctgtggttcccatcctctgtagcaacccgaactttccagaagaactcaagcctctctgcaaggagcccaatgcccaggagatacttcagaggctggaggaaatcgctgaggacccgggcacatgtgaaatctgtgcctacgctgcctgtaccggatgctaggggggcttgcccactgcctgcctcccctccgcagcagggaagctcttttctcctgcagaaagggccacccatgatactccactcccagcagctcaacctaccctggtccagtcgggaggagcagcccggggaggaactgggtgactggaggcctcgccccaacactgtccttccctgccacttcaacccccagctaataaaccagattccagagt

SEQ ID NO: 175 - DNA, 472 bp, Homo sapiens
  misc_feature (1)..(472): n=a,t,g or c
ggtatcttaacttttattaatgttggntatcacggttaattaatttaaaatgggaaaataattcaagttgttagttgaaagaattagacaccagtgttttggtatcttaacttttattaatgttggttatcacggttaattaatttaaaattgtggtttattaatattttaagttactctcatattatattttattaattttttcttatttaaaaagcttgtctctgccacttcctgtgtgacctgggcaagtcattttacctctaagagcctcaaatttcctcatctataaagtggaaatataaatacaaagcttgcagaaatgtcaggaaaataaataaattaaatgccaaatagtcaatgagggatattaggcaaaggccagttttggtgggcattttaacctatggagactcagtgcctctgtgtgtcccattatcacctccaagacatcctggcaacaccaccgctg

SEQ ID NO: 176 - DNA, 412 bp, Homo sapiens
  misc_feature (1)..(412): n=a,t,g or c
gattttcaggttttatttgcctgttataattctgatattatgtacatatatatatatacttttgtttttttgtagagggcttatcagtagaccaagcacaggcatacagggaggctgtggctgctgagcagtgctgggagaaccaatctttcctttttttttgtctgtttttatttttcctgggatgggttcatcaaagctaattgctatcaatcctagaaaccacctagggactcagacatctgcctacacactagtggcgtaaagggaaggacaggggtacaaactttcaaagtcacggtgtatttacattcccaaggtgggggcgggaggaggctgaggaagacaactgttcagacgataggggagggcagggctgctaaggggtcctggggggttggggttcttcngg

SEQ ID NO: 177 - DNA, 490 bp, Homo sapiens
tttttttttttttttttttacagagtgggaaacaactttaatgagaaacccagtttcccagtttccctttcatttcaagactatgacattccgacttctttgagggcttccattgcctaggtggcctttttcttgtagttaggcattcttagagctctgggcatgggcttgtcttggccaaaatgtcttttagcaaagtaatcatatatgccaataggaaatagtgagcaaggcagatccacaagtaagcgcctttccctggcgtgtaataggcaaaagggctcttcgccaagatagcatgctggatgtcccgcagcaccggagagaagtccttgctggctaacgagttgatcaataggaggaaattccgctgtgctaagatgtagtcctggccgtagtcttcctgtacctcagcggggaggtggtccagaatgtccttctccagcttttcccacttgtcactggtgcctgcgatatttgttaagaagcc

SEQ ID NO: 178 - DNA, 445 bp, Homo sapiens
aaattttcttgattttaaaaaatgtatttgtgttttgcaggttggaacgcaaacccagtctggccacgtcccgtgaagttgtggacaaaatgtttcagtttctgttcacctctgtgcgtgtgtgtgtatgtgttgtgtgcatgtgtgtgtgtgtgtgggggtgggggatggggtaggtatgtgcttttggctcatgtttgtgatgataactgaagtcttttgtgggtccgacctgttgtagggtgtgggggaaagtgaaggaagagaatgaaggtgagtccccgccgttgcaaaccttcaccaaaccacgcggcccagttttcgtgagtacccctgtgtcccagagaggaggacccagcgtcctcggctctgcgcaaggctttcttggtctggtgggtactcgaggcagttgagaaccttgctgagctgagcgggcacctcgcct

SEQ ID NO: 179 - DNA, 474 bp, Homo sapiens
  misc_feature (1)..(474): n=a,t,g or c
ctggttcagattttttttttttaagatgtatccaataacactcacgaagtaattaaaagccactttaaccctgctagtcaaatagctattttatcaaagatgtgtgcatacagatgtatatatatatacacacacacacacagtactgtacagaaacaaacatatgcatacctactatgaacggccaaggcaagggggatgatggcaacttgactagattctgagaactgctatttgtccacagatagcatgtcaatgttgggatgggttggggagtgagcgtaggctaagaaaaaaagagatgaagtgactatgtgcttttctttaaacttagtagttacagacatagtacaggactctactnaataattagtagagatcatngaaagtctggttggatattgaccatgagaccaacagagtgaccactattacttaatgcaacattttggaaagtcnacaactgatgggaaa

SEQ ID NO: 180 - DNA, 510 bp, Homo sapiens
  misc_feature (1)..(510): n=a,t,g or c
cactttataagtttattagtttacaaacgattgcaacatcccgttaataaaatggaaacgtaagatgacttagtattttaaataacttgaagctctgtactgtggctcttgttcataagaaacactgaaccaacaagcagcagattcagcccagccaagactctgatgccccagtggaaatcactactcacaagccttaattgatacagttttacactgntttgcccaaganntgtacnataccaactcanttaagagtattntcttcaggaaacaattcatatcttcacatagtcattaaaaagtttaacaatttaatgagtaggtttccctatcacattttggcaatatcataaaatggttttagacatgaaagagctattatggatttagaaggccttaaatttcctaaaccaatattgaacatcgattaaaccnggtattggctgtaaatgggacaatatattggccaatccctggtaaccctggggccccaatataggnaagtta

SEQ ID NO: 181 - DNA, 589 bp, Homo sapiens
  misc_feature (1)..(589): n=a,t,g or c
atagctacatactttattcaaataccactgggaggcaaggggtaagaggcaagggcagaatgtacaggtcaggattctagtgtcttcagcctgccgacagcaacctgggtgctgggccctgtgtctcctggagccaagggttagggcctgagcagctgtcactctctgggaagcccagggagtggggctgactgagcaggggccatagagcctagtaagggaagagggagctggcaaggagcccagggagggaggctctgtgaattgtctctgattcctttcctggagcccctgcctcgtcacctcctgggatgcgtctcaaggtcatggaggttgtagtggaggaggactgggggctgtttctcagacaaagaatgaggttattggcacagaattggatcagggggcctctgtgcaactccttcctgccttcagaaagggagggggcattnaagggatgagaactccactaagtccctcgaancccccaatccccaatgaggctcctcaaagctactctcagccctgagtgggagacacggccagctctgggcaagtctctgggtggctagccttagcactgtggcaa

SEQ ID NO: 182 - DNA, 465 bp, Homo sapiens
  misc_feature (1)..(465): n=a,t,g or c
gagggtttttactttttatttggaaataagacatggaagttgcaaagatagactactcctatgtattcctccaactttccccaatgataatatctcacacaaccatagattatcaaaaccagaaaactgaccaggcacagtggtgtgcacttatagtcccagctactcaggtggctgaggtgggaagatcccttgagttcaggagttcaaggccagcctgggcaacacagtgagaccctggctctataaacaaaaatggnagaaaaccagaaaactggtgtcatcaattgtgtttaaggaaaccgaggctcctttaaaagtttgttataaaattatagatatctcctaaatattgaggtggaaagattcccctgggaagcagcctagtccagaaagttgaagacagtgacatcccagataggttaatacttctggccagcaccataattacacccctccttnggt

SEQ ID NO: 183 - DNA, 442 bp, Homo sapiens
ttttttgttctcaaatattttttaataaatagacgaaaccacgaaaccactagactgatggcagcaaactaaggtcagatgagaggggaaactagagaaggagcagcctgagtcagtgacacaacctcctccccgaccctctaggttaaggcacttccggggaggcaggtccttggggtcctgttacacagggtgaatgggagaggaagggattaggatcccttctccccacctttgcatcaggacacccctgcccttctcaccctaccccatggccctgtccctgatttacccactctcatctcacagcactctaaggggaagtttgggtgggaggagttcttgtgggtgggagaggtctgtgcccctgaggaagccgatcctgccaaatcttgatgcgacaccagcagcccactctaccctcttcatcccaaggagccat

SEQ ID NO: 184 - DNA, 437 bp, Homo sapiens
  misc_feature (1)..(437): n=a,t,g or c
tcaagagattagaaaaattttattcatcatcccaaactggattatatattacaaattctgatgaaaataatattaaaggtattttcaagtagtaccacaaactatctgtacctgaagataaaaccacacagtaaactggtaagtacacattgaatcaattcatctttaaaatatcactttgtttagaaattcatatatatgtttttgtagttatgaagtgggagggacacacaaatagctacataagattttcatttaacaaacatatgaactattccccatgctttgaatgaatcatcagaaggctgtaaaatcctgttatttttttcaaaggtgcatgaaacaatatttcatttccaatagcaaaaatacagtacttctaattttccttatattctctttcaaccctactgtgagagctggcttataattatatn

SEQ ID NO: 185 - DNA, 316 bp, Homo sapiens
aacagaaaaccggcaattgttatttattttaaataagaagtcataatactattaggaatagagagcaagatataaaatcatatcaacccttttagataaatacaaaggacaaatgaaatacacaaaaaacaatatattttaaaaatccactgttagtttttaggaaaaagatttagcagtttccattaagcactacatcccactattccatttttaggaaggacagatgcttgaggccataggttaccagctcttgtttggtctttaaaaatgcaagtaagttgctaacattttcaaataagatttcaacataact

SEQ ID NO: 186 - DNA, 207 bp, Homo sapiens
  misc_feature (1)..(207): n=a,t,g or c
ttttgagatcatctactcaaagtttattggactgaacagatacaaaatatggagcagaaaggaaaacccactggggaggtagaggaaatgacagagaaaccagaaatgacagcagaggagaagcaaacattactaaagaggagattgcttgcagagaaactcaaagaagaagttattaatnagtaataattaagaacaatttaacaa

SEQ ID NO: 187 - DNA, 687 bp, Homo sapiens
  misc_feature (1)..(687): n=a,t,g or c
tgcaaaccaaaccaaatcattttattgtgcaatttccttctaccagaaaattactaaaaatataaatattaactctctaaaaaatactcagaatagatctgtaatcttcctcctcctcctcagaactggagccaatcttcttctttaaacctgatggattgcatacatgtatgtcttccatatcagccacatacacaacattcagatacacttccgtctgtgcagggggatacaccagcctcctgccaggttctggaagctcaccttataatctaccaggataaagctgtgtgctgagtaggaggttatggtggggttggggagtaacaaggagataaaagaccttgtggtcccaacttccttatgtggacagagaagataggtcctttactcctcctcattaccctgncctctcatggactgggctaactgaaggccaagctcccagagaagctggactcactgtgcgggattactgagggtgtggctgccaggctacagtcacaggaaggncagactgttgagatggacatggaaaccaggtgaggctttggatggnaagctggtctggggcaaagctctgcaggatgagtagtagctgttccggcgggntttgggnagccccagaccctagcaccaggtactatgtgcagcatctaagaccagnaccagtctccaagagccccc

SEQ ID NO: 188 - DNA, 587 bp, Homo sapiens
  misc_feature (1)..(587): n=a,t,g or c
tcaaataatccatctaacagccatgagaccactcaagtatttgaggtcatcagctgcgtccatcaagacatgatattgaacatggacaccatctggtctgttggtctgtttttgttggcaaaggactccaaaaggatgcagttgtatgtgtttcagctgaaccacataccatagctcctctcccctcacaaaagggtttctctggggggagaaaagtaactgattatacctctcatgtctcaaactgaaattctgagaagcaaatggtcagttgagggccccattccagatctgccgggacgtcctcagatgtccagagctggcaaaaggtggagcaggcagcagctttgggcaccagcctgtctctttctgttctgataaggccacacacatggctttttgtgataagcttccagcccatgccactgaaataacgtttaagaacctggctgcatttcacagaaatagcgtaatgggaaatcattatgtaattaaacaaagcatgaagctcattatccttttccttttaacaaaccttcaatttcacattttagtggacactgtggnttccagagaatatatggatt

SEQ ID NO: 189 - DNA, 469 bp, Homo sapiens
atgtaaaactgacttttattacaattaaaaaagaacaaagacaatttgataagtgcctttaattacaacatacctgctatttacatgtaatcatacttttatatatagcttgaataagttttattacatgtaaactataagatattacaagttaaactccagtcttttctggatattcaattgaaatactactggcagaaacatacagaaaacaaatacccatttcagttcctcaggtaccattactggttgaatgatcaagatctggccacagaagagaagtggaaatatgcatcaaaacaaaacttattcttaacatgactaacagtattgttatttaaaccctaaacataattaataattggatcattaaaaacacaacttcaatttatatagcacctttcttccgaagagttgaaagcattcgtgcttatctctattatttcgtttgtccccataacatctctat

SEQ ID NO: 190 - DNA, 458 bp, Homo sapiens
tccgagataagaattcacttttatttttccagaattaataggaatgtcattgtgctttgaagaataaacaaggaaaagaatgataaaagagttggaaaaatgagcaggggtcatgccaagtaagaatgtgtacgatatggtaggtgtcattggtatgttataaaatgtattatgaaaatattttgatgatatttcaaaagggaaataatgctacctaatgataatatgaaaaaacgactctggctgctgtagggagaaaatataggcttggagttgggagaagagtgaaaagaaggccagttggagacaattatactacatttagctttaggaaggtgctgaaggagtcatggattgagattgttttccaagttttcagttgaacaatttcaatatggtggcattacttaatgacatagggaggccagagaacaaacagatttggaaggatgtggtag

SEQ ID NO: 191 - DNA, 476 bp, Homo sapiens
  misc_feature (1)..(476): n=a,t,g or c
ttnggagttacttaagagttttacttattgctgttcttaaattccttcccctaccacttcctcttgggcttttttatttctcttgttgatcaatctcttttttgtgatacttttcattgaatcatctcgactcctttatcccatcctttactcgactcaaactccttatgctgaacttttcaatccaaaatttctattgttttaggactctgggaagcagttgataaaaagataacacgagctactgatatggtcaggagatgttttctaaacaaattgtagaaatataaacatgaaatgtggcaatgatccctttaattagatcattgagcaataaaggatatgaaccattagtataaatattcaattcagtctttccggattgtgttgttagataagaatacatccaaaaagggccacagatcgagggagaaaccaaggaggggtgaggtcatgggttgagtgtaattggttct

SEQ ID NO: 192 - DNA, 582 bp, Homo sapiens
  misc_feature (1)..(582): n=a,t,g or c
tttttttttaagtacttatttttctttatttttatttattttctttttgggtgacatataacttaagtgtggtaaagtatataaagggcacagatcttaagtgtaccaggtaatgaattttcacaaatttatgcatccatggtaaccgctaatcagagaacatttccagcacccagacgtcttccttgtgctctttccctgtcaattcccctgctccagaagcaaccacccatctaatgcctttcaaaaacaggcacagagattcgttgtgtctgtttttgaacttcatgcgaatgaaatcttacagcatgtcttccgtgtgtctggcatctttagctctttatgtctggcaaagtcttttatgtcattctatgtagcaggagtttagaaccaactttatgggccgggcttggtggctcacatctgtaatcccagcactttggggaggcggaagcagaaggcaggcagaacacgtgaggctagggagttccgagaccagcctgggccaacataatggaanccccatctcnactaaaaattcaaaaaattagcgggcntgggtggaaggtgcaaccggtaacc

SEQ ID NO: 193 - DNA, 413 bp, Homo sapiens
  misc_feature (1)..(413): n=a,t,g or c
aagagttgcatattttactttatttttattaaattaaaagctacagtctggcagcgattccagaacagggtaaggaggttcctcacaggggtcagagaagagcggagaaagacagactgacggagactgagacacaggagagaaaggacaaggttaagggagaactgtatctgatgaacacacacagccggctccatggcgggtgacggggagctcacatcagcccaatttctcctccccggcacccgaagttcagcggtggagcagtatgtgggggcggttaggaatcaagagaccctcccttccccaccctaggtccttntctcggcttggtcgtggagcacagcacattaccagaaaaagncaagggcaattgangggcagggaaaccgggagnatattntacacgggga

SEQ ID NO: 194 - DNA, 455 bp, Homo sapiens
cttcatcaatatttattgggcgcctattatgtgcaaggccttacactaggcgctggggaagatacaaagataaatctgacagactgccctcaaagagcttacagtctagtataggagcatacagtctctggagaagatattttaagtgtaactaacctcccccatcccacccccacaaaaaaaaagaaaaaacctactagacttggtttcttccatttacttttagtttagcagcttcacgtaaaaagcataaatctgaaagtcttttaaaatgcatacttttactggtaaacaaaattcattttcattagaaaaaatgctgaatatttattgcaattaagaaaaatcttcagccgggcacggtgggctcacacctgttatcctaacactttgggaggccgaggcaggtggatcacttgaggtcaggagtttgagaccagcctggccaacataag

SEQ ID NO: 195 - DNA, 444 bp, Homo sapiens
  misc_feature (1)..(444): n=a,t,g or c
ggcagtttttcctgtttattatatagttattctaaggtggtaagtgtcacaaagttaacttcaagaggaataacatggtccagtgtgaaacacaaggtacaacattttacaatgaaaccacagcacaaagtaactgaactttcaaaattgggtagttcaatgaaacattttgtcaacccttagctctataaagctctgctgatggacttagttgatggatttaaaaaatatattgctgtgtcaaatgttttaacacaaaatgtttttttttaaagagaatacacatccaatcaactgaaactgtgagcagaaagtatgtaacctctttataaaaaccgttatccaaatttacaacattcataatatatttcaaagtanagagttcttagaaaaataaactcaattccttgcttactgatgagtatcaactcctcaaaacacatc

SEQ ID NO: 196 - DNA, 450 bp, Homo sapiens
  misc_feature (1)..(450): n=a,t,g or c
aataccattttgagagtaattttaaagactaatgcgaaagttcgggagcacattgtatatttgaaataagtgtagtgtgtgcaaagaccattttctacctgtggataaaaatcaattcccccaaaggcctaaaagcatgaacaatgtttattttcgagtaaataattaaactacatatttaacatggaaaaaattaaatgaatgtcaaaaccaaaattaagaactataagcaaagcatgcagtctctgttaacaaaacttagttgtgaaactacatttttcattttgtaaatgccattatttcatttcataaaatggtaaaaatcctcagtatcattctttacacttgatgcggcaaacacttcctttccctattttcctcggnatttcctgcaaaataaatctaccatctcaagttccntaatggttcatactttcttctcaacatatt

SEQ ID NO: 197 - DNA, 447 bp, Homo sapiens
atcaatcatatttctgtcatctccaacctaagatattttttagattgtctccctattctttgattcaaaagccaattacagaaactatgaacttgacctaattctggtttttgacaattatgagacagaaataaagaaatcgcaagcagttcttttctttgcacactgaccattttttaattacatcatcctctatgatgatggtgctttcacaactgcagctctcctgtatgtcaaaatcattctggtttccaggtaaatggacaaaggagatttgccttcagtgtctagaaggcaatttacttttcagctgccttaattacctatagtttaaagaaaggaatgccacatatagggtcctttaaacatctaaaatggggaggttggcctccaaggggcaccattcccaaacatttgatttcaagtcccagaagcctttcatatatg

SEQ ID NO: 198 - DNA, 288 bp, Homo sapiens
  misc_feature (1)..(288): n=a,t,g or c
gcaacaaaagaaactatttatttggaatatgcattaccagtacaaattaggagactgtaaaacctacaccgtgttagtatcattagagaacacaaaagttcagttggaatcaaaagggacagaagcctgtgctctcacagaagcagaaaagcttaaactttcaaaaccaaaacagagcagagtttgcaggtttatattctgaataataagaaatggggnggggtagggggagaataaaaccaacaaccaaaggaaagcatttcaaattgaaaatgccaaaggaaagaa

SEQ ID NO: 199 - DNA, 318 bp, Homo sapiens
ttttttttttttttttttttttatttttccataaaaatgtaattttaatgatacagaaatagtatatgtacatttctttccacagcagcacttcattcatctctaaaaaatttaacaaaattaaggctaaatcagagcgagctgataggaaggggtattctatgtggtggtcttcttaaagaatgttctcataaatataggatgttctgcagacaagaaataaaaataaaacatgctgaacaagataccaaaaatgggaaatgcagtagaaaatgagcccctttctaccaatctactaagaatcccaactcccctggg

SEQ ID NO: 200 - DNA, 231 bp, Homo sapiens
tctatttagatcggattttattttgcaatatttattatatattcaattcaaatgtactcactattgtgctaggcaattgaaagtaaaaagtataaagctgcattttgcgctctcagtgaggtttaagtcagggaaatgaggcatgcacacaaaataacgagaaagtagtataatagctgtgatcattagttatcaaaataagtgaatgagctaataatcattgttagaata

SEQ ID NO: 201 - DNA, 460 bp, Homo sapiens
taacagaaaaaagtcaaatgacaattttaatagactttaaaacagtgtacaagtaaaaaacactggttttgtatttcaaaagttgaaggaagatatccagtcattaaacagtctacaaaacatatgccagtaaattacataaaagactatgtacaatataaaaagagctgaaaacagtcttcactgtaaaaataatttaaaacaaacttttcaatttaaaatatcatctatagcacacaaacatcatgcaaatggaaaactaaatatactgcattctttagtgtagccaaataaattcagattgagacatcttataagtaagggaaatggccattcaatacgatttttttctctggcagtaatggtcctagctgggtgttttatgcataaagaacagctatatttcaaaccctttttattgtaataaatactaaagcaacagaggaatactttattaatt

SEQ ID NO: 202 - DNA, 440 bp, Homo sapiens
  misc_feature (1)..(440): n=a,t,g or c
gtttattaaaccagatttattctccacaagctgaagatacctgaggttacatgaggactggcattaaataatttataaatgtatttttgactgacagacttttatcataaggattcatgtgtttacaaaagcaaaatccaacctctccagagctagaaagtgggaaggtgcccgggctgcaacacagccttgggggaggatgaggccacataattctctctgcccacactctcagaatgccccaagaagttagtagctacacaaagccaagccttgggggaaaacctggtccgtggtgtggactctccaaaatgcagacccaaccggangccgggcccgcctttccatctggaggcactgcagggcttctgaaagcggcccatcccaggagcctggcaaacacccccagagaccctcaggatgcgcagccccggggcttt

SEQ ID NO: 203 - DNA, 210 bp, Homo sapiens
aaagtaaaggatttattgtaatctgcttacagtcctttgcaaagacagacatatgtttttgcataaagatataaattgcttcattttaaactaatttagtgtttttttaaattatatgaacttttggtgaattatgaactgtaccaaaccaagatttttaagagcaatatggtacaaaaataagagcagacagacaatttggactgggac

SEQ ID NO: 204 - DNA, 529 bp, Homo sapiens
  misc_feature (1)..(529): n=a,t,g or c
ttttttgactagaaagggagcactttaatgaacagaagtacagacgtgctggcaaggatggaaatctccactggttcctggcccccttcacctccatgcatccccagcatgggtgttaatcattacccaagctctcgctgttccccctcaccccctgcagagtccagcaggtctagatacgtgctctttgaaatgtgttctgggattaaaaatggtgccctgaggctgtctaaccctcacaaaagacagacacatgcacacacgggccttggggagggctgtgtattagcagtcaggtgggccctcctgggagagcttgctcaagaactcttctcggaaggaaacccaccttaaggtagggttctgataggcagantcccagagggacagccagctgctagaagatggggttatccagggtttgtaaggtttaaacaacgggcagggagncaaacgagtcaaatggtttcctcgtgcgaattttggctcgaggcaaattcctatagtgagngtattaaatcgtaacatg

SEQ ID NO: 205 - DNA, 445 bp, Homo sapiens
  misc_feature (1)..(445): n=a,t,g or c
ttttcattactgagaggacgctttatttccttgtgcaaaagagcatttcaagtcaaggtagtcagtcacacttgggcgagtccggctcacataggaactgggggtagaagaggtactttaagttgtactcagtttgggctaagcagttagcaatctcctggtcacacttgcacaacagttcttggcatttgttctctgccggtccgcacaggacgctctgattgacgcactgccaggagtagcgctctgtcttggggctgcagcggcctcctcagctcgagtgtaacaacagtcgtggccatggcagcaccagtcaatggcatcgcggggctggccatggcctcccaagccacaaaagcaaccatatttcatataggcgatgggggttcggggaccaacacaacccccagttcctgccagtttccaggatcccangccggtggnt

SEQ ID NO: 206 - DNA, 197 bp, Homo sapiens
tttttttttttttttgttatatacattttattgaaaaaaaattttacaacaaaatattttggcaaactgtaaaagtatacataagtgcaaatatatcctccttttaaaatacaagcaaagtgtgagtatacacggtcataaaaatatctttaaaatatggtggtagaaaacaaccttgtaaaaacgttgtattgtcc

SEQ ID NO: 207 - DNA, 413 bp, Homo sapiens
  misc_feature (1)..(413): n=a,t,g or c
ttcttttagctgccagaactttgttaaccacctgggaccgtggacatcttctctcgtgtcttgagccctcatccccacccctccaagccctcatgcccaccacaccgtgtcccacattccccatcctcccctgtctgctccccatctcaagtccaattccaaggccagagccctggcagcttttctgggagacagcatgaaaaggaggggagtggagatggcagagatggggtggagccagtgcgctgtgggtcctgttggcgtggtgatgtgggggccaatcctgaggccagaggttcatcaccgtgatctggaagcccacggggcccctgggtagaaacttgggaagaacaaagggggaaaagaaaccagaacaggaagaagacgagtaagcnttccgagtttcacgagat

SEQ ID NO: 208 - DNA, 256 bp, Homo sapiens
  misc_feature (1)..(256): n=a,t,g or c
tctgatanctatgtgaaaattcttttcaaagtaggtaaaagccatcactatatttcaaagaggtcacagtgacatcatatacaaaaggaaccagattgaaaaagatattgctgacatagccagtagtgagattactaaagantaaacagaaatgccttgggaaattatttttacaccggcttgaattgaaacattaaagcaaaatgaaagctgtaaggngttcactagttttcccaaatgcgttgtcaagtttatt

SEQ ID NO: 209 - DNA, 331 bp, Homo sapiens
  misc_feature (1)..(331): n=a,t,g or c
ttttnttaggngcaacaatcaagctctatttttgtaattaaaaatgtatccaaagggaaaaaagaaacaaaaggaacaatatttgtactctatgttgctgcagagagcagaactgcggagggggtgctagtcccaaggggtggactgtgctgtgctagtgccctaaatcctgcaagcgcggggttgggggggcgggggagaccgctgtcgggggtcgtgagttccgggcccttgtgtgcatgttcacgtcctgtcattcttgcccccagctgagagagcagtagaggaaaggcactacatccaccagcctttgcattctcctcggagcaca

SEQ ID NO: 210 - DNA, 410 bp, Homo sapiens
  misc_feature (1)..(410): n=a,t,g or c
ctttaatgttagtgacagttctatacagcacagacataactgaagaaacacattactttgatttgggtttatgtattgtacttttaatcacttactgagaatatttcaaatttatattctcatcaggaaaatgtaaaaaagatactgatatatattctatgatttttatgccacaaacacccctgttatgagatcatttaatagggaaaacaattatactgacatctcttgttccnattttccccattaggatatataccatacaacttcaaggataggttttaaaaataatccattcagggttattcntaaaattttgcccnataaaattnggccaaggtatggcccttctggttaattgcctaaaccccaatatttccacccatataaaggcntggtggaccnccatt

SEQ ID NO: 211 - DNA, 349 bp, Homo sapiens
  misc_feature (1)..(349): n=a,t,g or c
ttggccaggctggtgtcacaactcttgacctcaagtganctaccacccttggcctcccaaagtgctgggattataggcgtgacacntgttgcccggccaacattaatatttttaattagctactacagcttagagtagctgctatgggagtgtggcctttttgattaaatactagctgatcaaccctagaatataaatncttgttttataacatttagatttaaataacaatanggaatgtaaggcnccatgaagggcaaggaatgcctttttgttttgttcactgctggggtctaaaataatgccggggctcaaatatttgttggantgaggtaaatatggctggact

SEQ ID NO: 212 - DNA, 355 bp, Homo sapiens
  misc_feature (1)..(355): n=a,t,g or c
aagttttctananttttaatgaagccaataaggcatataaattgtgttctggcagacattaagacatgctttctcttaccaaagaaaatggcacgttttatcaaaatttgacaattcagagtaaagggtactgagattaagcttcagagcaccaacttaaacaaaacaaccaaaaaattgttatccaacgtgggaaagagggagcaaggaaccaagggcataaagggggaattaaatatgtgttccntcccatctccaaaatccttttaggggaatagggagttctgggccncttgtgaggccaccacattgcaccccccaacccccattcccaggatcttaaattttcgggntg

SEQ ID NO: 213 - DNA, 385 bp, Homo sapiens
  misc_feature (1)..(385): n=a,t,g or c
tttttttttttttgagattgaaaccagacatacttattttaatcatattttatataaaatagacatttacataaatttaattttggaaagacctaggcaaagtatacatcattagactcaatgggagaaatactttatggaagataaattctaacgggcacagccaaagtaacaaaaatgtacatttacatacaactgatccaaacaggaagtaaaagcnttntggaaaaanggancatgttgcaantcatttccccctggacaaanggagggntctgcgtgatttacaggcaattcaattgttttccacntttttaaaggcaagcctggcttctacaggtattttanttccttgggggggagtttcacctcntcttttttcccc

SEQ ID NO: 214 - DNA, 294 bp, Homo sapiens
  misc_feature (1)..(294): n=a,t,g or c
taganaattnnctgtaggtgttcctttattttatcaaaaatagtaattttgtataattntaaatcaggaaatctaaggggacatgttacccaatcacaacagctaataaaatgcctcccattacagacccagctttttaaatattcaataacattcacagaattggcaagttagtctccaaaaaattctaacagaaactgcaactcaaaaagtgtgtctatatcagagatggtggtaacttcctcaaagaagttacatgcaaatncccaggggtctcatggtttacaaggtgac

SEQ ID NO: 215 - DNA, 368 bp, Homo sapiens
  misc_feature (1)..(368): n=a,t,g or c
taagagataaaattattttattggttcaaataaactgaaaaaaatagacatacaaatcacttagttgtaattttaaagaattcctcaaactaaacttgaatttaagcataagcttatgcttacagattactatttgctagcttactaattattatttgaattaagcagtaagaactaaaatttaagtttcttaggttttacagattgatttgaagggcatgctgtcttgctaatattgaaataaatttatttcttaaaaattattattttactggggttatgtcagaggcaggngctgtggttcttgagggnagggncaagtttcttctcagggatcntccaaaatgaaggctctcaccgttctgccc

SEQ ID NO: 216 - DNA, 235 bp, Homo sapiens
gacttacaggggaactatatatgtatatgtatattttattaaacacccatctgcactatcagtattgcactaatgtggaatttgaaagactattttgctgatactgtatatatgcgcatcattcctgattagattgttgtaaagacaatctgaaagatctaaggttttaaaataatttggtttgaaaatatacagttgtcttgaaggaattgctgtgatacatgaaaaaaaaaaa

SEQ ID NO: 217 - DNA, 195 bp, Homo sapiens
  misc_feature (1)..(195): n=a,t,g or c
gccaagcaatcaagcaaaacacaagaccaatagaattagtagacagaagccttggggacaatggcagtgcccttcctgagtaagacatgaatgccatctggnggntccatttgaaactacagtgcagtaaccaaagancctaatgttttcaagcataaaggnacttttngtgaacaggtgggcaacacaggcagg

SEQ ID NO: 218 - DNA, 343 bp, Homo sapiens
taatggttaaggaggaaggtttattggcttcaattccccagttgatgttcaacactttatttagttctcatttggattttaaacatttgcttgacaaataatttcccatcaatttccatttctttggaaagctcccacgtgtaatttatttttaacatctctgaagagcagaattaatgatatttcctagctgttgctccagatcatgtagggtagaggaggctgaaaactgctacaagggaaggcatctgtattgtttcaaaacgtcaggacggtacgggatactctttccagagcgacgagggtcaaatcccttcatttatttttttcaaaagggtaaaac

SEQ ID NO: 219 - DNA, 312 bp, Homo sapiens
  misc_feature (1)..(312): n=a,t,g or c
tttttcggtagaagaacttttattgaacagtaagattcaagatttcaccagggtnagagggggaattgaaaattagtagaaaaattccaaggggaccagttagccacaacaaagaatggggttcagggaacttcttagggatgtatcttcccctcaatacaggtagaggagcagcatcagaagcagggctttggagagaggcatagaagagaatcaccttctcctggcccacgcaagctacctgggtgtacctntcaagttcagggccagcttcttgttccttccccgctcttggtagatgtaaaaggtttc

SEQ ID NO: 220 - DNA, 282 bp, Homo sapiens
  misc_feature (1)..(282): n=a,t,g or c
agactttattcaaagaccacgggggtacgggtgcaggaaggggaggaggggctggggggaggccaagnaangaagcatgncaccgaggtccagcttcacggtatttggaggtagcacggtgctcacagaaagcaggaacttgtccagggaggcgtcacccagggtgaactcggcggggaggtgggcgccagggtcaccagcaggcagtggcttaggagcttgaagttgaccgggtccacccaagcttgtgcgcgtnccaggtcntcagggngacangcgttg

SEQ ID NO: 221 - DNA, 493 bp, Homo sapiens
  misc_feature (1)..(493): n=a,t,g or c
tttccaagccaacatttattnttgcacaagcctgttgcagtcctgaggggatcttctggcanaggtntgggtaggagctgagtggccactggggtgaagggagacagaggaggctntgccagcaggntcctatccagatgatacatgagatggaggctcctcagccacactccagggagggtggggtggcaagggggattcagggataatggcattaataatacaagtggtaaacaaataaccaagaggntctggctggttacgntacacaaaanttagcagtaagagtccgtgctttcacattcctatcagacagatctgagttcaaatcctgtatgtntagcagggtgaggtatctgctttctttcagagcccatgggtgcacatctctgagcctagttacaacagttggcacataggtnggtgacaaggagggcagctctttgattcctgnttgcttccacagcacagagagttaagtatggctggtnta

SEQ ID NO: 222 - DNA, 305 bp, Homo sapiens
  misc_feature (1)..(305): n=a,t,g or c
ttaattatngatattccccctcaccgccctcagggancgggagaagtcacacgaccatagggagcttggacttggtggtcgtcacggtgctggcagacgagggtctttccaggaaccccttgctagaatcagccctcatacaagtgtgctcagagatcccaggagcgatggcatcctcccgaagtcactacccccatatgtctccttgggcttcttccccctctctttctggaacctgaccaggcagaacgcagcaactgncagcaacagcacgcccagggagcaccccaatcagagntccggcc

SEQ ID NO: 223 - DNA, 263 bp, Homo sapiens
  misc_feature (1)..(263): n=a,t,g or c
cactcaataattttaattgtcctaaccttcaatttcactgattcccttcttctgcctgccaaatctgcctctgaaaccctctattgaatttttcattttagttactgtacttttcagctccagaattccttttcattttcttttcaggntttctatctctttactgttatttccattttgttaatacattttgtcttgatgttccccacatactcctttaggggctttcaatgtctttaacacagntggttttaagggctttg

SEQ ID NO: 224 - DNA, 2263 bp, Homo sapiens
  misc_feature (1)..(2263): n=a,t,g or c
gagccggacgtgtgcgcgaagatggcgggccggagcatgcaagcggcaagatgtcctacagatgaattatctttaaccaattgttcagttgtgaatgaaaaggatttccagtctggccagcatgtgattgtgaggacctctcccaatcacaggtacacatttacactgaagacacatccatcggtggttccagggagcattgcattcagtttacctcagagaaaatgggctgggctttctattgggcaagaaatagaagtctccttatatacatttgacaaagccaaacagtgtattggcacaatgaccatcgagattgatttcctgcagaaaaaaagcaatgactccaacccttatgacaccgacaagatggcagcagaatttattcagcaattcaacaaccaggcctactcagtgggacaacagcttgtctttagcttcaatgaaaagctttttggcttactggtgaaggacattgaatccatggatcctagcatcctgaagggagagcctgcgacagggaaaaggcagaagattgaagtaggactggttgttggaaacagtcaagttgcatttgaaaaagcagaaaattcgtcacttaatcttattggcaaagctaaaaccaaggaaaatcgccaatcaattatcaatcctgactggaactttgaaaaaatgggaataggaggtctagacaaggaattttcagatattttccgacgagcatttgccttccgagtatttcctccagagattgtggagcagatgggttgtatacatgttaaaggcatcctgttatatggacccccaggttgtggtaagactctcttggctcgacagattggcaagatgttgaatgcaagagagcccaaagtggtcaatgggccagaaatccttaacaaatatgtgggagaatcagaggctaacattcgcaaactttttgctgatgctgaagaggagcaaaggaggcttggtgctaacagtggtttgcacatcatcatctttgatgaaattgatgccatctgcaagcagagagggagcatggctggtagcacgggagttcatgacactgttgtcaaccagttgctgtccaaaattgatggcgtggagcagctaaacaacatcctagtcattggaatgaccaatagaccagatctgatagatgaggctcttcttagacctggaagactggaagttaaaatggagataggcttgccagatgagaaaggccgactacagattcttcacatccacacagcaagaatgagagggcatcagttactctctgctgatgtagacattaaagaactggccgtggagaccaagaatttcagtggtgctgaattggagggtctggtgcgagcagcccagtccactgctatgaatagacacataaaggccagtactaaagtggaagtggacatggagaaagcagaaagcctgcaagtgacgagaggagacttccttgcttctttggagaatgatatcaaaccagcctttggcacaaaccaagaagattatgcaagttacattatgaacggtatcatcaaatggggtgacccagttactcgagttctagatgatggggagctgctggtgcagcagactaagaacagtgaccgcacaccattggtcagcgtgcttctggaaggccctcctcacagtgggaagactgctttagctgcaaaaattgcagaggaatccaacttcccgttcatcaagatctgttctcctgataaaatgattggcttttctgaaacagccaaatgtcaggccatgaagaagatctttgatgatgcgtacaaatcccagctcagttgtgtggttgtggatgacattgagagattgcttgattacgtccctattggccctcgattttcaaatcttgtattacaggctcttctcgttttactgaaaaaggcacctcctcagggccgcaagcttcttatcattgggaccactagccgcaaagatgtccttcaggagatggaaatgcttaacgctttcagcaccaccatccacgtgcccaacattgccacaggagagcagctgttggaagctttggagcttttgggcaacttaaaggataaggaacgcaccacaattgcacagcaagtcaaagggaagaaggtctggataggaatcaagaagttactaatgctgatcgagatgtccctacagatggatcctgaataccgtgtgagaaaattcttggccctcttaagagaagaaggagctagcccccttgattttgattgaaaatgaa

SEQ ID NO: 225 - DNA, 2895 bp, Homo sapiens
cgggctcgatcgcccgggagccaggactcggcgacgcgaggctgccgggctacccggccgaggcttcgggggcgcaaactaatgggactggctcgctcggcagcatctccccgctcttctaagtacactgagcagggcccgcgctgaagtagaagctgtccgggggcgcgtagcccggagtcccagtgtggcccggaggaacggagcccgtgccagggcggcccagtcgggagcccggggaccgagcttgtgctgtggggaaacccccacttcttccaagggacagcgatcccgggacggtcgaggcgtcggggcggtcaccgagacctctgcgggaagaccccgtcggggagagggcgcgcagccccgaagcgtctcgggaagtcgagcggaatcgggcgggatcacccgggggcgcagagcccccgtcgcgcctcgtgcggcagcggagagcccaggagaacgagccctcgggggccgaagcccatgcccgggttgggggcggctgcccagtgagtcctcctggccggccgggcggagaagagcgacaccgaagccggcgggaggggagcacttcaaggccggcggctgcggaggatgggcgcctgagcggctccgagcgcagcgcggcagaggaaggcgaggcgagctttggtgaggaggcgccaagggatcccgaagtgcagtctgcccccgggaagatggctcggcctgggcagcgttggctcggcaagtggcttgtggcgatggtcgtgtgggcgctgtgccggctcgccacaccgctggccaagaacctggagcccgtatcctggagctccctcaaccccaagttcctgagtgggaagggcttggtgatctatccgaaaattggagacaagctggacatcatctgcccccgagcagaagcagggcggccctatgagtactacaagctgtacctggtgcggcctgagcaggcagctgcctgtagcacagttctcgaccccaacgtgttggtcacctgcaataggccagagcaggaaatacgctttaccatcaagttccaggagttcagccccaactacatgggcctggagttcaagaagcaccatgattactacattacctcaacatccaatggaagcctggaggggctggaaaaccgggagggcggtgtgtgccgcacacgcaccatgaagatcatcatgaaggttgggcaagatcccaatgctgtgacgcctgagcagctgactaccagcaggcccagcaaggaggcagacaacactgtcaagatggccacacaggcccctggtagtcggggctccctgggtgactctgatggcaagcatgagactgtgaaccaggaagagaagagtggcccaggtgcaagtgggggcagcagcggggaccctgatggcttcttcaactccaaggtggcattgttcgcggctgtcggtgccggttgcgtcatcttcctgctcatcatcatcttcctgacggtcctactactgaagctacgcaagcggcaccgcaagcacacacagcagcgggcggctgccctctcgctcagtaccctggccagtcccaaggggggcagtggcacagcgggcaccgagcccagcgacatcatcattcccttacggactacagagaacaactactgcccccactatgagaaggtgagtggggactacgggcaccctgtctacatcgtccaagagatgccgccccagagcccggcgaacatctactacaaggtctgagtgcccggcacggcctcaggccccagggacagtcggcctggaccggacctctcctttcgcccccacaccccctccccttgccagctgtgcccacctttgtatttagttttgtagtttcttggcttttataatccccctttttccctgccccctgggcttcggaggggggtgcttgtgcccctaacccccatgctcttgtgccttccccctctggccaggcctctgggctccgtgggggcgccccttcttggaaggcagggctggacactgatggacagcaggcagggagacagtcccctggtcctgcccctccctcgccccccttgccaccttcccaggactgcttgtccgctatcatcactgtttttaatgcttttgtgttcattttttagctgtcaactcattttcatctgttttttgaagaaaaatggaaaaatgtaaaaggcagcccctccccaggctttgtgagcctggcccaagccagtacaagagggcctggggcacgatgtggtcagccaggaagcataggatgccatttcttttatagattccttggtatttctggtggggtaaggggcaggccagggctgttcacgcccatgagggaagaggaaagtgccactgggcaaggtgtcccaccctcccctcctgaccctcctacgaggcttatcctggcaatggggtagtcactgccacccttccacacacacacacacacacacacacacacacacaaaaatcccttccttgtgggattcttgggcatctcctgcctccctcactctcacggtaattaatgtcttaattggctgttgcctggggaacaggagagctgctgcaggcagatgacctcatggggggtggagggaggtgaggtgcccaggtgtctatttaccctgcagagctgggagtttcaccccaccccccaccctgttctctccttacctttggcatcctttggcctggtggggaaacagaggcccagggtggagacctaagcgggtataagaccaggtggcctgctccttttctgggccctagcacaggtgggtaacccccacccaacccagctcctgctgctgtcccagtcttgggctgggccctggaaagaggaagagcctgcctgggagcaggtcgtctcgttccaagatct

SEQ ID NO: 226 - DNA, 2117 bp, Homo sapiens
catcggagcagaagctcggggttgctgggcggttccgaggtgacggaagcgggagggtgcgggagaagtcgctgttcgctctgcgagtggctcgccagcgaagaccccgcctgcgcccccggggacggacgaccgcggtgccagggtcccgcgacctgggaccccctcgcggctccgggtggtctacgaactgtgatggcggcggccgcggtgatgggcccggcgcagatcctctgtggttgttgaattgtaacaagagagagaactctggctgcctgagagggcatgactctagtcacagcaggaggggcttggacaggccctggttgttggcatgaagtgaaggatgaagagtcatcttctgaacagagcatttctatagcagtgtcacatgttaatacttccaaggcaggtttgcccgcacagacggctctcccttgtgacatatgtggccccatcttgaaagatattttgcacctggatgaacaccagggtacacaccatggactgaaacttcacacatgtggggcatgtgggagacaattctggttcagtgcaaccttcatcagtaccagaagtgttacagtatagagcaacccttaagaagggataaaagtgaggcctcaattgtgaagaactgcacagttagcaaagaacctcatccgtcagagaagccctttacgtgtaaggaggagcagaaaaacttccaggctactttgggtggctgccaacaaaaggccatccacagtaagaggaagacacacaggagcactgagagtggggatgcatttcatggtgaacaaatgcattacaagtgcagtgaatgtgggaaagctttcagccgcaaagacacacttgtccagcaccagagaattcatagtggagagaagccttatgagtgcagcgaatgtgggaaagccttcagccgcaaagctacacttgtccagcatcagagaatccatactggagaaaggccttatgaatgcagcgaatgtggaaaaaccttcagtcgaaaagacaaccttactcagcacaagagaatccacactggagaaatgccttataagtgcaatgaatgtgggaaatattttagccatcactccaatctaattgtacaccagagagttcacaatggagcaaggccttataagtgcagtgattgtgggaaagtcttcagacacaaatctacacttgttcagcatgagagtattcacactggagaaaatccttatgattgcagtgattgtgggaaatcctttggccacaaatacaccctcattaaacatcagcgaattcacactgagtcaaagccgtttgagtgcattgaatgcgggaaattctttagtcgaagttctgactatattgcacaccagagggttcacactggtgaaaggccttttgtgtgcagtaaatgtgggaaagactttatcagaacctcccaccttgttcgacaccaaagagttcacactggagaaaggccatatgagtgcagtgaatgtgggaaggcctacagcttaagctcccacctcaatcggcaccagaaagttcacactgcaggcaggctttaggagtgctttgaatacaacaggactcatcaatcagatgttgaatttcatgtatctgaacattgacacaaaggagataccttatggtgccaggtacgtgggaaccttctagggatatgttgcactttctgacttgctcaggttttttgccagagttatgtcactgtcaatccatgtggccgaaaccatcttaactctaccagctaagataccccagcattgggaaggcagggtttgtattgtcagtccctggagaaaatcatgaaatgcctgagttcattgggggtcctcattcccttctgtatgacaggtataggtatggatctgacccatttttagccaagagggtctgagctgtatctgctggtggcttatacaaaaagtttactttcttcatggatattcttggtctcacatacttgtaatcaagtttttccagcctccaagtcacctggcctgggaaagtacttgcctcatgttgctctggtttgtgataataaaggctttacagtttaagccacagggaaagaaaaaaaaaaaaaaaaactttag

SEQ ID NO: 227 - DNA, 3260 bp, Homo sapiens
atccagaaagcaccatagcaaccagtgatgtcatgtctgaaagcatggtggagacccatgatcccatacttgggagtggaaaaggggattctggggctgccccagacgtggatgataaattatgtctaagaatgaaactggttagtcctgagactgaggcgagtgaagagtctttgcagttcaacctggaaaagcctgcaactggtgaaagaaaaaatggatctactgctgttgctgagtctgttgccagtccccagaagaccatgtctgtgttgagctgtatctgtgaagccaggcaagagaatgaggctcgaagtgaggatccccccaccacacccatcagggggaacttgctccactttccaagttctcaaggagaagaggagaaagaaaaattggagggtgaccatacaatcaggcagagtcaacagcctatgaagcccattagtcctgtcaaggaccctgtttctcctgcttcccagaagatggtcatacaagggccatccagtcctcaaggagaggcaatggtgacagatgtgctagaagaccagaaagaaggacggagtactaataaggaaaatcctagtaaggccttgattgaaaggcccagccaaaataacataggaatccaaaccatggagtgttccttgagggtcccagaaactgtttcagcagcaacccagactataaagaatgtgtgtgagcaggggaccagtacagtggaccagaactttggaaagcaagatgccacagttcagactgagagggggagtggtgagaaaccagtcagtgctcctggggatgatacagagtcgctccatagccagggagaagaagagtttgatatgcctcagcctccacatggccatgtcttacatcgtcacatgagaacaatccgggaagtacgcacacttgtcactcgtgtcattacagatgtgtattatgtggatggaacagaagtagaaagaaaagtaactgaggagactgaagagccaattgtagagtgtcaggagtgtgaaactgaagtttccccttcacagactgggggctcctcaggtgacctgggggatatcagctccttctcctccaaggcatccagcttacaccgcacatcaagtgggacaagtctctcagctatgcacagcagtggaagctcagggaaaggagccggaccactcagagggaaaaccagcgggacagaacccgcagattttgccttacccagctcccgaggaggcccaggaaaactgagtcctagaaaaggggtcagtcagacagggacgccagtgtgtgaggaggatggtgatgcaggccttggcatcagacagggagggaaggctccagtcacgcctcgtgggcgtgggcgaaggggccgcccaccttctcggaccactggaaccagagaaacagctgtgcctggccccttgggcatagaggacatttcacctaacttgtcaccagatgataaatccttcagccgtgtcgtgccccgagtgccagactccaccagacgaacagatgtgggtgctggtgctttgcgtcgtagtgactctccagaaattcctttccaggctgctgctggcccttctgatggcttagatgcctcctctccaggaaatagctttgtagggctccgtgttgtagccaagtggtcatccaatggctacttttactctgggaaaatcacacgagatgtcggagctgggaagtataaattgctctttgatgatgggtacgaatgtgatgtgttgggcaaagacattctgttatgtgaccccatcccgctggacactgaagtgacggccctctcggaggatgagtatttcagtgcaggagtggtgaaaggacataggaaggagtctggggaactgtactacagcattgaaaaagaaggccaaagaaagtggtataagcgaatggctgtcatcctgtccttggagcaaggaaacagactgagagagcagtatgggcttggcccctatgaagcagtaacacctcttacaaaggcagcagatatcagcttagacaatttggtggaagggaagcggaaacggcgcagtaacgtcagctccccagccacccctactgcctccagtagcagcagcacaacccctacccgaaagatcacagaaagtcctcgtgcctccatgggagttctctcaggcaaaagaaaacttatcacttctgaagaggaacggtcccctgccaagcgaggtcgcaagtctgccacagtaaaacctggtgcagtaggggcaggagagtttgtgagcccctgtgagagtggagacaacaccggtgaaccctctgccctggaagagcagagagggcctttgcctctcaacaagaccttgtttctgggctacgcatttctccttaccatggccacaaccagtgacaagttggccagccgctccaaactgccagatggtcctacaggaagcagtgaagaagaggaggaatttttggaaattcctcctttcaacaagcagtatacagaatcccagcttcgagcaggagctggctatatccttgaagatttcaatgaagcccagtgtaacacagcttaccagtgtcttctaattgcggatcagcattgtcgaacccggaagtacttcctgtgccttgccagtgggattccttgtgtgtctcatgtctgggtccatgatagttgccatgccaaccagctccagaactaccgtaattatctgttgccagctgggtacagccttgaggagcaaagaattctggactggcaaccccgtgaaaatcctttccagaatctgaaggtactcttggtatcagaccaacagcagaacttcctggagctctggtctgagatcctcatgactggtggtgcagcctctgtgaagcagcaccattcaagtgcccataacaaagatattgctttaggggtatttgatgtggtggtgacggacccctcatgcccagcctcggtgctgaagtgtgctgaagcattgcagctgcctgtggtgtcacaagagtgggtgatccagtgcctcattgttggggagagaattggattcaagcagcatccaaaatataaacacgattatgtttctcactaaagatacttggtcttactggttttattccctgctatcgtggagattgtgttttaaccaggttttaaatgtgtcttgtgtgtaactggattccttgcatggatcttgtatatagttttatttgctgaacttttatgataaaataaatgttgaatctctttggttgtagtaactggg

SEQ ID NO: 228 - DNA, 1334 bp, Homo sapiens
tcaggaactggagcagcaaagagaagaacaaaagcgcagagagaaggaagcggaggagaggcagcgagcggaggaaagcaggctctgtgctccttgaagcaagcgctccagaggctccggaagccacggctggattggagacaagatgggatcctcagaggaccaggcctatcgcctccttaatgactacgccaacggcttcatggtgtcccaggttctcttcgccgcctgcgagctgggcgtgtttgaccttctcgccgaggccccagggcccctggacgtggcggcagtggctgcaggtgtgagggccagcgcccatgggacagagctcctgctggacatctgtgtgtccctgaagctgctgaaagtggagacgaggggaggaaaagctttctatcgaaacacagagctgtccagcgactacctgaccacggtcagcccgacgtcacaatgcagcatgctgaagtacatgggcaggaccagctaccggtgctggggccacctggcagacgccgtgagagaaggaaggaaccagtacctggagacgtttggcgttcccgctgaagagctttttacggccatctacaggtccgagggcgagcggctacagttcatgcaagctctgcaggaggtctggagcgtcaacgggagaagcgtgctgaccgcctttgacctgtcagtgttcccacttatgtgtgaccttggtgggacacggataaagctggaaaccatcattctcagcaaactatcgcaaggacagaaaaccaaacaccgcgtgttctcactcataggtggggctggagctctggctaaggaatgcatgtctctgtaccctggatgtaagatcaccgtttttgacatcccagaagtggtgtggacggcaaagcagcacttctcattccaggaggaagaacagattgacttccaggaaggggatttcttcaaagaccctcttccggaagctgatctgtacatcctggccagggtcctccatgactgggcagacggaaagtgctcacacctgctggagaggatctaccacacttgcaagccaggtggtggcattctggtaattgaaagcctcctggatgaagacaggcgaggtcctctgctcacgcagctctactctctgaacatgcttgtgcagacggaagggcaggagaggacccccacccactaccacatgctcctctcttctgctggcttcagagacttccagtttaagaaaacaggagccatttatgatgccattttagccaggaaataactgtttcttgtgacctggaactaacgtcaaagcacacaagacataataataaagacatgtacctcca

SEQ ID NO: 229 - DNA, 4977 bp, Homo sapiens
caagataccctccaggccctcatcaccttttttcaagtcaagatttcatcccatacatgcatgactcaatcagatttggaaatgtggatatgccctgtcgtccaagcccaatatagcccttcccctccaggttccagttatgcggtcgtcagacatacagctcggaatacaccacggagatcatgaaccccgactacaccaagctgaccatggaccttggcagcactgagatcacggctacagccaccacgtccctgcccagcatcagtacctttgtggagggctactcgagcaactacgaactcaagccttcctgcgtgtaccaaatgcagcggcccttgatcaaagtggaggaggggcgggcgcccagctaccatcaccatcaccaccaccaccaccaccaccaccaccatcaccagcagcagcatcagcagccatccattcctccagcctccagcccggaggacgaggtgctgcccagcacctccatgtacttcaagcagtccccaccgtccacccccaccacgccggccttccccccgcaggcgggggcgttatgggacgaggcactgccctcggcgcccggctgcatcgcacccggcccgctgctggacccgccgatgaaggcggtccccacggtggccggcgcgcgcttcccgctcttccacttcaagccctcgccgccgcatccccccgcgcccagcccggccggcggccaccacctcggctacgacccgacggccgctgccgcgctcagcctgccgctgggagccgcagccgccgcgggcagccaggccgccgcgcttgagggccacccgtacgggctgccgctggccaagagggcggccccgctggccttcccgcctctcggcctcacgccctcccctaccgcgtccagcctgctgggcgagagtcccagcctgccgtcgccgcccagcaggagctcgtcgtctggcgagggcacgtgtgccgtgtgcggggacaacgccgcctgccagcactacggcgtgcgaacctgcgagggctgcaagggctttttcaagagaacagtgcagaaaaatgcaaaatatgtttgcctggcaaataaaaactgcccagtagacaagagacgtcgaaaccgatgtcagtactgtcgatttcagaagtgtctcagtgttggaatggtaaaagaagttgtccgtacagatagtctgaaagggaggagaggtcgtctgccttccaaaccaaagagcccattacaacaggaaccttctcagccctctccaccttctcctccaatctgcatgatgaatgctcttgtccgagctttaacagactcaacacccagagatcttgattattccagatactgtcccactgaccaggctgctgcaggcacagatgctgagcatgtgcaacaattctacaacctcctgacagcctccattgatgtatccagaagctgggcagaaaagattccgggatttactgatctccccaaagaagatcagacattacttattgaatcagcctttttggagctgtttgtcctcagactttccatcaggtcaaacactgctgaagataagtttgtgttctgcaatggacttgtcctgcatcgacttcagtgccttcgtggatttggggagtggctcgactctattaaagacttttccttaaatttgcagagcctgaaccttgatatccaagccttagcctgcctgtcagcactgagcatgatcacagaaagacatgggttaaaagaaccaaagagagtcgaagagctatgcaacaagatcacaagcagtttaaaagaccaccagagtaagggacaggctctggagcccaccgagtccaaggtcctgggtgccctggtagaactgaggaagatctgcaccctgggcctccagcgcatcttctacctgaagctggaagacttggtgtctccaccttccatcattgacaagctcttcctggacaccctacctttctaatcaggagcagtggagcagtgagctgcctcctctcctagcacctgcttgctacgcagcaaagggataggtttggaaacctatcatttcctgtccttccttaagaggaaaagcagctcctgtagaaagcaaagactttcttttttttctggctcttttccttacaacctaaagccagaaaacttgcagagtattgtgttggggttgtgttttatatttaggcattgggggatggggtgggagggggttatagttcatgagggttttctaagaaattgctaacaaagcacttttggacaatgctatcccagcaggaaaaaaaaggataatataactgttttaaaactctttctggggaatccaattatagttgctttgtatttaaaaacaagaacagccaagggttgttcgccagggtaggatgtgtcttaaagattggtcccttgaaaatatgcttcctgtatcaaaggtacgtatgtggtgcaaacaaggcagaaacttccttttaatttccttcttcctttattttaacaaatggtgaaagatggaggattacctacaatcagacatggcaaaacaatatggctgtttgcttcataacagctgcaatttttaaagtgctgtcttactaagtcttgttatactctcttatctatatgccggaaataaaaaggaggcagtcatgttagcaaatgacacgttaatatccctagcagaggctgtgttcaccttccctgtcgatcccttctgaggtatggcccatccaagacttttaggccattcttgatggaaccagatccctgccctgactgtccagctatcctgaaagtggatcagattataaactggattacatgtaactgttttggttgtgttctatcaaccccaccagagttccctaaacttgcttcagttatagtaactgactggtatatcattcagaagcgccataagtcagttgagtattgatcctagataagaacatgcaatcagaggactggtcatacagggtaagcaccagggacaataaggatttttatagatataatttaatttttgttattggttaaggagacaattttggagagcaagcaaatcttctttttaaaaaatagtatgaatgtgaatactagaaaagatttaagaaatagtatgagtgtgagtcataggaaggattagtgggctgcgtttcaacattccgtgttcgtactcccttttgtatgtttctactgttaatgccatattactatgagataatttgttgcatagtgtccttatttgtataaacatttgtatgcacgttatattgtaatagctttgcctgtatttattgcaagaccaccagctcctggaagctgagttacagagtaattaaatggggtgttcacagtgacttggatacaccaattagaaattaaataagcaaatatatatatatatatataaatatagcaggttacatatatatatttataatgtgtctttttattaaccatttgtacaataaatgtcacttcccatgccgttattttatggttcatttgcagtgacttttaaggcagtactgtttagcactttgatattaaaattttgcttatgttttgctaaattcgaataatgtttgaagatttttaggtctaaaagtctttatattatatacgctgtatcaagtcaaaatatctttggccattttgctaagaaacaaactttgaatgtcaaactgatgtcacagtagtttttgttagctttaaatcatttttgctttagtctttttaaaggaaaataacaaaactatgctgtttatattgcattaattatacaatcaaacaaatgccaaatgaattgcctaattgcgcaagataacccagataggaaatcatatgtttttttccaagagtcattctaatatttgattatgttatgtgtgcttttatgaaagattgttatttttatatatcaagatgatagaacctggaatgttaggattttgaaatgttagacttggaaggggcctggtctgtcaactagtccaaccccttaaaattcatagaggacgaaactggggcccaattgaagggtgaagagttactcaaggtcaaacagctggtaacagaatcaagactaagacctaatttacctttccatactctttttttttctcaacttcatctatataaaatcaggcttttaaacataaccactaatatttacctgaagataaccatgagtaaagtatacttttgcattaattttttgagtatatgcaaacataataaatattattaaatatcaaggaaagctaacatttcatacaagatagcttcagaccaaattcaaattgaatttgaataaattagaaatactgtgcatacataaccttcttgtgcaccatgagtatttggaaagttaatccttgtttttgtcgtgtctatagagaacaaacaaataaaaacagagccctagagaaatggcgttactttttatttttacacccatcagatttaaggaaaagactttttagccattataatctagtggttggaaggaatgaagaagcttttttagtaataggtccagatatgagtgctaaaaataaagatgatagcatgttcttctgtcttccatagttattacaactatgagagcctcccaagtcatcttatcaactcaacccccttttttttgtcttaatgttgcacataagtttatacagagtggatgaccacactagcacagaagagaacaacatgtattaaagcaggtgattcctcccttggcgggagagctctctcagtgtgaacatgccttctgtgggcggaaatcaggaagccaccagctgttaatggagagtgccttgcttttatttcagacagcagagttttccaaagtttctctgctcctctaacagcattgctctttagtgtgtgttaacctgtggtttgaaagaaatgctcttgtacattaacaatgtaaatttaaatgattaaattacattttatcaatggca

SEQ ID NO: 230 - DNA, 14770 bp, Homo sapiens
gggacaccatcatttgggtttttaaaagcttcagcttctccagcatctttgcattgtgaatatcttcctgcttctagtcaaagctttctctctagtgattggaatgctgctgtaagcctattagaggtgcctgaggatatcaccttttacaaggaagccgtgtgtgcttgagaggatctttttaaatgcattatggctcatgcagcctcacaattaaagaaaaacagggatttagaaatcaatgctgaagaagagcctgagaaaaaaaggaaacaccgcaaacggtcccgggatcggaagaaaaagtctgatgccaatgcaagttacttaagagcagctcgagctggacaccttgaaaaggccctcgactacataaaaaatggagttgacatcaacatttgcaatcagaatgggttgaacgctctccaccttgcttccaaagaaggccatgtagaggttgtttctgagctgctgcagagagaagccaatgtggatgcagctacaaagaaaggaaacacagcattgcacatcgcatctttggctgggcaagcagaggtggtaaaagtcttggttacaaatggagccaatgtcaatgcacaatctcagaatggtttcacgccattgtatatggcagcccaggaaaatcacctggaagttgtcaagtttcttcttgacaatggtgcaagccagagcctagccacagaggatggcttcacaccattggcagtggctttgcaacaaggtcacgaccaagtcgtttcgctcctgctagagaatgacaccaaaggaaaagtgcgtctcccagctcttcatatcgcggcccgcaaagacgacacaaaagccgccgccctgctgctgcagaatgacaacaatgcagatgtggaatcaaagagtggcttcactccgctccacatagctgctcactatggaaatatcaatgtagccacgttgctgttaaaccgagcggctgctgtggatttcaccgcaaggaatgacatcactcctttacatgttgcatcaaaaagaggaaatgcaaatatggtaaaactattgctcgatcgaggagctaaaatcgatgccaaaaccagggatggtctgacaccactgcactgtggagcaaggagtggccacgagcaggtggtagaaatgttgcttgatcgagctgcccccattctttcaaaaaccaagaatggattatctccattgcacatggccacacaaggggatcatttaaactgcgtccagcttctcctccagcataatgtacccgtggatgatgtcaccaatgactacctgactgccctacacgtggctgcccactgtggccattacaaagttgccaaggttctcttggataagaaagctaaccccaatgccaaagccctgaatggctttacccctcttcatatcgcctgcaagaagaatcgaattaaagtaatggaactccttctgaaacacggtgcatccatccaagctgtaaccgagtcgggccttaccccaatccatgttgctgccttcatggggcatgtaaatattgtatcacaactaatgcatcatggagcctcaccaaacaccaccaatgtgagaggagaaacagcactgcacatggcagctcgctccggccaagctgaagttgtgcggtatctggtacaagacggagctcaggtagaagctaaagctaaggatgaccaaacaccactccacatttcagcccgactggggaaagcagacatagtacaacagctgttgcagcaaggggcatctccaaatgcagccacaacttctgggtacaccccacttcacctttccgcccgagaggggcatgaggatgtggccgcgttccttttggatcatggagcgtctttatctataacaacaaagaaaggatttactcctcttcatgtggcagcaaaatatggaaagcttgaagtcgccaatctcctgctacagaaaagtgcatctccagatgctgctgggaagagcgggctaacaccactgcatgtagctgcacattacgataatcagaaagtggcccttctgcttttggaccaaggagcctcacctcacgcagccgcaaagaatggttatacgccactgcacatcgctgccaaaaagaaccagatggacatagcgacaactctgctggaatatggtgctgatgccaacgcagttacccggcaaggaattgcttccgtccatctcgcagctcaggaagggcacgtggacatggtgtcgctgctcctcggtagaaatgcgaatgtgaacctgagcaataagagcggcctgaccccactccatttggctgctcaagaagatcgagtgaatgtggcagaagtcctcgtaaaccaaggggctcatgtggacgcccagacaaagatgggatacacaccactgcatgtgggctgccactatggaaatatcaagattgttaatttcctgctccagcattctgcaaaagttaatgccaaaacaaagaatgggtatacgccattacatcaagcagcacagcaggggcatacgcatataataaatgtcttacttcagaacaacgcctcccccaatgaactcactgtgaatgggaatactgcccttggcattgcccggcgcctcggctacatctcagtagtggacaccctgaagatagtgaccgaagaaaccatgaccacaactactgtcacagagaagcacaaaatgaatgttccagaaacgatgaatgaagttcttgatatgtctgatgatgaagttcgtaaagccaatgcccctgaaatgctcagtgatggcgaatatatctcagatgttgaagaaggtgaagatgcaatgaccggggacacagacaaatatcttgggccacaggaccttaaggaattgggtgatgattccctgcctgcagagggttacatgggctttagtctcggagcgcgttctgccagcctccgctccttcagttcggataggtcttacaccttgaacagaagctcctatgcacgggacagcatgatgattgaagaactccttgtgccatccaaagagcagcatctaacattcacaagggaatttgattcagattctcttagacattacagctgggctgcagacaccttagacaatgtcaatcttgtttcaagccccattcattctgggtttctggttagctttatggtggacgcgagagggggctccatgagaggaagccgtcatcacgggatgagaatcatcattcctccacgcaagtgtacggcccccactcgaatcacctgccgtttggtaaagagacataaactggccaacccacccccacatggtgaaaggagagggattagcagtaggctggtagaaatgggtcctgcaggggcacaatttttaggccctgtcatagtggaaatccctcactttgggtccatgagaggaaaagagagagaactcattgttcttcgaagtgaaaatggtgaaacttggaaggagcatcagtttgacagcaaaaatgaagatttaaccgagttacttaatggcatggatgaagaacttgatagcccagaagagttagggaaaaagcgtatctgcaggattatcacgaaagatttcccccagtattttgcagtggtttcccggattaagcaggaaagcaaccagattggtcctgaaggtggaattctgagcagcaccacagtgccccttgttcaagcatctttcccagagggtgccctaactaaaagaattcgagtgggcctccaggcccagcctgttccagatgaaattgtgaaaaagatccttggaaacaaagcaacttttagcccaattgtcactgtggaaccaagaagacggaaattccataaaccaatcacaatgaccattccggtgcccccgccctcaggagaaggtgtatccaatggatacaaaggggacactacacccaatctgcgtcttctctgtagcattacagggggcacttcgcctgctcagtgggaagacatcacaggaacaactcctttgacgtttataaaagattgtgtctcctttacaaccaatgtttcagccagattttggcttgcagactgccatcaagttttagaaactgtggggttagccacgcaactgtacagagaattgatatgtgttccatatatggccaagtttgttgtttttgccaaaatgaatgatcccgtagaatcttccttgcgatgtttctgcatgacagatgacaaagtggacaaaactttagagcaacaagagaattttgaggaagtcgcaagaagcaaagatattgaggttctggaaggaaaacctatttatgttgattgttatggaaatttggccccacttaccaaaggaggacagcaacttgtttttaacttttattctttcaaagaaaatagactgccattttccatcaagattagagacaccagccaagagccctgtggtcgtctgtcttttctgaaagaacgaaagacaacaaaaggactgcctcaaacagcggtttgcaacttaaatatcactctgccagcacataaaaaggagacagagtcagatcaagatgatgagattgagaaaacagatagacgacagagcttcgcatccttagctttacgtaagcgctacagctacttgactgagcctggaatgattgaacggagtacaggagcaacaagatccctccccaccacttactcatacaagccattcttttctacaagaccataccagtcctggacaacagctccgattacagtgcctgggccagccaagtcaggcttcacttccttatcaagttcttcctctaatacgccatcagcttctccgttaaaatcaatatggtctgtttcgacaccttctccaatcaaatccacattaggcgcgtcaactacatcttcagttaaatccattagtgacgtggcatctccaattagatccttacggacaatgtcttcgccgataaaaactgtggtgtcacaatctccatacaatatccaggtttcctctggtaccctggctagagctccagcagtcacggaagctacgcccttaaaagggctggcatccaattctacgttttcctctcgaacctctccagtgactacagcagggtctcttttggagaggtcatcaattactatgacaccccctgcctcccccaaatcaaacattaatatgtattcctcaagtttgccatttaagtcaattattacatcagcagcaccgctaatatcttcacctttaaagtcagtggtgtctccagttaaatcacgagttgatgtcatttcatcagccaaaattacaatggcatcttctctctcatcacctgtgaagcagatgcctggacatgcagaggtagcattagtcaatggatctatttcccctctaaaatatgcatcatcctcaactttaattaatggatgcaaagccactgccacgttacaggaaaaaatttcttctgctacaaactctgtgagctctgtggtcagtgcagccactgacacagttgagaaagtgttttctaccacgactgcaatgccattttccccactcaggtcatatgtttctgcagcaccatcagcttttcagtctctaagaactccttccgcaagtgcactctatacatcccttgggtcgtcaatatctgcaactacctcatctgtaacttcatcaattataacagtgccagtatactctgtagtcaatgttttgccagaaccagcattaaagaaacttccagactctaattcatttacaaaatcagcagcagccttgctgtcacccattaaaacattgactacggagacacatcctcagcctcacttcagtcgaacttcatctccagttaagtcatctttgttccttgcaccctctgcccttaagttgtctacaccatcttctttatcttccagtcaggagatactaaaagatgtagctgaaatgaaagaggacctaatgcggatgaccgcaatactacagacagatgtgcctgaggagaagccattccaacctgaactcccaaaggaagggagaatagatgatgaagaacctttcaaaattgtagagaaagtaaaggaagacttagtgaaagttagtgaaatccttaaaaaggatgtatgtgtagataataaaggatcacccaaatcaccaaagagtgacaaaggacactctcctgaagatgactggatagaatttagttcggaagaaatccgggaagccagacaacaagctgctgcgagccagtctccatctctgccagagagagtgcaagtaaaagcaaaagccgcctccgaaaaggattataacttgaccaaagttattgattacctaacaaatgatattgggagtagttcactgacaaacttaaaatacaagtttgaggatgcaaagaaggatggtgagggaggacagaaaagagttttaaaaccagcaattgctttgcaggaacacaaactcaaaatgcctccagcctccatgaggacttccacctctgagaaagaattgtgtaaaatggctgattccttttttggaacagatactattttagagtctcctgatgacttttctcaacacgaccaagataaaagtcccttgtctgacagtggctttgaaacaagaagtgaaaagacaccttcagccccacaaagcgctgaaacgactggtcctaaaccactttttcatgaagttcccatccctcctgttattacagaaacaagaactgaagtggttcatgttatcaggagctatgatccctcagctggggatgttccccagacccaaccagaggagcctgtgtcacctaaaccttcacctacttttatggaattggaaccaaagcccaccacctctagtattaaagaaaaggttaaagcatttcaaatgaaagccagtagtgaagaagatgaccacaatcgggttttaagcaaaggcatgcgtgttaaagaagagactcacataaccacaaccaccagaatggtttatcattctccaccaggcggtgaaggtgcatctgaaagaattgaagaaaccatgtcagtccatgacatcatgaaggcctttcagtccgggcgggatccttccaaagaactggcaggtctgtttgaacataagtcggcagtgtctccagatgttcacaagtctgctgctgaaacctcagcccagcatgcagagaaggacaaccaaatgaaacccaaactggagcgtataatagaagtccacatcgaaaaaggtaaccaagctgagcccactgaagtcattattagagaaaccaaaaagcatccagaaaaagaaatgtatgtatatcagaaagacttatcccggggagatattaacctaaaagattttctgccagaaaaacacgatgcttttccttgttcagaggaacagggtcagcaagaagaagaagaacttactgctgaagagtcattgccttcttatctggagtcttccagagtaaacactcctgtgtcccaagaagaagatagccgccctagttctgctcaactcatatctgatgactcttataaaacattgaagcttttgagtcaacactcaatagaataccatgacgatgagttgtcagaactaagaggggagtcttacaggtttgctgagaaaatgcttctgtcagaaaagctagatgtgtctcattctgatactgaggaatcggttacagaccatgcaggaccccctagctcagagttacaggggtctgataagcggtccagagaaaaaatagccactgcccccaaaaaagaaattctctccaaaatctataaagatgtttctgaaaatggtgtaggtaaagtgtctaaagatgagcattttgataaagtgacagtgttgcactattctggcaatgttagtagtccaaaacatgccatgtggatgcgctttactgaggacagattagacagaggtagagagaagttgatatatgaagatagggtggacaggactgtgaaggaggctgaagaaaaactgactgaagtgtcacagttttttcgtgacaaaactgaaaagctaaatgatgaactgcagtccccagagaaaaaggcacgccctaaaaatggcaaagaatattcttctcaaagccctaccagtagcagccctgagaaagtgctactgacagaactgctggcatccaatgatgagtgggttaaggcaagacagcatggccctgatggacaaggcttccccaaggccgaggagaaggcacccagtctgcccagcagcccagagaagatggttctctcccaacagactgaggacagcaagtccacagtggaagccaaaggaagtatttcacagagcaaagcaccagatgggccccagtctggattccagctcaaacaatctaaactcagttccattagattaaaatttgaacaaggcacacacgcaaaaagtaaggacatgtctcaagaagacagaaagtcagatggccagtccagaatcccagttaaaaaaatacaggagagcaagctacccgtctaccaagtttttgctagagaaaaacagcagaaggccatagacctcccagatgaaagtgtatctgtgcaaaaagattttatggtattaaaaaccaaagatgagcatgcccaaagcaacgaaattgttgtaaatgattctggctctgataatgtgaaaaaacagagaactgaaatgtcaagtaaagcaatgcctgactctttttctgagcagcaggctaaagacttggcatgtcatataacctcagatttagcaactaggggaccatgggacaaaaaggtctttagaacatgggagagttcgggagccactaacaataagtctcagaaagaaaaactttcgcatgtacttgttcatgatgtaagagagaatcacattggtcaccctgagagtaaaagtgttgatcaaaagaatgaatttatgtctgtgactgagagagaacgcaaattgttaacaaacggctctctctcagaaattaaagaaatgactgtaaaatctccctccaaaaaagtcttatatagggaatatgttgtgaaagaaggggaccatccaggcggattgcttgatcagccttccaggaggagcgagagctcagcagtgtcacacattcccgtcagagttgctgatgagaggagaatgctgtcttctaatattcccgatggtttttgtgaacagtcggcatttccaaaacatgaactatcacaaaaattgtcccagtcaagcatgagtaaagagacagttgagacacagcactttaattctatagaagatgaaaaagttacctattcagaaatcagcaaagtttccaaacaccagagttatgtaggtttatgcccacctctcgaggaaaccgaaacctcccccaccaaatctcctgattctttagagtttagcccaggaaaggaatctccctctagtgatgtattcgaccacagtcccattgatggattggaaaaactcgcaccactagcccagacagagggagggaaagagataaaaactttacccgtttatgtcagttttgtacaagtggggaagcaatatgaaaaggagatacaacaaggaggtgtaaaaaaaatcataagtcaggaatgtaagacagtacaagaaaccagggggaccttttatacaactagacagcaaaagcaacctccttctccccaaggtagtccagaagatgatactctagagcaagtatcctttctagacagctctgggaaaagccctttaaccccagaaacacccagttcagaggaagtgagttatgaatttacatctaagacacctgactcgctcatagcttatataccaggcaaacccagcccaattcccgaggtttctgaggagtcagaggaggaggaacaggccaagtcaacctcccttaagcagactacagtggaggaaacagcagttgagcgtgaaatgcctaatgacgtgagcaaagactctaaccaaagacccaaaaataacagagttgcctatattgaatttccccctcctccaccactggatgcggaccagattgagtcagataagaagcatcattatctcccagaaaaagaggttgacatgattgaagtcaatctgcaagatgagcatgacaagtaccagctggctgaacctgtcattagagtgcagccaccttcaccagttcctcccggggcagacgtcagtgattcaagcgatgacgaatctatttatcagccagtcccagttaaaaaatataccttcaaattaaaggaagtggacgatgaacaaaaagaaaaacccaaagcttctgctgaaaaggcttccaaccagaaagaactggaaagtaatggatctggaaaagataatgaatttggccttggccttgattcacctcagaatgaaattgcccagaatgggaacaacgaccagtccatcacagagtgttccattgccaccacagcagagttttctcatgacacggatgccacagagatcgactctctggatggctatgacctgcaagatgaagatgatggcttgacagagagtgattctaaactcccaattcaagccatggaaattaagaaagatatctggaacacagagggcattctgaagccagctgaccgctcttttagccaaagtaaacttgaagttatcgaggaggagggaaaggtgggaccagatgaggacaagccaccttctaaaagttcttcatctgaaaagactcctgataagactgatcagaagtcaggggcccagttcttcacactggaaggcagacatcctgacagatcagtgtttcctgatacttacttcagttacaaagtagatgaagaatttgccactccttttaaaacagtagctaccaaaggtctagattttgacccttggtctaataaccgaggggatgatgaagtttttgacagtaaatcacgggaagatgaaactaagccatttgggctggcggtagaagaccgctctccagcaacaacccctgatacaacgccagccagaacgccaactgatgaaagtaccccaactagtgagcctaaccccttcccatttcatgaaggaaaaatgtttgagatgactcgcagtggtgcaattgacatgagcaagagggattttgttgaagagaggctccaatttttccagattggtgagcatacttctgaagggaagtcaggggaccagggggaaggggataaaagtatggtcactgccacaccacagccacagtcaggggacaccactgtagaaaccaatctagagagaaatgtagagacacctacagtggaacctaaccccagcatcccgaccagcggagagtgtcaggaaggcacatccagtagtggctccctggagaaatcagcagcagccactaacacctctaaagttgaccccaagttgcgcacgcctataaaaatgggaatttctgcatccaccatgaccatgaagaaagaaggccctggagaaataacagataagatagaagcggtgatgaccagttgtcagggattagaaaatgaaactataacaatgatttcaaatacagccaatagccagatgggcgttaggccccatgaaaaacatgattttcaaaaagataactttaataacaacaacaatttggattcttccactatacagacagataacattatgagtaatatagttctgacagaacattctgcacccacttgtaccacagagaaagataacccagtgaaagtctcatcaggaaaaaagacaggggtactacaaggacactgtgtaagagataagcagaaagttcttggagaacagcaaaaaacaaaggaattgatagggattaggcaaaaatccaaacttcccataaaggccacttcaccaaaagataccttcccaccgaaccatatgtcaaacactaaagcaagtaaaatgaagcaggttagtcaatccgagaaaaccaaagcccttactacttcttcatgtgtagatgtaaagtccagaattccagtgaaaaacacacccagggataacataattgcagttagaaaagcatgtgccacacaaaagcaagggcagccagagaaaggcaaggccaaacagcttccatccaagttgccagtaaaggtaagatccacctgtgtcactaccaccaccaccactgccaccaccaccaccactaccaccactaccaccaccaccagctgcacagttaaagttaggaaaagtcagctcaaggaagtatgtaaacattccattgaatattttaagggaattagtggtgagaccttaaagcttgtggaccgcctctctgaagaagaaaaaaagatgcagtccgagttgtccgatgaggaagaaagtacctcaagaaacacgtcgttgtccgagacttcccggggtggccagccttcggttacaacgaagtctgctagagataagaaaacagaggcagcacctttaaaatcaaagagtgaaaaggccggcagtgagaaaaggagcagtagaaggactggtccacagagtccatgtgaacggacagatatcaggatggcaatagtagccgatcacctgggacttagttggacagaactggcaagggaactgaatttttcagtggatgaaatcaatcaaatacgtgtggaaaatccaaattctttaatttctcagagcttcatgttattaaaaaaatgggttaccagagacggaaaaaatgccacaactgatgccttaacttcggtcttgacaaaaattaatcgaatagatatagtgacactgctagaaggaccaatatttgattatggaaatatttcaggcaccagaagttttgcagatgagaacaatgttttccatgaccctgttgatggttggcagaatgagacatcaagtggaaacctagagtcctgcgctcaagctcgaagagtaactggtgggttactagatcgactggatgacagccctgaccagtgtagagattccattacctcatatctcaaaggagaagctggcaaatttgaagcaaatggaagccatacagaaatcactccagaagcaaagacaaaatcttactttccagaatcccaaaatgatgtaggaaaacagagtaccaaggaaactctgaaaccaaaaatacatggatctggtcatgttgaagaaccagcatcaccactagcagcatatcagaaatctctagaagaaaccagcaagcttataatagaagagactaaaccctgtgtgcctgtcagtatgaaaaagatgagtaggacttctccagcagatggcaagccaaggcttagcctccatgaagaagaggggtccagtgggtctgagcaaaagcagggagaaggttttaaggtgaaaacgaagaaagaaatccggcatgtggaaaagaagagccactcgtaacagcgaacggtcagtcaaggatcataagtttttactgccagtattgagaaattcgtggaagaaatgtcagcaggaagtaaaaattcaccgagaagtgtgtgtgtgttcgctgcttccacacattaatggcatgattttttttatgcaaaaagaaaagaaaagaaaaccacccacattttaatttagcatgagccaatttacagagcatggaaatcactttcatttccggattggcgcgtgtgcaattagcaatgcagtgtatatacaagaagccatgctgttaacagtttatctcaagtaatttggtgtcatttacaaaaggaagaaattcttgccatcagaagggacagaaggagatggaatgatcaaatcacagagaaacactaaaattactaaatctacaacagctcgccttatttttcttggacccaaactgtcagggtataaacactatttgtttcttttttaaaacatcgatagttttgctgtaaataataacactgtataaattctaacagaaaaatagaataaaatgttgataaggcactgcctcttagaacacaaacagaatattgcaaatgcatttaacaaataggggtctcaagtgacttcaccctagaagaggagggagggattctgggtgggggtgactcttcactgattcttgtatattagcaattataatgtttgtatatgcaaaactgctagcttgattttaaaaaaaaacaaatctttaaaatctgctgcaaatttaaataattcccaaaatgaggaattctgtagttctgtgaaaaatttttttcttcagaatactaatattttgatgcatgtgtatcaccttattttgattaaatcttttccaattttgcaaacactacagtatactgcaacacaaaagattttatctgtaaacacaaagcccttcatctaatatttgttgctattgccaatttttcaatgaaatgacctaaaaacaacaaaaaaaaataacctatacggtagttgctttagggggtggggggatgctatctgttagtgcttaaaagggggtaaatgcttgccgctttagaggtggatggtgctcataaaaggccccagtcgggggtatttaaaaaggactgaacagaaatccttagctagtagaatggcagcacgctgtaaaattattactgtattgtgtactggctataagatgtagacacctttcagtaagccaatcatttgtaaccattctagcagtgtcatattaggttaataaggctgctgtgttttaaagggcatttttatttgggttttggtgaaattctttaatttgttgattatattcacataaaatcagcattcattgacacatagctctaatgacatatgtatgaaaaaccatacactggatgacctagtcgattatttaagcataaaataaattgtgttaaactcttcacct

SEQ ID NO: 231 - DNA, 2832 bp, Homo sapiens
aggaagctgaaccatctatctccagaaatgtcttcagaaagtaaagagcaacataacgtttcacccagagactcagctgaaggaaatgacagttatccatctgggatccatctggaacttcaaagggaatcaagtactgacttcaagcaatttgagaccaatgatcaatgcagaccttatcataggatccttattgagcgtcaagagaaatcagatacaaacttcaaggagtttgttattaaaaagctgcagaagaattgccagtgcagtccagccaaagccaaaaatatgattttaggtttccttcctgttttgcagtggctcccaaaatacgacctaaagaaaaacattttaggggatgtgatgtcaggcttgattgtgggcatattattggtgccccagtccattgcttattccctgctggctggccaagaacctgtctatggtctgtacacatctttttttgccagcatcatttattttctcttgggtacctcccgtcacatctctgtgggcatttttggagtactgtgccttatgattggtgagacagttgaccgagaactacagaaagctggctatgacaatgcccatagtgctccttccttaggaatggtttcaaatgggagcacattattaaatcatacatcagacaggatatgtgacaaaagttgctatgcaattatggttggcagcactgtaacctttatagctggagtttatcaggtagcgatgggcttctttcaagtgggttttgtttctgtctacctctcagatgccttgctgagtggatttgtcactggtgcctccttcactattcttacatctcaggccaagtatcttcttgggctcaaccttcctcggactaatggtgtgggctcactcatcactacctggatacatgtcttcagaaacatccataagaccaatctctgtgatcttatcaccagccttttgtgccttttggttcttttgccaaccaaagaactcaatgaacacttcaaatccaagcttaaggcaccgattcctattgaacttgttgttgttgtagcagccacattagcctctcattttggaaaactacatgaaaattataattctagtattgctggacatattcccactgggtttatgccacccaaagtaccagaatggaacctaattcctagtgtggctgtagatgcaatagctatttccatcattggttttgctatcactgtatcactttctgagatgtttgccaagaaacatggttacacagtcaaagcaaaccaggaaatgtatgccattggcttttgtaatatcatcccttccttcttccactgttttactactagtgcagctcttgcaaagacattggttaaagaatcaacaggctgccatactcagctttctggtgtggtaacagccctggttcttttgttggtcctcctagtaatagctcctttgttctattcccttcaaaaaagtgtccttggtgtgatcacaattgtaaatctacggggagcccttcgtaaatttagggatcttcccaaaatgtggagtattagtagaatggatacagttatctggtttgttactatgctgtcctctgcactgctaagtactgaaataggcctacttgttggggtttgtttttctatattttgtgtcatcctccgcactcagaagccaaagagttcactgcttggcttggtggaagagtctgaggtctttgaatctgtgtctgcttacaagaaccttcagactaagccaggcatcaagattttccgctttgtagcccctctctactacataaacaaagaatgctttaaatctgctttatacaaacaaactgtcaacccaatcttaataaaggtggcttggaagaaggcagcaaagagaaagatcaaagaaaaagtagtgactcttggtggaatccaggatgaaatgtcagtgcaactttcccatgatcccttggagctgcatactatagtgattgactgcagtgcaattcaatttttagatacagcagggatccacacactgaaagaagttcgcagagattatgaagccattggaatccaggttctgctggctcagtgcaatcccactgtgagggattccctaaccaacggagaatattgcaaaaaggaagaagaaaaccttctcttctatagtgtgtatgaagcgatggcttttgcagaagtatctaaaaatcagaaaggagtatgtgttcccaatggtctgagtcttagtagtgattaattgagaaggtagatagaagaatgtctagccaataggttaaaatttcaagtgtccaacatttcccagttccacagtgggaaattttgcacacttgaaattttaaccaagtggctagatattattcctcctttgaagctaatggcatttgtatatacacactgcagcagagcttgtagctggacagagtcaaaaagaagaaaatacggtttcaggctttcttgcagatatgaagtattcttggaatgcaataagtatgtattgaactgtactgtaaagtagctccaaaacttaattactctcctgttttaggggttatacatttggactgtgcattctccaagagatgaagcggtgaagttgggatttacattggaagtgctgtagacttctttatgtggctcagtggagagagggaaagaatgttgcacctgctctagtaccataggtcaagaggcttctggatcacaaagtcataactagacaggtttgttcttgtagttttctatccccagtctttgctccccagatggcagtagtttttagtaggaaagtgccattcctgtccttaaggcacagtctcatcag

SEQ ID NO: 232 - DNA, 2382 bp, Homo sapiens
agtaccgctgcggccgggggattgggccggggtctccaccgccgaccgaggggagcggcgtccgctcggccctgctttttgcgacctgccgtcagccccacgtcgccggcctggaggggcgaagaggacgaggggcgcaaggcttcctccggggacattggctccctggattatcaagcagtttgtagttgacattgaatccaggctgaggatggaaggtgtggaacttaaagaagaatggcaagatgaagattttccgatacctttaccagaagatgatagtattgaagcagatatactagctataactggaccagaggaccagcctggctcactagaagttaatggaaataaagtgagaaagaaactaatggctccagacattagcctgacactggatcctagtgatggctctgtattgtcagatgatttggatgaaagtggggagattgacttagatggcttagacacaccgtcagagaatagtaatgagtttgagtgggaagatgatcttccaaaacccaagactactgaagtaattaggaaaggctcaattactgaatacacagcagcagaggaaaaagaagatggacgacgctggcgtatgttcaggattggagaacaggaccacagggttgatatgaaggcaattgaaccctataaaaaagttatcagccatgggggatattatggggatggattaaatgccattgttgtatttgctgtctgtttcatgcctgaaagtagtcagcctaactatagatacctgatggacaatctttttaaatatgttattggcactttggagctattagtagcagaaaactacatgatagtttatttaaatggtgcaacaactcgaagaaaaatgcccagtctgggatggctcaggaaatgttatcagcaaattgatagaaggttacggaaaaatctaaaatccctaatcattgtacatccttcttggtttatcagaacacttctggctgttacaagaccatttattagctcgaaattcagccaaaaaattagatacgtgtttaatttggcagaactagcagaacttgtccccatggaatacgttggcataccagaatgcataaaacaagttgatcaagaacttaatggaaaacaagatgaaccgaaaaatgaacagtaagtttggcatctagtccaaacaagactgaagaatgtgctgatggagcagtgctgtttctgcattcataatgcatttattggcccatatttttatgtaacctgttacaaaatagacttgactttttcataatggacttttgtattatacaagggactgttcactgctgtactggtttgcaaatttcttgaatttagctctttaatagctaactgtattattatcgttttatattttatattgctaaatagagaaccacactttatataaagtagtttttgcatttgtttattgaatgatgcatcttcttcggtgaaatatttatatgcataaatggcaaaggaaagaaataatatatatttttatgtcattgagcaatattttttcaatgtgtacctgtcttatggaagaaatatgcaggtatataagaccacgattttctaagctgccatataagaatttttgtttttgtaaatggttaaatacatttcctgggtaacttaggaaattaagctttttcataaggcaacagatggtaaactgattgtcatgaatacccaaagatcatgtatataatcgaagtgtattagtaccatcccaaggtttttttctcatttaacatatttgtttcataattcagcaagtacagatgcaagcgcattgcacactttttcctttctaaacttaaagacaagtcaaaaagccattcttagaactagaggatttaagcagggtcggaattacgggtttgtatatatgtatatactcgtttgtatatatgtatatactgggacattttatcttctggcccaaagtcagaactttataaaaatcttgagtttgttcacttaatgtgaaataagctatgtgtccagggtattgctcccctgagtgtatatgagtgctgagtagtattgcagagaatgtgatgagttatcactgtcacaactttttctatagaaaacaggggctgcttttaaactctcactatgggacactttaccaaaatacttccatatcaattatttgaacccggtagtttgtttgacctagttagattgtggtgtttattcaagtttgaaatcatgtttgacaatactgtaaattaggttaattttgaagtcttagcatcatcatattgtgctgttttggataacacgtttgttcaagaacatttaaactgtttctttggtgtcctttacattgaaataaattgtgtttgtgcctcc

SEQ ID NO: 233 - DNA, 2280 bp, Homo sapiens
ccgcccgccaccagctacgccccgtccgacgtgccctcgggggtcgcgctgttcctcaccatccctttcgccttcttcctgcccgagctgatatttgggttcttggtctggaccatggtagccgccacccacatagtataccccttgctgcaaggatgggtgatgtatgtctcgctcacctcgtttctcatctccttgatgttcctgttgtcttacttgtttggattttacaaaagatttgaatcctggagagttctggacagcctgtaccacgggaccactggcatcctgtacatgagcgctgccgtcctacaagtacatgccacgattgtttctgagaaactgctggacccaagaatttactacattaattcggcagcctcgttcttcgccttcatcgccacgctgctctacattctccatgccttcagcatctattaccactgatgcacaggcgccaggccaagggggaaatgctctttgaaagctccaattattggtccccaaaagcagcttccaacgtttgccatctggatgacaaacggaagatccactaaaacgtccacgggattaacagaacgtccttgcagactgagcgatgacaccacactttgtttggacatttaaattcactctgctgaataggaggaagcttttctttttcctgggaaaacaactgtctcttggaattatctgaccatgaacttgctcttctagacaactcacatcaaagccctcactccactaatggagaatcctagccccactaatgccaagtctgtttggggattttgcctcagctatgggcttccctagagtaggtctaggggaatactcagtctgatcttttttttgtttgttttattttgttttttttgagacggagtctcgctcttcctccaaggctggagtgcagtgacgcgatctccactcactgcaggctccgcctcccgggttcccgccattctcctgcctcagcctcccgagtagccgggactacaggcgcccaccaccatgcccggctaatttagttgtatttttagtagagatggggtttcaccgtattagccaggatggtctcgatctcctgacctcgtgatccgcccgcctcggcctcccaaagtgctgggattacaggcgtgagccaccgtgcccggcctgattctcttaaaattgaagaggtgctgccaaggccttcagatctaacgcagatgcatagaccttgttcctggtacttgttcagcctgtgctggggagccgtggtcccgagttccctgggaggctgacagggtcaagccaccctgcccaccaccctcccacttcccctcccctttcctctccagcattaggattcaagggaaatctgcatgaagccaattttgagggtagacgtgtggggaaaataaatcattatacagtaagacctggggcttgaggggtggggaatggggagggaagggcatagcctgctcctccatgagtctgacatctcggaaactgagcagctgccggacgcctgggtcaggaatccaagaccccacctcttaaggactggttcctcagaaagcaccctcagggaaaaaggtgaaaacattacatccgtggattctcctgccacaaccgcattggaagaaaaggctgccgcaacatctcagcgaggagtgaaggacccatgtcccaggaaccgcgctgcgccacctgcactcacccccctcacattctcttaagcacccggtggccctccgaggctggcggaatggtggtgcccacggggttgggcaagggctcaccaggacctcaacgggcaaagttgtgcacactaaaatatcaaatcaaggtgcttggttttaaagtaaatgtttttctaaagaaagctgtgttcttctgttgacccagacgaatagggcacagccctgtaactgcacgtgccttctgtcattgggaatgaaataaattattacgagaaagggacttgtcctaactggtttgaggccttacagttttgtatctacatttttcccctcctggggtttgcggggacagggacagaactacaggagtcatgggaaagaaaattctggcttcactactgctcactgctcactttctgatcactctgatactttttttttttttttttttttgcaacctgataccttgaaaagcttctatgtgtctctccttttgttgcctggcagctgtctaggatgatcactgattactatttactaagtagccacatgcaaataaaagttgtttggtaaaatggaaaaaaaaaaa

SEQ ID NO: 234 - DNA, 3875 bp, Homo sapiens
ggggaagggcagatggaggagggattgtaatggcggcagccggcagctccctgctctgacccacggcaggcacacagcaacgaccccttccccgcccctctcccggccggcctccgccccgcagccagcgcggggccaccctctccggcccttcccccagctgtcggcgtctcgccctgcgccccggccggggccccacacacaatggacgagcttgccggaggcggtggtggcggcccggggatggcggcccctccccggcagcagcagggacctggggggaacctgggcctttcgcccggggggaacggagcggcgggcggcgggggtcctccggcctccgagggagcgggtcccgcggcaggccccgagctgtcccggccgcagcagaacactatcccggggatactgcactacatccagcacgagtgggctcggttcgagatggagcgggcgcactgggaggtggaacgggccgaactgcaggcccggattgcatttctacaaggcgaaagaaaaggtcaagagaacctgaagaaggacttagtaagaagaataaagatgttagagtatgcattaaaacaagaaagggcaaaatatcacaaattaaaatatggcacggaactgaaccaaggtgacttgaaaatgccaacctttgagtcagaagaaaccaaagacacagaggctcccacagcacctcagaatagccagttaacgtggaagcaaggcagacagcttttaagacagtatcttcaggaagtaggttatacagatacaatattagatgtccggtctcagcgggtaaggtcattacttggactatctaattcagaaccaaatggatcagtagaaacaaagaatttagaacagatcctgaatggaggtgaatctcctaagcaaaagggacaagaaataaaaaggtcctctggtgatgttcttgagacgttcaatttcttagaaaatgccgatgacagtgatgaagatgaggaaaatgacatgatcgaaggcatcccagaaggaaaagacaaacatcggatgaataaacataaaataggtaatgaaggtttagctgctgacctaactgacgatcctgatactgaggaagcactgaaagaatttgattttttagtgactgctgaagatggtgaaggagctggagaagcacggagttcgggggatggcacagaatgggctgaaccaataacgtttccatctggaggaggcaagtcatttattatgggttctgatgatgttttgttaagtgtactgggccttggagaccttgcagacttgacggtaacaaatgatgcagactatagttatgatttgcctgctaataaagatgcctttcgaaagacatggagtcccaagtatacactacgtagccattttgatggagtacgggcattagcttttcatcctgtagaacctgtgctggttactgcttctgaggaccataccctgaaactttggaacctgcaaaaaacagttcctgccaaaaagagtgcctctttagatgtagagcctatctacacatttagggcccacatcggccctgttctgtcattagctattagttctaatggagaacagtgttttagtggtggtattgatgcaaccatccagtggtggaatatgccgagtcccagtgtagatccatatgatacatatgagccaaatgttctagctggcactttagttggtcatacagatgcagtttggggtcttgcttatagtggcataaaaaatcaattactgtcttgttcagcagatggcactgttaggttatggaatccacaagaaaaattgccatgtatttgcacttacaatggagataaaaagcatggaatacctacatcagttgactttataggctgtgatccagctcatatggtaacctctttcaacactggtagtgcagtaatttatgatttagaaacatcacagtcattggtgatactttcatcacaggtagattctggtttacaatctaataatcatatcaacagagtagtaagtcatcccacacttcctgttacaataactgctcatgaagatagacacatcaaattttttgacaataaaacgggtaaaatgatccattctatggtagctcacttggatgctgttacaagtctagcagtagatcctaatggaatctatttgatgtctggaagccatgactgttccatcagattatggaatttagacagcaagacatgtgtgcaagaaataacagctcacagaaagaaattggatgaatcaatttatgatgttgctttccactcgtcaaaagcatatatagctagtgcaggagctgatgctcttgccaaagtatttgtatgaatcaacaaaaacttgcatcgtaacaagatttgcttggacagaaagagggtctgcatcactgccatcagaaaggttactgatatgacactacatgtgatctgcctggtgaaggctatctggggcaggcacaaattggtggaaatcacatcttaatgtcaagctcattaagttaactgtaattactgtattttgtgggacaaagaaaaaaggactccagtatttgtggcctgtactggatgtgaactgagcgtatatctgtttttaggtgtctttaagccaatgtggagtctgatctttcaaaaaagttttttttttctcttcttcttcttcttttttttttttttttttttttttttttggactctgtgtgctgccttaggggttaggaatgtggtgctcttgttgggggaagtgagctccaagagtagctttttttcatctcttagtgatcttctgtttatcggttgaatgccacagattcccttttaaacttattttgctttaaaaaaaaaaaaaaaagaaaaagaaaatttaacttaaaatattttagcattagttgcacaaaatgtttggataaaattctagtttttataagtctttttatatatttagcctgtcacaacagtgctcaagattgtattgaagtttttctgcattatacaaccctaaaacacagagatctcactgacccgttgccctgtaaccactttctttccttcttttgcctaatacagctcagctaagtccttccataaagatgctaaataactttcatcatcacataaatgtcttcataaaccaaggactattaagtgtattaaaatgaaacagtggggtttagtactccaaatgaactcttaaagaaaaaaactaatcttggcatcctatcactatgtgatattttgtacatcttactgtattcacaagtttatttatcaaggattatccatcttgctaatggcctattatttatttcactttttgttggtctttatatccttttattaatgtgctaaaggaacctgtatatctattttggaactctttgaatagtctaaaatagactaaaaatggagtattttatagtttaaattacaaaccaaggtggttccccctaagatatatatcttggtttaccatgattccaaacaaaactaacttgtttaaaaatatttggagtaaagttttatttgcattacaaataggatacaaaaatagttgaatcaggatacagaaatctgctgtgttttgactagttatccctgttttatttttttagatgtgcttaatttatggtgtaactaaagattttgtttgtgtaatgcatgattaagacaataaagtattttttctagtcttccgagaaacttttctgatcagtttgcgagttttgatgagttttgtaaggtttttgttttacaaactatgaatcagcaaatttttaagattgtaccacatagcaaacatacagctgttgaaaaataatgtatataaaatgcatataataaatattaaattgtgtacctgta

SEQ ID NO: 235 - DNA, 1545 bp, Homo sapiens
ccgagggcggggccgggcccgggagcctgtggcttcaggaagaggagggcaaggtgtctggctgcgcgtttggctgcaatgagctcggcctcggggctccgcagggggcacccggcaggtggggaagaaaacatgacagaaacagatgccttctataaaagagaaatgtttgatccggcagaaaagtacaaaatggaccacaggaggagaggaattgctttaatcttcaatcatgagaggttcttttggcacttaacactgccagaaaggcggcgcacctgcgcagatagagacaatcttacccgcaggttttcagatctaggatttgaagtgaaatgctttaatgatcttaaagcagaagaactactgctcaaaattcatgaggtgtcaactgttagccacgcagatgccgattgctttgtgtgtgtcttcctgagccatggcgaaggcaatcacatttatgcatatgatgctaaaatcgaaattcagacattaactggcttgttcaaaggagacaagtgtcacagcctggttggaaaacccaagatatttatcatccaggcatgtcggggaaaccagcacgatgtgccagtcattcctttggatgtagtagataatcagacagagaagttggacaccaacataactgaggtggatgcagcctccgtttacacgctgcctgctggagctgacttcctcatgtgttactctgttgcagaaggatattattctcaccgggaaactgtgaacggctcatggtacattcaagatttgtgtgagatgttgggaaaatatggctcctccttagagttcacagaactcctcacactggtgaacaggaaagtttctcagcgccgagtggacttttgcaaagacccaagtgcaattggaaagaagcaggttccctgttttgcctcaatgctaactaaaaagctgcatttctttccaaaatctaattaattaatagaggctatctaatttcacactctgtattgaaaatggctttctcagccaggcgtggttactcacacctgtaatcccagcactttgggagtccaaggtgggcggatcacctgaggtcgggagttcgagaccagcctgaccaacatggcagaagccccgcctctactaaaaatgcaaaaaaaaatttagctaggcatggcggcgcatgcctgcaatcccagctacttggaaggctgaggcaggagaatcacttgaacccaggaggtggaggctgcggtgagccgagcattgcgccattgcactccagcctgggcaacgagtgaaactccgtctcaaaaaaaaagaaaatgtctttctcttccttttatataaatatcgttagggtgaagcattatggtctaatgattcaaatgttttaaagtttaatgcctagcagagaactgccttaaaaaaaaaaagttcatgttggccatggtgaaagggtttgatatggagaaacaaaatcctcaggaaattagataaataaaaatttataagcatttgtattattttttaataaactgcagggttacacaaaaatct

SEQ ID NO: 236 - DNA, 4409 bp, Homo sapiens
tttcgactcgcgctccggctgctgtcacttggctctctggctggagcttgaggacgcaaggagggtttgtcactggcagactcgagactgtaggcactgccatggcccctgtgctcagtaaggactcggcggacatcgagagtatcctggctttaaatcctcgaacacaaactcatgcaactctgtgttccacttcggccaagaaattagacaagaaacattggaaaagaaatcctgataagaactgctttaattgtgagaagctggagaataattttgatgacatcaagcacacgactcttggtgagcgaggagctctccgagaagcaatgagatgcctgaaatgtgcagatgccccgtgtcagaagagctgtccaactaatcttgatattaaatcattcatcacaagtattgcaaacaagaactattatggagctgctaagatgatattttctgacaacccacttggtctgacttgtggaatggtatgtccaacctctgatctttgtgtaggtggatgcaatttatatgccactgaagagggacccattaatattggtggattgcagcaatttgctactgaggtattcaaagcaatgagtatcccacagatcagaaatccttcgctgcctcccccagaaaaaatgtctgaagcctattctgcaaagattgctctttttggtgctgggcctgcaagtataagttgtgcttcctttttggctcgattggggtactctgacatcactatatttgaaaaacaagaatatgttggtggtttaagtacttctgaaattcctcagttccggctgccgtatgatgtagtgaattttgagattgagctaatgaaggaccttggtgtaaagataatttgcggtaaaagcctttcagtgaatgaaatgactcttagcactttgaaagaaaaaggctacaaagctgctttcattggaataggtttgccagaacccaataaagatgccatcttccaaggcctgacgcaggaccaggggttttatacatccaaagactttttgccacttgtagccaaaggcagtaaagcaggaatgtgcgcctgtcactctccattgccatcgatacggggagtcgtgattgtacttggagctggagacactgcctttgactgtgcaacatctgctctacgttgtggagctcgccgtgtgttcatcgtcttcagaaaaggctttgttaatataagagctgtccctgaggagatggaacttgctaaggaagaaaagtgtgaatttctgccattcctgtccccacggaaggttatagtaaaaggtgggagaattgttgctatgcagtttgttcggacagagcaagatgaaactggaaaatggaatgaagatgaagatcagatggtccatctgaaagccgatgtggtcatcagtgcctttggttcagttctgagtgatcctaaagtaaaagaagccttgagccctataaaatttaacagatggggtctcccagaagtagatccagaaactatgcaaactagtgaagcatgggtatttgcaggtggtgatgtcgttggtttggctaacactacagtggaatcggtgaatgatggaaagcaagcttcttggtacattcacaaatacgtacagtcacaatatggagcttccgtttctgccaagcctgaactacccctcttttacactcctattgatctggtggacattagtgtagaaatggccggattgaagtttataaatccttttggtcttgctagcgcaactccagccaccagcacatcaatgattcgaagagcttttgaagctggatggggttttgccctcaccaaaactttctctcttgataaggacattgtgacaaatgtttcccccagaatcatccggggaaccacctctggccccatgtatggccctggacaaagctcctttctgaatattgagctcatcagtgagaaaacggctgcatattggtgtcaaagtgtcactgaactaaaggctgactttccagacaacattgtgattgctagcattatgtgcagttacaataaaaatgactggacggaacttgccaagaagtctgaggattctggagcagatgccctggagttaaatttatcatgtccacatggcatgggagaaagaggaatgggcctggcctgtgggcaggatccagagctggtgcggaacatctgccgctgggttaggcaagctgttcagattcctttttttgccaagctgaccccaaatgtcactgatattgtgagcatcgcaagagctgcaaaggaaggtggtgccaatggcgttacagccaccaacactgtctcaggtctgatgggattaaaatctgatggcacaccttggccagcagtggggattgcaaagcgaactacatatggaggagtgtctgggacagcaatcagacctattgctttgagagctgtgacctccattgctcgtgctctgcctggatttcccattttggctactggtggaattgactctgctgaaagtggtcttcagtttctccatagtggtgcttccgtcctccaggtatgcagtgccattcagaatcaggatttcactgtgatcgaagactactgcactggcctcaaagccctgctttatctgaaaagcattgaagaactacaagactgggatggacagagtccagctactgtgagtcaccagaaagggaaaccagttccacgtatagctgaactcatggacaagaaactgccaagttttggaccttatctggaacagcgcaagaaaatcatagcagaaaacaagattagactgaaagaacaaaatgtagctttttcaccacttaagagaaactgttttatccccaaaaggcctattcctaccatcaaggatgtaataggaaaagcactgcagtaccttggaacatttggtgaattgagcaacgtagagcaagttgtggctatgattgatgaagaaatgtgtatcaactgtggtaaatgctacatgacctgtaatgattctggctaccaggctatacagtttgatccagaaacccacctgcccaccataaccgacacttgtacaggctgtactctgtgtctcagtgtttgccctattgtcgactgcatcaaaatggtttccaggacaacaccttatgaaccaaagagaggcgtacccttatctgtgaatccggtgtgttaaggtgatttgtgaaacagttgctgtgaactttcatgtcacctacatatgctgatcttttaaaatcatgatccttgtgttcagctctttccaaattaaaacaaatatacattttctaaataaaaatatgtaatttcaaaatacatttgtaagtgtaaaaaatgtctcatgtcaatgaccattcaattagtggtcataaaatagaataattcttttctgaggatagtagttaaataactgtgtggcagttaattggatgttcactgccagttgtcttatgtgaaaaattaacttttttgtggcaattagtgtgacagtttccaaattgccctatgctgtgctccatatttgatttctaattgtaagtgaaattaagcattttgaaacaaagtactctttaacatacaagaaaatgtatccaaggaaacattttatcattaaaaattacctttaattttaatgctgtttctaagaaaatgtagttagctccataaagtacaaatgaagaaagtcaaaaaattatttgctatggcaggataagaaagcctaaaattgagtttgtagaactttattaagtaaaatccccttcgctgaaattgcttatttttggtgttggatagaggatagggagaatatttactaactaaataccattcactactcatgcgtgagatgggtgtacaaactcatcctcttttaatggcatttctctttaaactatgttcctaacaaaatgagatgataggatagatcctggttaccactcttttgctgtgcacatacgggctctgactggttttaatagtcaccttcatgattatagcaactaatgtttgaacaaagctcaaagtatgcaatgcttcattattcaagaatgaaaaatataatgttgataatatatattaagtgtgccaaatcagtttgactactctctgttttagtgtttatgtttaaaagaaatatattttttgttattattagataatatttttgtatttctctattttcataatcagtaaatagtgtcatataaactcatttatctcctcttcatggcatcttcaatatgaatctataagtagtaaatcagaaagtaacaatctatggcttatttctatgacaaattcaagagctagaaaaataaaatgtttcattatgcacttttagaaatgcatatttgccacaaaacctgtattactgaataatatcaaataaaatatcataaagcatttt

SEQ ID NO: 237 - DNA, 846 bp, Homo sapiens
ccacgtccggggtgccgagccaactttcctgcgtccatgcagccccgccggcaacggctgcccgctccctggtccgggcccaggggcccgcgccccaccgccccgctgctcgcgctgctgctgttgctcgccccggtggcggcgcccgcggggtccgggggccccgacgaccctgggcagcctcaggatgctggggtcccgcgcaggctcctgcagcagaaggcgcgcgcggcgcttcacttcttcaacttccggtccggctcgcccagcgcgctgcgagtgctggccgaggtgcaggagggccgcgcgtggattaatccaaaagagggatgtaaagttcacgtggtcttcagcacagagcgctacaacccagagtctttacttcaggaaggtgagggacgtttggggaaatgttctgctcgagtgtttttcaagaatcagaaacccagaccaaccatcaatgtaacttgtacacggctcatcgagaaaaagaaaagacaacaagaggattacctgctttacaagcaaatgaagcaactgaaaaaccccttggaaatagtcagcatacctgataatcatggacatattgatccctctctgagactcatctgggatttggctttccttggaagctcttacgtgatgtgggaaatgacaacacaggtgtcacactactacttggcacagctcactagtgtgaggcagtgggtaagaaaaacctgaaaattaacttgtgccacaagagttacaatcaaagtggtctccttagactgaattcatgtgaacttctaatttcatatcaagagttgtaatcacatttatttcaataaatatgtgagttcctgc

SEQ ID NO: 238 - DNA, 1460 bp, Homo sapiens
gttctccacaactgccagcaatccttccaccaggcaaaacacatcatctaaggaaaagaagtgaggtttgcttagggcgtggcagcttcggataaacgcaggactccgcctggcagcccgatttctcccggaacctctgctcagcctggtgaaccacacaggcccgagtttcacccagtccccactccacggtgcagctgcggcttatctctcagcccagcgagatgccagccttcctgtcccgggccagcgctctgacatgcagaaggtgaccctgggcctgcttgtgttcctggcaggctttcctgtcctggacgccaatgacctagaagataaaaacagtcctttctactatgactggcaccaggttggcgggctcatctgcgctggggttctgtgcgccatgggcatcatcatcgtcatgagtgagtggaggagctcgggggagcaggcgggccggggctggggctcccctcccctgaccactcagctctccccaacaggtgcaaaatgcaaatgcaagtttggccagaagtccggtcaccatccaggggagactccacctctcatcacccccggctcagcccaaagctgatgaggacagaccagctgaaattgggtggaggaccgttctctgtccccaggtcctgtctctgcacagaaacttgaactccaggatggaattcttcctcctctgctgggactcctttgcatggcagggcctcatctcacctctcgcaagagggtctctttgttcaatttttttttatctaaaatgattgtgcctctgcccaagcagcctggagacttcctatgtgtgcattggggtggggcttggggcaccatgagaaggttggcgtgccctggaggctgacacagaggctggcactgagcctgcttgttgggaaaagcccacaggcctgttcccttgtggcttgggacatggcacaggcccgccctctgcctcctcagccatgggacctcatatgcaatttgggatttactagtagccaaaaggaatgaaagagagctctaaccagatggaacactggaacattccagtggaccctggaccattccaggaaaactgggacataggatcgtcccgctatgatggaagtgttcagacagtttataatagtaagcccctgtgaccctctcacttaccccgagacctcactttattacaagatctttccaaatacccaaatatccctgcaagcccgttaaataattccctatgctacccttaataacatacaatgaccacatagtgtgagaacttccaacaagcctcaaagtcccttgagactccccaatacctaataaggcatgcgaaatgttctcatgaactaccccacaacacgcctaaaactcaaaacacccaaaaatatctcctccaatgtcctgagacatgaacccaaaaagagacccacaataaactcgtgacttgtcccctc

SEQ ID NO: 239 - DNA, 1903 bp, Homo sapiens
gggacgcgctacctgcctccgggcgcctgggcttcaggatgaaggaccgtctggagcagctgaaggccaagcagctgacacaggatgatgatactgatgcggttgagattgctatcgacaacacggcttttatggacgagttcttttctgagattgaggaaactcggcttaacattgacaagatctcagaacatgtagaggaggctaagaaactctacagtatcattctctctgcaccgattccagagccaaaaaccaaggatgacctagagcagctcacgactgagattaagaaaagggccaacaacgtccggaacaaactgaagagcatggagaagcatattgaagaagatgaggtcaggtcatcggcagaccttcggattcggaaatcccagcactctgtcctttctcggaagtttgtggaggtgatgaccaaatacaatgaagctcaagtggacttccgagaacgcagcaaagggcgaatccagcggcacgtcgaaattactggcaaaaagacaaccgatgaggagctggaggagatgttggagagtggcaacccggccatcttcacttctgggatcattgactcacagatttccaagcaagccctcagtgagattgagggacgacacaaggacattgtgaggctggagagcagcatcaaggagcttcacgacatgtttatggacatcgccatgctggtggagaatcagggtgagatgttagataacatagagttgaatgtcatgcacacagtggaccacgtggagaaggcacgagatgaaagcaaaaaagctgtgaaataccagagtcaggcccggaagaaattgataattatcattgtgctagtagttgtgttgctgggcattttagcattgattattggactttccgttgggctgaattaagagtggcctaagaggctgctgcactgaaataaactgatttcactccagactggtgtggccacccttgtcttcagatgagaatggagtctgaatggccttcctgagagcgagtgcgacccgttcctttgtttccttgcaaccacccttggacctgactcagctaacaatctagccctgggggaatgtgatctacctgatgcgaccctgagttctccccagagcctcctcctgccccaccagctctcaagtaccttttctcctggactgtgtggacccacccagctttcttcctccctgttgtgtgtcagattatgccttgcacttgggaaagctcttgtgagactctcccaaggtgctgtattttcctacctcaggagtattctccagaaactgcaatgtatttttttaggggagtatctttaacaaagcagaatgattcttctaagtttggcaacaagaaggcttggatctgagtcttctacctggcaggatgccaatcctgtttgttgtccgtatgtcctgaaaacatgagggactggcagatgtcattttggtctaaagagctgacttgtttgaaattcagccttaaattaagctcttagttgttcagcttggggggcaactttgatttttctctgtgttgtagtctctcatatttactcaaggaggaccaggatgatacagtcatctgaggttatgctttgcaaaaggctgacggtatggaatatgtttccatgtctgagtcttagaaactggctgctcattgttagaaagtgatgctttgtgagactattgtcttggggccaaaaataatcagggattttaaattgggcaagggagaaggtgctagaatcctaagctctggaaatatttcatgacactggtgtttcactcatgtgttccagatgtattctaattgtgtatgaaatgtatgtacacataagtgtgtgtgtctcaggaagtaggaaataaaaatggaagctattatgacctca

SEQ ID NO: 240 - DNA, 1592 bp, Homo sapiens
ggcacgagtcgaagagctcctggacgcagaggccctgcccttgccagacggcgcagacatgtcagaacaaagtaaggatctgagcgaccctaactttgcagccgaggcccccaactccgaggtgcacagcagccctggggtttcggagggggttcctccgtccgcgaccctggcagagccgcagagccctcctctaggcccgacggccgctccgcaggccgcgccgcctccccaggccccgaacgacgagggcgacccgaaggccctgcagcaggctgcggaggagggccgcgcccaccaggccccgagcgcggcccagccgggcccggcaccgccagccccggcgcagctggtgcagaaggcgcacgagctcatgtggtacgtgctggtcaaggaccagaagaagatgatcatctggtttccagacatggtgaaagatgtcatcggcagctacaagaagtggtgcaggagcatcctccggcgcaccagcctcatcctcgcccgggtgttcgggctgcacctgaggctaaccagcctgcacaccatggagtttgcgctggtcaaagcgctggagcccgaggagctggacagggtggcgctgagcaaccgcatgcccatgacaggcctcctgctcatgatcctgagcctcatctacgtgaagggccgcggcgccagagagagcgccgtctggaacgtgctgcgcatcctggggctgcggccctggaagaagcactccaccttcggggacgtgcggaagctcatcactgaggagttcgtccaaatgaattacctgaagtaccagcgcgtcccatacgtggagccgcccgaatacgagttcttttggggctcccgggccagccgcgaaatcaccaagatgcaaatcatggagttcctggccagggtctttaagaaagacccccaggcctggccctcccgatacagagaagctctggaggaggccagagctctgcgggaggctaatcccactgcccactaccctcgcagcagtgtctctgaggactagcaaagtctggaggcagatgaatggtttctgaccctcaccagggctgtggaagggtgggggtgggtcattatagtattcaggatttacagtgcagtattcacgtgtaacttttaagttttcagtacagtgcttttatacctttaatgcaatgttgtattcatttgggtactattgtgtagtatttaggatgtatgcatgtttgtttatatgtaagcttggttggtgctttcgcttttgtgctacctttcttggatttttgtaccagagatgtgctaaactgatgaaatacattgagaaagtttccatcttattcttttatatgggactgatgatgtgtgttggggtagactgctcctgcagagtttggaagaagtcaccagcaaagccggcctaaccaagaaaagtcaaggcccttcatgaccttgctgggcacagaaaacaccctcgtggagtacactaatttgaactggactggtctcagtgtgagcacttggcacactttactaaacacatatacaaccccaccgtgagtcaactttaaagtaaacattaaagattcttgtgatac

SEQ ID NO: 241 - DNA, 4040 bp, Homo sapiens
gtccttcccacccttagtcccaggcatctgactaccgggaacctcagccagagtccgggagccccccaccccgtccaggagccaacagagcccccgtcttgctggcgtgagaatacattgctctcctttggttgaatcagctgtccctcttcgtgggaaaatgaaccagaagacaatcctcgtgctcctcattctggccgtcatcaccatctttgccttggtttgtgtcctgctggtgggcaggggtggagatgggggtgaacccagccagcttccccattgcccctctgtatctcccagtgcccagccttggacacaccctggccagagccagctgtttgcagacctgagccgagaggagctgacggctgtgatgcgctttctgacccagcggctggggccagggctggtggatgcagcccaggcccggccctcggacaactgtgtcttctcagtggagttgcagctgcctcccaaggctgcagccctggctcacttggacagggggagccccccacctgcccgggaggcactggccatcgtcttctttggcaggcaaccccagcccaacgtgagtgagctggtggtggggccactgcctcacccctcctacatgcgggacgtgactgtggagcgtcatggaggccccctgccctatcaccgacgccccgtgctgttccaagagtacctggacatagaccagatgatcttcaacagagagctgccccaggcttctgggcttctccaccactgttgcttctacaagcaccggggacggaacctggtgacaatgaccacggctccccgtggtctgcaatcaggggaccgggccacctggtttggcctctactacaacatctcgggcgctgggttcttcctgcaccacgtgggcttggagctgctagtgaaccacaaggcccttgaccctgcccgctggactatccagaaggtgttctatcaaggccgctactacgacagcctggcccagctggaggcccagtttgaggccggcctggtgaatgtggtgctgatcccagacaatggcacaggtgggtcctggtccctgaagtcccctgtgcccccgggtccagctccccctctacagttctatccccaaggcccccgcttcagtgtccagggaagtcgagtggcctcctcactgtggactttctcctttggcctcggagcattcagtggcccaaggatctttgacgttcgcttccaaggagaaagactagtttatgagataagcctccaagaggccttggccatctatggtggaaattccccagcagcaatgacgacccgctatgtggatggaggctttggcatgggcaagtacaccacgcccctgacccgtggggtggactgcccctacttggccacctacgtggactggcacttccttttggagtcccaggcccccaagacaatacgtgatgccttttgtgtgtttgaacagaaccagggcctccccctgcggcgacaccactcagatctctactcgcactactttgggggtcttgcggaaacggtgctggtcgtcagatctatgtccaccttgctcaactatgactatgtgtgggatacggtcttccaccccagtggggccatagaaatacgattctatgccacgggctacatcagctcggcattcctctttggtgctactgggaagtacgggaaccaagtgtcagagcacaccctgggcacggtccacacccacagcgcccacttcaaggtggatctggatgtagcaggactggagaactgggtctgggccgaggatatggtctttgtccccatggctgtgccctggagccctgagcaccagctgcagaggctgcaggtgacccggaagctgctggagatggaggagcaggccgccttcctcgtgggaagcgccacccctcgctacctgtacctggccagcaaccacagcaacaagtggggtcacccccggggctaccgcatccagatgctcagctttgctggagagccgctgccccaaaacagctccatggcgagaggcttcagctgggagaggtaccagctggctgtgacccagcggaaggaggaggagcccagtagcagcagcgttttcaatcagaatgacccttgggcccccactgtggatttcagtgacttcatcaacaatgagaccattgctggaaaggatttggtggcctgggtgacagctggttttctgcatatcccacatgcagaggacattcctaacacagtgactgtggggaacggcgtgggcttcttcctccgaccctataacttctttgacgaagacccctccttctactctgccgactccatctacttccgaggggaccaggatgctggggcctgcgaggtcaaccccctagcttgcctgccccaggctgctgcctgtgcccccgacctccctgccttctcccacgggggcttctctcacaactaggcggtcctgggatggggcatgtggccaagggctccagggccagggtgtgagggatggggagcagctgggcactgggccggcagcctggttccctctttcctgtgccaggactctctttcttccactaccctccctcgcatccgcctctgagccaggagcctcctgaccctgtgatgcctgacacaggggacactgaaccttgttgatgccagctgtactgagttctcatccacagaggccaggcatggcccagcctggagccgtggccgagggcttccctagatggttccctttgttgctgtctggctttcccgaatctttttaggccacctccaaggactctaaaagggggctattccctggagaccccagagtagggttgccagtcctgcaagtccatagctgagctggaaaggatgcttctgctcacattccctctcatccaggtcctttccttctcgtcttcctctctctcacctacttcctcctcctcctcctgttcctgccttctcttctatcctgcaatttctcccgaatcctgaggggatatccctatgtcccagcccctggtactcccccagccctcagttttcagtcaagttccgtctcctctccagccctatggaagtctcaaggtcacgggacccctaatcagagtggccaatccctgtgtgtcgttcccttgtgtctgttgcttattgggagtaggagttgctcctacccctgtcctggggctgggtgtgtttcaggacagctgcttctgtgcatttgtgtctgcctgcctcatgctctctatagaggaggatggtcatcgtgacagcagcagctcaagttagcatttcaagtgatttgggggtgcaatgataatgaagaatggccattttgtaccagggctctgtattctgcaacagcctgtttgggaggctggagtggaaacaaagggtgggcatcaaagatgagaagccaaagcccctacaactccagccacccagccaggaggggctgtccaatcacattcaggcatgcgaatgagctgggccctgggtgaggtgggggtctggcctagtggggaggggcctggcctgggtggggcagggcctggcctggtccaggcttgggctccattcccatcactgctgtccctcctgaggtctggattggggatggggacaaagaaatagcaagagatgagaaacaacagaaacttttttctctaaaggactggttaaatcaattctgatacagccttacaatacaatagtatgcagctaaaaaataattgtatgtctttatatactaatatgtaataatcttcaggtgaaaaaggcaagccacagaaatgtgtwtagcgcacttcccatttgtgtttcagaaaggagtagaatataaacacataattgcttatgtatgcctattcagaataaatgggtaacactgattacttttgggaggggaaccagtaggttgaggacaggagagggaagggtcttaacacttacacccttttgtacattttgaattttgaaccatgtgactgtattacctattcaaaataaacaataaatgggcccaaaaaaaaaaaaaaaaa

SEQ ID NO: 242 - DNA, 9358 bp, Homo sapiens
aagcttatggtgcaaccaaaaatctttcagtgttttttcctactcacactttatactgactgaatagagatcctgatggttgacactaccaatttcagctttggagaccccttcactcagtcatagctgcatgttttatagctgaagctattgggtttgtgacccctagctgacttgacccaggcttgcacagcagcaaccttctttgagaattccactttaattcagggcctctgctgccccatcaccaagataacatctcttatgttctcacctggtttcaacacaagcgaagttttccagggcagcagcatctacctaggtttgatggggtcagcttctcattctccagtgggtcacctttgccagcactgtaaacccaaattcaaggcagtgagagcctgaatactactcaatgcctcatctacggtttcccataggagtttgtctgtttcagggaaatctccctgaaaggcccacagctcccttattgcagccaggatctattgcaaaaaaaaaaaaccaaaaaaaaaaaaaaacaaacaaaaaaaacctctaagaccttctactgtctctcctagtggatctaaggcagacacgatggaccgcaggaggggctgagccataagacccagtttacgttgccattcttccttgacaagcattactagccgcacttcctcatctcccaagtgaaccagccaaactcctaatgatgtgcctggtttctgcccatagtggtcatgaatttccctccttccacacatctctgcaattgttgtctaaaagagggcagaatcttttatgtgcaccagacaatacctagtactagttgttacagtggggcagacctgagggtaactccaaattgttcaggaagttctacacctgcattagagttagcaagaaccagggcaccatttgagcagtggtctttgaatctgcttgctggtactcagcctgcatccacctcttcaatccccatcatgaacaggcaataaagtgaagaactatttatggcctagttgagcagataatttggtcaacatatttcagcgactttcttcaaatttgttttcttttttttttgaaacagggtctcgctctgttgcccaggctggagtgcagtggcgcgctcttgctcactgcagcctcgacttcccaggttcgagcgattctcccacctcagcctcccgagcagctgggaacacaggcacacatcaccatgcccagctaatttttgtatttttcgtagaggcaaggttttgccacgttgcccaggctggtctcaaactcctgagctcaagaaatctgcttgccttggcctcacaaattgctgggattacaggtgtgagccatcacgcccggccctcaaatttcattaaatttacccacaatatcctcatccttctccttctagaaagccatgtctctgtcagtatcccgccctcctcactaaagctgtcaagaactataaaaggtctgagattttgtcctactcaacaagctaacaagtcagcccactacagtttcatggaatctggtagaaaacatgacactcagagatgggcagtgttttgctgtagaaaggtcagtcaccagatatcaacattttggcaccagtttcttgagccccgattatgtaggggaactcctctgtgctggtgccctgaaaaccgtgcatatatcctcataggccatgtaagcaaagctcaactgcaagctgatccatgccgtggcagaaggctctgtgatcctccccaagcatgagaggataggcagtcttgtgaggagctgccataccgccatttctcacttgcctttctatttttttttcacagtagcaaggacatttattatataaataggtggataaaataagtgtgctttaacttctggatatatggcaaatgctactgtgatgcagtttttcagtgcagacatgtgactcttcaatgatggggatgggccccctagtgtgatgtgcagccactatactccatatggcaaacctcctggttcaaggcagagaggagacaccttattctatagaacaggatggggcttccaccctggggaccatacaagtggctcccataggcagccacgcctttctggcaagctgtggcatacccaggtgcaggctgggggaggggctggcacagcagccccagcgtgctctggcttcagcctgatggagaagcaaaactaggacctccctctcccagatgttgctgaccctatcgccacctccaccctctaccctgcgctgggagttcgctgtgacgcagcctgttccatagccatagggagaccaaagtgaacgatcacagtgcccctcacctattctaggggacttggatgctcagtagagcttaatgccatggcatctgagagcacccaccctgtccctgagggcagctgtgccgggccagggggccgcaagggcatgggtggaatcttggtcactggcagcactcagccacgtgcctgaggagctcttcaccttgttcgtcactgaagcactgcaggcagtgagggcactgaagttccccctggcctctctgggctgcgccaggatgcccgccctctgcagggggttccaaccgcctgggacccagtcccaggcctccagccaccaggcacgataagctccactgcatcggtggccaagtacttggcagttttgctcccagcgtgaatccagccggcgtctggctcttgagaatcctgtctccaggacacctggtgcagcaaagaggtgaccttttcctccagttcctgaatcctaccttgagcctgttcccgatctgccctttctgacatgaagtcatccttgtaagcgagaatctgctattccagtatctgcacccattccagtgcagcatcccgtgccgtcctcgaggctgccagcttctacgtcaattctgcacagtcgtttattttctcttccaactatctgttgagccgggagatctccttcctcatcagctcgggctcatgggggggggggggtctgcagccccctgagctgtgcatggagccccctcatgtattcgtccctgctgacatcgtatagctgccacttggcatagaggtcttcaacgtgagtcaccttctgttttaacagtcgattttcttcctcagtaacactctggacagaggtgtccctacctgtatgttctgactttcaggacttctctcccccacgttcctttgtgcatgctgtcgttcatccagacacttggccagatgctgacacatgtgggcagtggaggtcagcgtcctccgcagctggtgggtctcattggccaaggagctgcacagaacgtcactggcggggtggggcggttcgccctccgccatgctcctccgcatcagggcgacttccttctctcgctggtgctgtggctggctcagcagctgctgcatctccctctctttcgcttctagtcgctcagtaagcctctcaatttcctggcgcatctgggcctccgcggcgccgttctcctgccgctgcagctgctcccggaagtgcgccacctgctccagcagcgcatccaccagggacggcgcagtgtacccctccagcgcggccagcctggcgtggaggcacgcgatgagggagtcgcgggcggccagctggtcctgcaggcgccgcagccgctacccgacctggtagcacaggccgcagagctctgcagatgcgcgcggggccccctcccggccgtccgaccccgggtccccgcacgtgactgtgggcctgcctgggaggccgcacggccgccggcaacttcggtgcccggaccctgtcggctctctatcttgagggagtttctcatcgcctcttggttccaatgaggtgtgggactttccagcttgtcccctctcccttagggaggctaagctgcaggctataaaactacttagcagcagtatagaaatggctcctctggcgcggtggctcatgcctataatcccagcactttgggaggccgcagcgggtggatcacttgaggtcaggagttccagaccagcctggccaacatggtgaaaccctgtctctactaaaaatacaaaaattagcttggcgtggtgatgtgtgcctgtaatcccagctactcgggaagctgaggcaggagaatcacttgaacccgggaggtggaggttacagtgagccaagatcatgccccactacactgcagcctgggcaacagagcgagactgtctcccaaaaaaaaaaaatatatagaaagaaagaaagagagaaagatatagaaagaaagaaaaatgaaatgactcctcagcaacagggtgccccaacactcatgtttcttgtcatttggcctcttttgtttgggtgtcctattgtgggacaaggaatgcagggagctgacaacatgctgttgtttctttttctgtctatgtaagtaataaactgtctgaatctaatcagtgcttgttgtcctcttaccagccaaatctgtaagcctgctcaacacattctcacagggcaactctaaagaggaccaggtaacacctgcacgtgcagtggattacattataggagagaaaccctggacttagggaatctgaacctttcataatgggcagtaatcattcctgcccttcactccagagggaggctatttttattatagtggacagtaagcatgcttgcccttttctttggagggagacactacctctgtctttcaaggatgcactgtatacaaatatcctggaaaagatagtccggaacaaaggacagtacagtgccttacttgcaagatgtgcaagcacacaagacctatgaagaactgtctcccaacaaaggatacatgcagaaggagaaaaaactctcttaaacaaaaagaggcagagccggcagggaccgagcgggtgcctcagtctccttcccctcccctcgcctgtcctcgccatcttcttctcacagccggaccggaactatgtgatcccggaagttccgggtcctttggccctatatgatcccggaagttccggggcttttggacctctgtgattccggaagttccggggcgttccggggcgttctggggcctttggagcgtgggataagcagtaatggcggaggctgcagctcccggaacaacagtcacaacatcgggagcaggagcagcagcggcggaggcggcggagacggcggaagcagtctccccgactccgatccccacagtcaccgccccgtccccgagggcgggcggaggggtcggcggcagcgacggcagcgacggtagtggcggcaggggcgacagtggcgcgtatgacggcagcggtgcgtgcggcggcagcgacgcgtgcgatggcagcggcgacagcagcggcgacagctggactaaacaggtcacttgtagatattttaagtatgggatttgtaaggaaggagataactgtcgctactcgcatgacctctctgaccgtctgtgtggtgtagtgtgcaagtattttcagcgagggtgctgtgtttatggagaccgctgcagatgtgaacatagcaagccattgaaacaggaagaagcaactgctacagagctaactacaaagtcatcccttgctgcttcctcaagtctctcatcaatagttggaccacttgttgaaatgaatacaaacgaagctgagtcaagaaattcaaattttgcaactgtagtagcaggttcagaggactgggcgaatgccattgagtttgttcctgggcaaccctactgtggccgtactgtgccttcctgcactgaagcacccctgcagggctcagtgaccaaggaagaatcagaggaagagcaaaccgccgtggaaacaaagaagcagctgtgcccctatgctgcagtgggacagtgccgatatggggagaactgtgtgtatctccacggagatttatgtgacatgtgtgggctgcaggtcctgcatccgatggatgctgcccagagatcacagcatatacaagcgtgcattgaagcccatgagaaagacatggagttctcatttgctgtgcagcgcagcaaggacaaggtgtgtgggatctgcatggaggtggtctatgagaaagccaaccccaacgagcaccgcttcgggatcctctccaactgcaaccacaccttctgtctcaagtgcattcgcaagtggaggagtgctaaggaatttgagagcaggatcgtcaagtcctgcccacaatgccgaatcacatctaactttgtcattccaagtgagtactgggtggaggagaaagaagagaagcagaaactcattcagaaatacaaggaggcaatgagcaacaaggcatgcaagtattttgatgaaggacgtgggagctgcccatttggagagaactgtttttacaagcatatgtaccctgatggccgcagagaggagccacagagacagcaagtgggaacatcaagcagaaacccaggccaacaaaggaaccacttctgggaattctttgaggaaggagcgaacagcaacccctttgacgatgaagaagaggctgtcacctttgagctgggtgagatgttgcttatgctttaggctgcaggtggggacgacaaactgacagactctgaaaatgagtgggacttgttttgtgatgaagaattttatgtcttagatctatagaaaccttgcgtagtgtgtgagctggtctgctgaccccagatagcagctgtcccctgtggtggtgtggcagtgcctatgttctctcctaggcagacctatcaactccaggtgctgcggttaagaatatgtacccagggcctgtcttgtcaacccctcacctttccccaaggagtgtgttgttttccctgttggaaaaagttacaaaaataaatgttaaaggttttttttgttttttgttttattgagacagagtcccactctgtcacccaggctggagtgcagtggtgcaatcttggctcactgcaacctccgtcttccgggttcaagccattctcctgtctcagcctcccaagttgctgggactacaggtgcatgctacaatgcccagctaatttttctcatttttagtagaaacggggtttcaccatattggtcaggctggtctcgaactcctgacctcaggtgatccacctgccactaccttccaaagtgctgggattacaggcgtcagccaccatgcccagccttaaagttagttttttgtaacaggcatgagccaccgcgcctggctttaaagttcgttttttgtaacaggcataagccactgtgcctggccttaaagttagtttttttgtaacacgaatttaactgttggacagttagtttagatgtgttgcatcatctgttttcaaccagattgtgtttatggacttttcacacactaattttgaggaccccaggttcaaaagtaaaagcagtggccctgctttggggtccaataataggagtgatgggtgaagggacctaagctggccagtagccttctgctccagacatgggacgcggatccttgaggtttctggttaaatctgcacatctgtgtttttatatctgttccctacccctgtaatccctaccgcatgcactagttctgtagttttggtctctcgtttaattgtatgcaagtagtactactgggtaaccagagccaagcgtgaatgtgttcagatttctactgttttgcatgataggaaaattgagaaagaatacatataaaagatatagaggcataacatcaatgcagagttggaagttgacctccacggggtgacatggtgtgtgtgagtgtgggtgtgtgagtgtgggtgtgtgataagcttctcaaacctgcatagatgcagtattcttggctttggtagaaagccttggtttaaggctgggcgcggtggctcacgcctgtaatcccagcactttgggaggctgaggcggccggatcacaaggccaggagatcgagaccatcctgtgaatggcgaaaccctgtctctactaaaaatacaaaaaattagccgggcgtagtggcgggcgcctgtagtcccagctactctggaggctgaggcgggagaatggtgtgaacctgggaggcggagcttgcaatgaactgagaatgtgccactggactcccagcctgggtgacagagcgagactctgtctcaaacaaaaaaaaacaaaaacggaaacccttggtttaggggtttaagtcttatgtggtggttaagatcttaaaggacaaagcagtatattggtagttatcaatatagcagtactagctctgtttatataaatagagaaatggagttagccatagaggttaaaactacctggttatcccatatattaacccaaactgggtcttggatacacagttgtatttaatgttttacgatctagcctttccagtataggcacttcctgaaaaacctttgtcctcatttggggcattttgttgttgggtttcgccatgttggccaggctggtctcgaactcctgacctcaggtgatccacctgcctcagcctcccaaagtgctgggattacgggcatgagccaccacacccggccaggaaaaggtattttatatttatcattgctgtgctgtttattcatttgtataaattcaagttcccatctggtattgttttccttcagcatgaataacttctttgaacatttcttgtggttcatgtctgctggcaacaaattctctcagctatttatctggaaaagtctttatttcaccttcatatttcacctgtattttctttgtgtacagaattctaggttgacatttgttcctgagtgttttaaagatgtcatttcatattcttctggtttgcataatttctgatgagaagtctgcagtttattttctttctatttctctctctttttgctcctctgcaaagccaattcctcttgctatttttaatattttctcattatcattgtttcataggaatttgattatgattttccttggtatgatttccttaatatttattctatttgggaccattgagcttctcatagctgcatatctgtatgtttataattttcatccagtttaaaaaaaaagttttgagaaagagtctcactctgtcacccagtctaaagtacagtgacacgatcttggctcactgcaacctccgcctccctggttcaagtgattcttgtgcctcagtctcctgagtagctggaattacaagtgcatgccatcatgccctggtactttttgtttttacagtagagagggcgttttggccactactttcgtcctcaagtgtagccagctacctccggtttcccaggcgatatcctttggagagtttgggtgtgcagtgtctctagtctcatttgcttcatcgagatc

SEQ ID NO: 243 - DNA, 911 bp, Homo sapiens
ctgtcgcctgcagctgctcgcctgtctccgtcggaagggagcccaagctttgcagagaacatgaacgattggatgcccatcgccaaggagtatgatccactcaaagcgggcagcattgatggcaccgatgaagacccacacgaccgcgcggtctggagggcaatgctggcacgatatgtccccaacaaaggtgtcataggagatcccctcctcaccctgtttgtggccagactaaacttgcagaccaaggaggacaaattaaaggaagtcttttcccgctatggtgacatccggcggcttcggctggtcagggacttggtcacaggtttttcaaagggctacgccttcatcgaatacaaggaggagcgtgccgtgatcaaagcttaccgagatgctgatggcctggttattgaccagcatgagatatttgtggactacgagctggaaaggactctcaaagggtggatccctcggcgacttggaggcggtcttgggggaaaaaaggagtctgggcaactgagatttgggggacgggaccggccttttcgaaaacctattaacttgccagttgttaaaaacgacctctatagagagggaaaacgggaaaggcgggagcgatctcgatcccgagaaagacactgggactcgaggacaagggatcgagaccatgacaggggccgggagaagagatggcaagaaagagagccgaccagggtgtggcccgacaatgactgggagagagagagggacttcagagatgacaggatcaaggggagggagaagaaggaaagaggcaagtagaggcccaacagcagaaccccaaagtgaagttacagtggaaatgagtggagggggattgtctttcaacgcagcgtgagtctaatggttgaataaaacttactgatgaaaaa

SEQ ID NO: 244 - DNA, 2343 bp, Homo sapiens
  misc_feature (1)..(2343): n=a,t,g or c
gcgcggccccgaaccgccgccaggccggcacgggggaaggagccggtgggggtagggggtgcggtggggggtggggaccctccggctcttgggggtcccagtccccgccggctgctgagcgggtggggtggtggaggagctgcagagatgtccggccagagcctgacggaccgaatcactgccgcccagcacagtgtcaccggctctgccgtatccaagacagtatgcaaggccacgacccacgagatcatggggcccaagaaaaagcacctggactacttaattcagtgcacaaatgagatgaatgtgaacatcccacagttggcagacagtttatttgaaagaactactaatagtagttgggtggtggtcttcaaatctctcattacaactcatcatttgatggtgtatggaaatgagcgttttattcagtatttggcttcaagaaacacgttgtttaacttaagcaattttttggataaaagtggattgcaaggatatgacatgtctacatttattaggcggtatagtagatatttaaatgagaaagcagtttcatacagacaagttgcatttgatttcacaaaagtgaagagaggggctgatggagttatgagaacaatgaacacagaaaaactcctaaaaactgtaccaattattcagaatcaaatggatgcacttcttgattttaatgttaatagcaatgaacttacaaatggggtaataaatgctgccttcatgctcctgttcaaagatgccattagactgtttgcagcataccatgaaggaattattaatttgttggaaaaatattttgatatgaaaaagaaccaatgcaaagaaggtcttgacatctataagaagttcctaactaggatgacaagaatctcagagttcctcaaagttgcagagcaagttggaattgacagaggtgatataccagacctttcacaggcccctagcagtcttcttgatgctttggaacaacatttagcttccttggaaggaaagaaaatcaaagattctacagctgcaagcagggcaactacactttccaatgcagtgtcttccctggcaagcactggtctatctctgaccaaagtggatgaaagggaaaagcaggcagcattagaggaagaacaggcacgtttgaaagctttaaaggaacagcgcctaaaagaacttgcaaagaaacctcatacctctttaacaactgcagcctctcctgtatccacctcagcaggagggataatgactgcaccagccattgacatattttctacccctagttcttctaacagcacatcaaagctgcccaatgatctgcttgatttgcagcagccaacttttcacccatctgtacatcctatgtcaactgcttctcaggtagcaagtacatggggagatcctttctctgctactgtagatgctgttgatgatgccattccaagcttaaatcctttcctcacaaaaagtagtggtgatgttcacctttccatttcttcagatgtatctacttttactactaggacacctactcatgaaatgtttgttggattcactccttctccagttgcacagccacacccttcagctggccttaatgttgactttgaatctgtgtttggaaataaatctacaaatgttattgtagattctgggggctttgatgaactaggtggacttctcaaaccaacagtggcctctcagaaccagaaccttcctgttgccaaactcccacctagcaagttagtatctgatgacttggattcatctttagccaaccttgtgggcaatcttggcatcggaaatggaaccactaagaatgatgtaaattggagtcaaccaggtgaaaagaagttaactgggggatctaactgcgaaccaaaggttgcaccaacaaccgcttggaatgctgcaacaatggcaccccctgtaatggcctatcctgctactacaccaacaggcatgataggatatggaattcctccacaaatgggaagtgttcctgtaatgacgcaaccaaccttaatatacagccagcctgtcatgagacctccaaacccctttggccctgtatcaggagcacagatacagtttatgtaacttgatggaagaaaatggaattactccaaaaagacaagtgctcaagcagcaaaatccttacttccagcaaaatccaaactgctgtctcttaaatctcttaaactctcttcttccattaggatgctacaagtanctcagtgaaggcccatgaagggaattggggactagtttatagggngaacgtattcattacagtttataaaggccaggattggnttggattttaggattangttc

SEQ ID NO: 245 - DNA, 2267 bp, Homo sapiens
ctcgagctccccacttcctgggcttctggggctggggtcttagcatcttctcccaggcctcccctcccccataggtggctgccctggggccagggaaccgaagtcctgggggggtgagaggggcaggtggggagacgggtggccagactggtgggcaggaggccagagcaggccaggctctgggcccctctctctgtctttctgcgttggggcccagccctccgtagacaaccatgtgtcactgctgcctgggaaggacaggaagttgccgggtgggctgcgagttgtgagggattagagagcgggtgcccaggcaggggggtggggctgcggctcctgcccacctcgccatctgctggggtgcccacctgctgtctggggccgctcgccctctgcctctgctgggggggctctgtaacgtggtgtctggctcccctacctgcagagcaacggcaaaggcaaggactgcgtcttcacggagattgtgctggagaacaactacacagcgctgcagaatgccaagtacgagggctggtacatggccttcacccgcaagggccggccccgcaagggctccaagacgcggcagcaccagcgtgaggtccacttcatgaagcggctgccccggggccaccacaccaccgagcagagcctgcgcttcgagttcctcaactacccgcccttcacgcgcagcctgcgcggcagccagaggacttgggcccccgagccccgatagtgctgcctggccctccccacaatgccagaccgcagagaggctcatcctgtagggcacccaaaactcaagcaagatgagctgtgcgctgctctgcaggctggggaggtgctgggggagccctgggttccggttgttgatattgtttgctgttgggtttttgctgtttttttttttttttttttttttaaaacaaaagagaggctctatttttgtattccacttggctgtggtgtctgtcttcttaactctcagaaagctccattagtggcctagactgggattccggctgggggtttgcgggggtggggggctttctctagcctgtgctgctgaggccccagtacctccagggccagttggctgggcagccagggactccactgcacccccaggtggggcagggaggaaaggactgtgacatagggcagtcctcttagaagtgggtatcagactggtggctattaaatgattgaaatatttatttaacttgcatattaaaaatgtgtgctggagagtgagtcctgccggggtcagcccctccctccaaccttgccccagctggtgggcggctgggagacgcagatgaccaggtgccagctctgaccacagcctccctccagcctaaagacacctgcctgtcaaccatccccatcactgtcacttgaggggttttcctgcaaggacagaagcagggaaaggggcaagaagaggctcttagctagtccttggagctctcagatgtgtacctcctagcactttacagaggtcattgctaacacttccccaggccacctcagggccagaaataatggatgtgctagggctagagctgtaatcatggatttaatcctcttaaaaagtgcttctctgagtgcctaggtccatgtgggagacaggttggagattccagaacttgctctttctgagactcaggctccagaaaatgaaagaaaagagcagctgccagggtccaaggtgggggcatattggagggggaccaccaagactggtgttgacaatggtgatgtgggacaagtgttaaccttgggtgatatggtgagatagctgtgggcagaaagcactgagctgaggtgcggcgaggagcctggggaactgtcttccaggaagaggctgcccacctcggaggatgggctggcgggagaggagctgggcaccggatggcaccagaagggaagctcataggcctagcgcagaactaaaggcagtcatagccttggggagaagcaggaggccgtatgtggagggagggagggctgctgtgggagtggtggagcaggtcatggtgtgggcagagaagggaatgggcaagggtgcaggtgtgtgtttgcgtgtggactggtgagactggtgtcctgccacaccgagggagagcccaggccccacggcagtttcctgagtgcagagctggcccaggcttcatcgctgaggcctcccattagggctgctcctgcttccttccttgtggatgccctgggctggtcccacagcccagctactgagccagtctaga

SEQ ID NO: 246 - DNA, 2044 bp, Homo sapiens
ccggtcggatgccggaccgggggcaccgctgaggcggtgggtccccgacctgcgagacaggtttggaagcccccgctgcgcccagtccgtgcggaccgcgaggccgcgggcgggtggaggcgcgtctccggcacgatgaaggatttgggggcagagcacttggcaggtcatgaaggggtccaacttctcgggttgttgaacgtctacctggaacaagaagagagattccaacctcgagaaaaagggctgagtttgattgaggctaccccggagaatgataacactttgtgtccaggattgagaaatgccaaagttgaagatttaaggagtttagccaacttttttggatcttgcactgaaacttttgtcctggctgtcaatattttggacaggttcttggctcttatgaaggtgaaacctaaacatttgtcttgcattggagtctgttcttttttgctggctgctagaatagttgaagaagactgcaatattccatccactcatgatgtgatccggattagtcagtgtaaatgtactgcttctgacataaaacggatggaaaaaataatttcagaaaaattgcactatgaattggaagctactactgccttaaactttttgcacttataccatactattatactttgtcatacttcagaaaggaaagaaatactgagccttgataaactagaagctcagctgaaagcttgcaactgccgactcatcttttcaaaagcaaaaccatctgtattagccttgtgccttctcaatttggaagtggaaactttgaaatctgttgaattactggaaattctcttgctagttaaaaaacattccaagattaatgacactgagttcttctactggagagagttggtttctaaatgcctagccgagtattcttctcctgaatgttgcaaaccagatcttaagaagttggtttggatcgtttcaaggcgcacagcccagaacctccacaacagctactatagtgttcctgagctgccaacgatacctgaggggggttgttttgatgaaagtgaaagtgaggactcttgtgaagatatgagttgtggagaggagagtctcagcagctctcctcccagtgatcaagagtgcaccttctttttcaacttcaaagtggcacaaacactgtgctttccatcttagaaatctgattgttctgtcagaatttatatttacagggtttcaaagcaataaatgggggaataggtagtttcctggtttagcccccatctagtcaggaattaatatactggaatacctaccttctatttgttattcagatcagatctggcctattttcatatttatcctaagccatcaaatggggtagtgcctcttaaaccattaacagtactttagacattggcactttatttttctcgtagatctttagctactttggggaggagggaaggtgctgataccttcaatttgttacttttcaagatttttaaaaataactagtgtagcttatcttaaacattttataaaaccttcagatgtctttaagcagattggaagtatgcaagtgcttccttagcagggacagtggataatccttaatggtttatcatagatttcaccctccccccttctcagaagagtgagtatgctcttaaatgtcaaacacatttttgttgttttgttttttaaatgatcagtgtctatttgatgtgatgcagatcttataaatttgggaattataatattgacatttctgtgatttttatatatgtaatgtcttaattgagatttgtgttaaggcagaaataattaggctagggctcttagttttcattcctattgccccaagtattgtcaaactatggtattattttaatgttactttaaaaatccataatctgctagttttgcatgtacttatatgaaaacagtgcagtaagttgaaaactcagtatctatggaattgataaatgttgatctggtgtagtatattttatccgcattttcttatattaaaaaatgttctgcatgattacattttatttgcctttgt

SEQ ID NO: 247 - DNA, 5926 bp, Homo sapiens
ccggctgcctctgctgcagttcagagcaacttcaggagcttcccagccgagagcttcaggacgcctttcctgtcccactggcccagttgccacaacaaacaacagagaagacggtgaccatgggggatgtgaagctggttgcctcgtcacacatttccaaaacctccctcagtgtggatccctcaagagttgactccatgcccctgacagaggcccctgctttcattttgccccctcggaacctctgcatcaaagaaggagccaccgccaagttcgaagggcgggtccggggttacccagagccccaggtgacatggcacagaaacgggcaacccatcaccagcgggggccgcttcctgctggattgcggcatccgggggactttcagccttgtgattcatgctgtccatgaggaggacaggggaaagtatacctgtgaagccaccaatggcagtggtgctcgccaggtgacagtggagttgacagtagaaggaagttttgcgaagcagcttggtcagcctgttgtttccaaaaccttaggggatagattttcagcttcagcagtggagacccgtcctagcatctggggggagtgcccaccaaagtttgctaccaagctgggccgagttgtggtcaaagaaggacagatgggacgattctcctgcaagatcactggccggccccaaccgcaggtcacctggctcaagggaaatgttccactgcagccgagtgcccgtgtgtctgtgtctgagaagaacggcatgcaggttctggaaatccatggagtcaaccaagatgacgtgggagtgtacacgtgcctggtggtgaacgggtcggggaaggcctcgatgtcagctgaactttccatccaaggtttggacagtgccaataggtcatttgtgagagaaacaaaagccaccaattcagatgtcaggaaagaggtgaccaatgtaatctcaaaggagtcgaagctggacagtctggaggctgcagccaaaagcaagaactgctccagcccccagagaggtggctccccaccctgggctgcaaacagccagcctcagcccccaagggagtccaagctggagtcatgcaaggactcgcccagaacggccccgcagaccccggtccttcagaagacttccagctccatcaccctgcaggccgcaagagttcagccggaaccaagagcaccaggcctgggggtcctatcaccttctggagaagagaggaagaggccagctcctccccgtccagccaccttccccaccaggcagcctggcctggggagccaagatgttgtgagcaaggctgctaacaggagaatccccatggagggccagagggattcagcattccccaaatttgagagcaagccccaaagccaggaggtcaaggaaaatcaaactgtcaagttcagatgtgaagtttccgggattccaaagcctgaagtggcctggttcctggaaggcacccccgtgaggagacaggaaggcagcattgaggtttatgaagatgctggctcccattacctctgcctgctgaaagcccggaccagggacagtgggacatacagctgcactgcttccaacgcccaaggccaggtgtcctgtagctggaccctccaagtggaaaggcttgccgtgatggaggtggccccctccttctccagtgtcctgaaggactgcgctgttattgagggccaggattttgtgctgcagtgctccgtacgggggaccccagtgccccggatcacttggctgctgaatgggcagcccatccagtacgctcgctccacctgcgaggccggcgtggctgagctccacatccaggatgccctgccggaggaccatggcacctacacctgcctagctgagaatgccttggggcaggtgtcctgcagcgcctgggtcaccgtccatgaaaagaagagtagcaggaagagtgagtaccttctgcctgtggctcccagcaagcccactgcacccatcttcctgcagggcctctctgatctcaaagtcatggatggaagccaggtcactatgactgtccaagtgtcagggaatccaccccctgaagtcatctggctgcacaatgggaatgagatccaagagtcagaggacttccactttgaacagagaggaactcagcacagcctttggatccaggaagtgttcccggaggacacgggcacgtacacctgcgaggcctggaacagcgctggagaggtccgcacccaggccgtgctcacggtacaagagcctcacgatggcacccagccctggttcatcagtaagcctcgctcagtgacagcctccctgggccagagtgtcctcatctcctgcgccatagctggtgacccctttcctaccgtgcactggctcagagatggcaaagccctctgcaaagacactggccacttcgaggtgcttcagaatgaggacgtgttcaccctggttctaaagaaggtgcagccctggcatgccggccagtatgagatcctgctcaagaaccgggttggcgaatgcagttgccaggtgtcactgatgctacagaacagctctgccagagcccttccacgggggagggagcctgccagctgcgaggacctctgtggtggaggagttggtgctgatggtggtggtagtgaccgctatgggtccctgaggcctggctggccagcaagagggcagggttggctagaggaggaagacggcgaggacgtgcgaggggtgctgaagaggcgcgtggagacgaggcagcacactgaggaggcgatccgccagcaggaggtggagcagctggacttccgagacctcctggggaagaaggtgagtacaaagaccctatcggaagacgacctgaaggagatcccggccgagcagatggatttccgtgccaacctgcagcggcaagtgaagccaaagactgtgtctgaggaagagaggaaggtgcacagcccccagcaggtcgattttcgctctgtcctggccaagaaggggacttccaagacccccgtgcctgagaaggtgccaccgccaaaacctgccaccccggattttcgctcagtgctgggtggcaagaagaaattaccagcagagaatggcagcagcagtgccgagaccctgaatgccaaggcagtggagagttccaagcccctgagcaatgcacagccttcagggcccttgaaacccgtgggcaacgccaagcctgctgagaccctgaagccaatgggcaacgccaagcctgccgagaccctgaagcccatgggcaatgccaagcctgatgagaacctgaaatccgctagcaaagaagaactcaagaaagacgttaagaatgatgtgaactgcaagagaggccatgcagggaccacagataatgaaaagagatcagagagccaggggacagccccagccttcaagcagaagctgcaagatgttcatgtggcagagggcaagaagctgctgctccagtgccaggtgtcttctgaccccccagccaccatcatctggacgctgaatggaaagaccctcaagaccaccaagttcatcatcctctcccaggaaggctcactctgctccgtctccatcgagaaggcactgcctgaggacagaggcttatacaagtgtgtagccaagaatgacgctggccaggcggagtgctcctgccaagtcaccgtggatgatgctccagccagtgagaacaccaaggccccagagatgaaatcccggaggcccaagagctctcttcctcccgtgctaggaactgagagtgatgcgactgtgaaaaagaaacctgcccccaagacacctccgaaggcagcaatgccccctcagatcatccagttccctgaggaccagaaggtacgcgcaggagagtcagtggagctgtttggcaaagtgacaggcactcagcccatcacctgtacctggatgaagttccgaaagcagatccaggaaagcgagcacatgaaggtggagaacagcgagaatggcagcaagctcaccatcctggccgcgcgccaggagcactgcggctgctacacactgctggtggagaacaagctgggcagcaggcaggcccaggtcaacctcactgtcgtggataagccagaccccccagctggcacaccttgtgcctctgacattcggagctcctcactgaccctgtcctggtatggctcctcatatgatgggggcagtgctgtacagtcctacagcatcgagatctgggactcagccaacaagacgtggaaggaactagccacatgccgcagcacctctttcaacgtccaggacctgctgcctgaccacgaatataagttccgtgtacgtgcaatcaacgtgtatggaaccagtgagccaagccaggagtctgaactcacaacggtaggagagaaacctgaagagccgaaggatgaagtggaggtgtcagatgatgatgagaaggagcccgaggttgattaccggacagtgacaatcaatactgaacaaaaagtatctgacttctacgacattgaggagagattaggatctgggaaatttggacaggtctttcgacttgtagaaaagaaaactcgaaaagtctgggcagggaagttcttcaaggcatattcagcaaaagagaaagagaatatccggcaggagattagcatcatgaactgcctccaccaccctaagctggtccagtgtgtggatgcctttgaagaaaaggccaacatcgtcatggtcctggagatcgtgtcaggaggggagctgtttgagcgcatcattgacgaggactttgagctgacggagcgtgagtgcatcaagtacatgcggcagatctcggagggagtggagtacatccacaagcagggcatcgtgcacctggacctcaagccggagaacatcatgtgtgtcaacaagacgggcaccaggatcaagctcatcgactttggtctggccaggaggctggagaatgcggggtctctgaaggtcctctttggcaccccagaatttgtggctcctgaagtgatcaactatgagcccatcggctacgccacagacatgtggagcatcggggtcatctgctacatcctagtcagtggcctttcccccttcatgggagacaacgataacgaaaccttggccaacgttacctcagccacctgggacttcgacgacgaggcattcgatgagatctccgacgatgccaaggatttcatcagcaatctgctgaagaaagatatgaaaaaccgcctggactgcacgcagtgccttcagcatccatggctaatgaaagataccaagaacatggaggccaagaaactctccaaggaccggatgaagaagtacatggcaagaaggaaatggcagaaaacgggcaatgctgtgagagccattggaagactgtcctctatggcaatgatctcagggctcagtggcaggaaatcctcaacagggtcaccaaccagcccgctcaatgcagaaaaactagaatctgaagaagatgtgtcccaagctttccttgaggctgttgctgaggaaaagcctcatgtaaaaccctatttctctaagaccattcgcgatttagaagttgtggagggaagtgctgctagatttgactgcaagattgaaggatacccagaccccgaggttgtctggttcaaagatgaccagtcaatcagggagtcccgccacttccagatagactacgatgaggacgggaactgctctttaattattagtgatgtttgcggggatgacgatgccaagtacacctgcaaggctgtcaacagtcttggagaagccacctgcacagcagagctcattgtggaaacgatggaggaaggtgaaggggaaggggaagaggaagaagagtgaaacaaagccagagaaaagcagtttctaagtcatattaaaaggactatttctctcaaaatcca

SEQ ID NO: 248 - DNA, 600 bp, Homo sapiens
ccgactccagctctgacttttttcgcggctctcggcttccactgcagccatgtcactcctcttgctggtggtctcagcccttcacatcctcattcttatactgcttttcgtggccactttggacaagtcctggtggactctccctgggaaagagtccctgaatctctggtacgactgcacgtggaacaacgacaccaaaacatgggcctgcagtaatgtcagcgagaatggctggctgaaggcggtgcaggtcctcatggtgctctccctcattctctgctgtctctccttcatcctgttcatgttccagctctacaccatgcgacgaggaggtctcttctatgccaccggcctctgccagctttgcaccagcgtggcggtgtttactggcgccttgatctatgccattcacgccgaggagatcctggagaagcacccgcgagggggcagcttcggatactgcttcgccctggcctgggtggccttccccctcgccctggtcagcggcatcatctacatccacctacggaagcgggagtgagcgccgcgcctcgctcggctgcccccgccccttccgggcccccctgccgcgcgtcctcc

SEQ ID NO: 249 - DNA, 1475 bp, Homo sapiens
gtcaccgagtcgttggcgctgtcatggcgggtgtgctgaagaagaccactggccttgtgggattggctgtgtgcaatactcctcacgagaggctaagaatattgtacacaaagattcttgatgttcttgaggaaatccctaaaaatgcagcatatagaaagtatacagaacagattacaaatgagaagctggctatggttaaagcggaaccagatgttaaaaaattagaagaccaacttcaaggcggtcaattagaagaggtgattcttcaggctgaacatgaactaaatctggcaagaaaaatgagggaatggaaactatgggagccattagtggaagagcctcctgccgatcagtggaaatggccaatataattattaagtgactttggtgtgttcatgggaaactgatgtaattaaatattctgttatattaagagcgtgttcttattactgacattttgtaatcaagaaaagtgatatagaaaatatgtaggagactgttaaaattggtgattatggtaatatggtcatgtgaatcaatttttgatttataaagtactcacacaagttgtttcaaagatgatatttctgtgaacagagaggccatgggaagatttgaaaattattaaagaaaaattcctacagattttcaatgcagagaccataatcaaaaagtaaactttctttagtagtatgttcaatacatcatttaattttttaagttatcctgaagaaggaaaggtccttaattattatagtctaaacaaatttatagattactgtttgaagtaaataatacgagtgaatattttcaaatgtgataaaatagcacaagtggctggtgataaaatttgaaattatggttaacctcagctgtgatcttatgtatgtaaagtgaaatttaaatagataattataggttgattacaaaatccatagtgtcattttattttagtcattattgaattataccatttactctgttttcttatagtcttaattttattatattttgttgttactgtattatatttgaaaaccttcaaattagaatacattgtacagttaaagaaattgacttggtacttaaaagaaagatttcccattgcatacaggttattggagaaattttccttttgttgcatttgtggaagttagttttctggcccgtggcctttaattttcttaatcaacctaattacatcaggatagaggtagagtttctgtaaaagaagagacattaagagttcctgaaatttatatctggcataccgataggcttatattcaaaacatcttagtcatacgaccataaattaaaagtggagtcactaaatagtttgcagtacgtttctaatataagtgtaggtgggtatcaaaacaagacaaatgctgttcagggaaagaagttggcaagcttaaggttaaacaaaaataaaattacatgtgttttcgccttcctaaaaaaaaaaaa

SEQ ID NO: 250 - DNA, 1383 bp, Homo sapiens
ggagcgagctggcggcgccgtcgggcgccgggccgggccatggagctgtggccgtgtctggccgcggcgctgctgttgctgctgctgctggtgcagctgagccgcgcggccgagttctacgccaaggtcgccctgtactgcgcgctgtgcttcacggtgtccgccgtggcctcgctcgtctgcctgctgtgccacggcggccggacggtggagaacatgagcatcatcggctggttcgtgcgaagcttcaagtacttttacgggctccgcttcgaggtgcgggacccgcgcaggctgcaggaggcccgtccctgtgtcatcgtctccaaccaccagagcatcctggacatgatgggcctcatggaggtccttccggagcgctgcgtgcagatcgccaagcgggagctgctcttcctggggcccgtgggcctcatcatgtacctcgggggcgtcttcttcatcaaccggcagcgctctagcactgccatgacagtgatggccgacctgggcgagcgcatggtcagggagaacctcaaagtgtggatctatcccgagggtactcgcaacgacaatggggacctgctgccttttaagaagggcgccttctacctggcagtccaggcacaggtgcccatcgtccccgtggtgtactcttccttctcctccttctacaacaccaagaagaagttcttcacttcaggaacagtcacagtgcaggtgctggaagccatccccaccagcggcctcactgcggcggacgtccctgcgctcgtggacacctgccaccgggccatgaggaccaccttcctccacatctccaagaccccccaggagaacggggccactgcggggtctggcgtgcagccggcccagtagcccagaccacggcagggcatgacctggggagggcaggtggaagccgatggctggaggatgggcagaggggactcctcccggcttccaaataccactctgtccggctcccccagctctcactcagcccgggaagcaggaagccccttctgtcactggtctcagacacaggcccctggtgtcccctgcagggggctcagctggaccctccccgggctcgagggcagggactcgcgcccacggcacctctgggagctgggatgataaagatgaggcttgcggctgtggcccgctggtgggctgagccacaaggcccccgatggcccaggagcagatgggaggaccccgaggccaggagtcccagactcacgcaccctgggccacagggagccgggaatcggggcctgctgctcctgctggcctgaagaatctgtggggtcagcactgtactccgttgctgtttttttataaacacactcttggaaaaaaaaaaaaaaaaaaaaaaaaaaa

SEQ ID NO: 251 - DNA, 1023 bp, Homo sapiens
tcttgaagccagagcagcgccaggatgtcacgggagctggccccactgctgcttctcctcctctccatccacagcgccctggccatgaggatctgctccttcaacgtcaggtcctttggggaaagcaagcaggaagacaagaatgccatggatgtcattgtgaaggtcatcaaacgctgtgacatcatactcgtgatggaaatcaaggacagcaacaacaggatctgccccatactgatggagaagctgaacagaaattcaaggagaggcataacgtacaactatgtgattagctctcggcttggaagaaacacatataaagaacaatatgcctttctctacaaggaaaagctggtgtctgtgaagaggagttatcactaccatgactatcaggatggagacgcagatgtgttttccagggagccctttgtggtctggttccaatctccccacactgctgtcaaagacttcgtgattatccccctgcacaccaccccagagacatccgttaaggagatcgatgagttggttgaggtctacacggacgtgaaacaccgctggaaggcggagaatttcattttcatgggtgacttcaatgccggctgcagctacgtccccaagaaggcctggaagaacatccgcttgaggactgaccccaggtttgtttggctgatcggggaccaagaggacaccacggtgaagaagagcaccaactgtgcatatgacaggattgtgcttagaggacaagaaatcgtcagttctgttgttcccaagtcaaacagtgtttttgacttccagaaagcttacaagctgactgaagaggaggccctggatgtcagcgaccactttccagttgaatttaaactacagtcttcaagggccttcaccaacagcaaaaaatctgtcactctaaggaagaaaacaaagagcaaacgctcctagacccaagggtctcatcttattaaccatttcttgcctctaaataaaatgtctctaacagaaaaaaaaaaaaaaaaaaaaaaa

SEQ ID NO: 252 - DNA, 1990 bp, Homo sapiens
gaattccgggggtattggcagctgaggagtggaggctgggcagctccgactccctgacgccagcgcgaccagatcaatccaggctccaggagaaagcaggcgggcgggcggagaaaggagaggccgagcggctcaacccgggccgaggctcggggagcggagagtggcgcaccgcccggccgtccggacccgggccgcgagaccccgctcgcccggccactcgtgctcccgcacggacgggcgcgccgccaacccggtgctgactgggttacttttttaaacactaggaatggtaatttctactcttctggacttcaaactaagaagttaaagagacttctctgtaaataaacaaatctcttctgctgtccttttgcatttggagacagctttatttcaccatatccaaggagtataactagtgctgtcattatgaatgtgacaagtttattttcctttacaagtccagctgtgaagagacttcttgggtggaaacagggcgatgaagaagaaaaatgggcagagaaagctgttgatgctttggtgaaaaaactgaagaaaaagaaaggtgccatggaggaactggaaaaggccttgagctgcccagggcaaccgagtaactgtgtcaccattccccgctctctggatggcaggctgcaagtctcccaccggaagggactgcctcatgtcatttactgccgtgtgtggcgctggcccgatcttcagagccaccatgaactaaaaccactggaatgctgtgagtttccttttggttccaagcagaaggaggtctgcatcaatccctaccactataagagagtagaaagccctgtacttcctcctgtgctggttccaagacacagcgaatataatcctcagcacagcctcttagctcagttccgtaacttaggacaaaatgagcctcacatgccactcaacgccacttttccagattctttccagcaacccaacagccacccgtttcctcactctcccaatagcagttacccaaactctcctgggagcagcagcagcacctaccctcactctcccaccagctcagacccaggaagccctttccagatgccagctgatacgcccccacctgcttacctgcctcctgaagaccccatgacccaggatggctctcagccgatggacacaaacatgatggcgcctcccctgccctcagaaatcaacagaggagatgttcaggcggttgcttatgaggaaccaaaacactggtgctctattgtctactatgagctcaacaatcgtgtgggtgaagcgttccatgcctcctccacaagtgtgttggtggatggtttcactgatccttccaacaataagaaccgtttctgccttgggctgctctccaatgttaaccggaattccactattgaaaacaccaggcggcatattggaaaaggagttcatctttattatgttggaggggaggtgtatgccgaatgccttagtgacagtagcatctttgtgcaaagtcggaactgcaactaccatcatggatttcatcctactactgtttgcaagatccctagtgggtgtagtctgaaaatttttaacaaccaagaatttgctcagttattggcacagtctgtgaaccatggatttgagacagtctatgagcttacaaaaatgtgtactatacgtatgagctttgtgaagggctggggagcagaataccaccgccaggatgttactagcaccccctgctggattgagatacatctgcacggccccctccagtggctggataaagttcttactcaaatgggttcacctcataatcctatttcatctgtatcttaaatggccccagcatctgcctctggaaaactattgagccttgcatgtacttgaaggatggatgagtcagacacgattgagaactgacaaaggagccttgataatacttgacctctgtgaccaactgttggattcagaaatttaaacaaaaaaaaaaaaaaaa

SEQ ID NO: 253 - DNA, 2088 bp, Homo sapiens
gtttgagcagcattgttagagcctgtggaaaacactttacaactgtgtaactgtcttcatctttacagaggaatagtctacaaaggaagacttgtaacctggagaagagacctgtcatttactccatcctttatagtgatgctacaggacgaagaggaatggataaaaacattggcgagcaactcaataaagcgtatgaagccttccggcaggcatgcatggatagagattctgcagtaaaagaattacagcaaaagactgagaactatgagcagagaatacgtgaacaacaggaacagctgtcactccaacagactattattgacaagctaaaatctcagttacttcttgtgaattccactcaagataacaattatggctgtgtccctctgcttgaagacagtgacacaagaaagaatactttgactcttgctcagccacaagataaagtgatttcaggaatagcaagagaaaaactaccaaaggtaagaagacaagaggtttcttctcctagaaaagaaacttcagcaaggagtcttggcagtcctttgctccatgaaaggggtaatatagagaagacttcctgggatctgaaagaagaatttcataaaatatgcatgctagcaaaagcacagaaagaccacttaagcaaacttaatataccagacactgcaactgaaacacagtgctctgtgcctatacagtgtacggataaaacagataaacaagaagcgctgtttacgcctcaggctaaagatgatataaatagaggtgcaccatccatcacatctgtcacaccaagaggactgtgcagagatgaggaagacacctctttggaatcactttctaaattcaatgtcaagtttccacctatggacaatgactcaactttcttacatagcactccagagagacccggcatccttagtcctgccacgtctgaggcagtgtgccaagagaaatttaatatggagttcagagacaacccagggaactttgttaaaacagaagaaactttatttgaaattcagggaattgaccccatagcttcagctatacaaaaccttaaaacaactgacaaaacaaagccctcaaatctcgtaaacacttgtatcaggacaactctggatagagctgcgtgtttgccacctggagaccataatgcattatatgtaaatagcttcccacttctggacccatctgatgcaccttttccctcactcgattccccgggaaaagcaatccgaggaccacagcagcccatttggaagccctttcctaatcaagacagtgactcggtggtactaagtggcacagactcagaactgcatatacctcgagtatgtgaattctgtcaagcagttttcccaccatccattacatccaggggggatttccttcggcatcttaattcacacttcaatggagagacttaagacacatttgaaaacagacatatcaagttctatgtgatgattttgggtttttaatactataaatacttgattgtaaactaaattcaagatcatttataggaaaatctagtttcacagctatttgaatttttttctggatttactatataactcttattttttaaaagatcattctgttctttcaaggagaaataagcctaaaagaagaaaaacaaaaaaaattctgtataaaactgtaatcctttgtattcatgtttacagtgctattactataattcaaaattatgtatgtgacttagagttatataatcataatttatgtttatttcaaatatctaagtttattgcttggatttctagtgagagctgttgaatttggtgatgtcaaatgtttctagggttttttagtttgtttttattgagaaaattgattatttatgctataggtgatattctctttgaataaacctataataggaaatagcagaccacataaacatctttgtaaatatcaaacctaatacatttcttgtccagtgataaaacaactggtagaattatttaaacactttagatttttaaataataaacatggctttaatttttactgtgtgtatagctacatgatgaaattaattaaatattaagaggt

SEQ ID NO: 254 - DNA, 1654 bp, Homo sapiens
acgagggtccggctgagccccgggatccgcctccctccgccaggacccgcacagataaactcatcctgaaagtcgctgttgttctcctgctgagcaagaatggaggccccactggtgagtctggatgaagagtttgaggaccttcgaccctcctgctcggaggacccggaggagaagccccagtgtttctatggttcatctccccaccatctcgaggacccctccctctccgagcttgagaatttttcttccgaaataatcagcttcaagtccatggaggacctcgtaaatgaatttgatgagaagctcaatgtctgctttcggaactacaacgccaagaccgagaacctagctcccgtgaagaaccagttacagatccaagaggaggaggagacccttcaggacgaggaggtttgggatgctctgacagacaattacatcccttcactctcagaagactggagggatccaaacatcgaggctctgaatggcaactgctctgacactgagatccatgagaaagaagaggaagagttcaatgagaagagtgaaaatgattccggtatcaacgaggagcctctgctcacagcagatcaggtaattgaggagattgaggaaatgatgcagaactccccagaccctgaggaagaagaggaggttctggaagaagaggatggaggagaaacttcctcccaggcagactcggtcctcctgcaggagatgcaggcattgacacagaccttcaacaacaactggtcctatgaagggctgaggcacatgtctgggtctgagctgaccgagctgctggaccaggtggagggtgccatccgtgacttctcggaggagctggtgcagcagctggcccgccgggacgagctggagtttgagaaggaagtgaagaactcctttatcacggtgcttattgaggttcagaacaagcagaaggagcagcgagaactgatgaaaaagaggcggaaagagaaagggctgagcctgcagagcagccggatagagaagggaaaccagatgcctctcaagcgcttcagcatggaaggcatctccaacattctgcagagtggcatccgccagacctttggctcctcaggaactgacaaacagtatctgaacacagtcattccttacgagaagaaagcctctcctccctcagtggaagacctgcagatgctgacaaacattctctttgccatgaaggaggataatgagaaggtgcctactttgctaacggactacattttaaaagtgctctgccctacctaaccttgccctttggagcagcctcgctgcaggaggtcactgagcaagagtcattccatcacagggactgcatgagaccatgtaacctccgacatgtatttaaacgtgtatagcttaacctggattaaacacgagcaagcgcgcggggtcctttgccgttggcttctagtgctagtaatcattggatgcatgatggggcagggccggtgatggtgcctcccccttgctggtgtcaggagaggggaaggcagccgctttcaccgctcattatgtagtctggctacagccctccaaaacagcttatactcttaagactaattttgaaataaaaccttcatttaattaaaaaaaaaaaaaaaaaaaaaaaaaaaaaattaaa

SEQ ID NO: 255 - DNA, 1575 bp, Homo sapiens
gagagaggaagcttgaagccaatatggagtccgtcagttgctccgctgctgctgtcaggaccggagacatggagtcccagcgggacctgagcctggtgcctgagcggcttcagagacgcgaacaagaacggcagctggaagttgaaaggcggaaacaaaagcggcagaaccaggaggtagagaaggagaacagccactttttcgtcgccacctttgctcgggagcgagcggccgtggaagagcttctggagcgcgcggagtcggtcgagcggctggaggaggcggcctctcggctccaggggctgcagaaactaatcaacgactcagtttttttcctagccgcttacgacctgcggcagggacaagaggcgctggcgcggctgcaggcggccttggccgagcggcgccgggggctgcagcccaagaagcgtttcgctttcaagacccggggaaaggatgctgcttcgtctaccaaagtagacgcggctcctggcatccccccggcagttgaaagcatacaggactccccgctgcccaagaaggcggaaggagacctcggccccagctgggtctgcggtttctccaacctggagtcccaagtcttggagaagagagccagcgagttgcaccagcgcgacgttcttttgaccgaactgagcaactgcacggtcagactgtatggaaatcccaacaccctgcggctaaccaaggcccacagctgcaagctgctctgcggtccggtgtctacctctgttttcctggaggactgcagtgactgcgtgctggcagtggcctgccaacagctccgcatacacagtacgaaagacacccgcatcttcctgcaggtgaccagcagggccatcgtggaggactgcagtgggatccagttcgccccttacacctggagctacccggagatcgacaaggacttcgagagctctggtttagataggagcaaaaataactggaacgatgttgacgattttaactggctggcccgggatatggcctccccaaactggagtattcttcctgaagaggagcgaaatatccagtgggactaagcagttgtcactctgttcttcactcctaccaaatactttccacgttggactttcccccttattgggtctcgaagtttacttattgtcacactgtgtatgttttcagcattttaaggctagagattgtaatgggctcctacttgtaatttccattaaattcgtaacaggtataacactaaagcatttttgctattttcgtcatgcctttgagactgagtcttactccgtcccccagcgtggtggcgcgctgggattacaggcgcgcgccaccacgcgaactcgtatttttagtagagacggggtttcgccatgttgtccgggctgctctcgaactcctgacctcaggtgatccacccgcttcagcttcccaaagtgctggcattacaggcgtgagccaccacgccagggctttatttatttatttttaccacaatagtttgaagcagtaagggggaaggagggtgattatattgctttgtaatggtttgtgatacttgaaacatcacggtgc

SEQ ID NO: 256 - DNA, 1800 bp, Homo sapiens
ggaaggcgcgcctgccgaggcgagctaagcgcccgctcgccatggggagccccgcacatcggcccgcgctgctgctgctgctgccgcctctgctgctgctgctgctgcgcgtcccgcccagccgcagcttcccaggatcgggagactcaccactagaagacgatgaagtcgggtattcacaccctagatataaagataccccgtggtgctcccccatcaaggtgaagtatggggatgtgtactgcagggcccctcaaggaggatactacaaaacagccctgggaaccaggtgcgacattcgctgccagaagggctacgagctgcatggctcttccctactgatctgccagtcaaacaaacgatggtctgacaaggtcatctgcaaacaaaagcgatgtcctacccttgccatgccagcaaatggagggtttaagtgtgtagatggtgcctactttaactcccggtgtgagtattattgttcaccaggatacacgttgaaaggggagcggaccgtcacatgtatggacaacaaggcctggagcggcgccagcctcctgtgtggatatggacctcctagaatcaagtgcccaagtgtgaaggaacgcattgcagaacccaacaaactgacagtccgtgtctgggagacacccgaaggaagagacacagcagatggaattcttactgatgtcattctaaaaggcctccccccaggctccaactttccagaaggagaccacaagatccagtacacagtctatgacagagctgagaataagggcacttgcaaatttcgagttaaagtaagagtcaaacgctgtggcaaactcaatgccccagagaatggttacatgaagtgctccagcgacggtgataattatggagccacctgtgagttctcctgcatcggcggctatgagctccagggtagccctgcccgagtatgtcaatccaacctggcttggtctggcacggagcccacctgtgcagccatgaacgtcaatgtgggtgtcagaacggcagctgcacttctggatcagttttatgagaaaaggagactcctcattgtgtccacacccacagcccgaaacctcctttaccggctccagctaggaatgctgcagcaagcacagtgtggccttgatcttcgacacatcaccgtggtggagctggtgggtgtgttcccgactctcattggcaggataggagcaaagattatgcctccagccctagcgctgcagctcaggctgttgctgcgaatcccactctactccttcagtatggtgctagtggataagcatggcatggacaaagagcgctatgtctccctggtgatgcctgtggccctgttcaacctgattgacacttttcccttgagaaaagaagagatggtcctacaagccgaaatgagccagacctgtaacacctgacatgatggttcctctcttggcaattcctcttcattgtctacatagtgacatgcacacgggaaagccttaaaaatatccttgatgtacagattttatttgtaatttaaaagtctattttattatgagctttcttgcacttaaaaattagcatgctgctttttgtacttggaagtgtttcaaaaaattatatgaccatatttactctttctaactttctttactccatcatggctggttgattttgtagagaaattagaacccataaccatacacaggctatcaacatgttattcaatgtgacacctaactcttttctattttgttttttaagtaagacttttattaataaaacaaaatgttttggaaaaaaaaa

SEQ ID NO: 257 - DNA, 6661 bp, Homo sapiens
gcagcgggcggcagctgcggcgcaaccggctccggagctgcctggcgcggccgggcgggcggcgccgctcaggctcgggctccggctgggcccggcgcggcctcggggctgcccatcgcgcgcggcgggccgggccggtgacgccggacgcccatggacgcctctgaggagccgctgccgccggtgatctacaccatggagaacaagcccatcgtcacctgtgctggagatcagaatttatttacctctgtttatccaacgctctctcagcagcttccaagagaaccaatggaatggagaaggtcctatggccgggctccgaagatgattcacctagagtctaactttgttcaattcaaagaggagctgctgcccaaagaaggaaacaaagctctgctcacgtttcccttcctccatatttactggacagagtgctgtgataccgaagtgtataaagctacagtaaaagatgacctcaccaagtggcagaatgttctgaaggctcatagctctgtggactggttaatagtgatagttgaaaatgatgccaagaaaaaaaacaaaaccaacatccttccccgaacctctattgtggacaaaataagaaatgatttttgtaataaacagagtgacaggtgtgttgtgctctccgaccccttgaaggactcttctcgaactcaggaatcctggaatgccttcctgaccaaactcaggacattgcttcttatgtcttttaccaaaaacctaggcaagtttgaggatgacatgagaaccttgagggagaagaggactgagccaggctggagcttttgtgaatatttcatggttcaggaggagcttgcctttgttttcgagatgctgcagcagttcgaggacgccctggtgcagtacgacgaactggacgccctcttctctcagtatgtggtcaacttcggggccggggatggtgccaactggctgacttttttctgccagccagtgaagagctggaacggattgatcctccgaaaacccatagatatggagaagcgggaatcgatccagaggcgagaagccaccctgttagatctgcgcagttacctgttctctcgccagtgcaccttgctgctcttcctgcagaggccgtgggaggtggcccagcgcgccctagagctgctgcacaactgcgtgcaggaactgaagctcttagaagtctctgtcccacctggtgctctggactgctgggtgtttctgagctgtctggaggtgttgcagaggatagaaggctgctgtgaccgggcacagatcgactcaaacattgcccacactgtggggctatggagctatgccacagaaaagttaaagtccttgggctatctatgtggacttgtgtcagagaaaggacctaactcagaagatctcaacaggacagttgaccttttggcaggtttgggagctgagcgaccagaaacagccaacacagctcagagtccttataagaaactgaaagaagcattatcgtcagtggaagcttttgaaaaacactacttagatttgtcccatgccaccattgaaatgtatacaagcattgggaggattcgatctgctaagtttgttggaaaagatctggcagagttttacatgaggaaaaaggctccacaaaaggcagaaatctatcttcaaggagcactgaaaaactacctggctgagggctgggcactccccatcacacacacaaggaagcagctggccgaatgtcaaaagcaccttggacaaattgaaaactacctgcagaccagcagcctcttagccagtgaccaccacctcactgaagaggagcgcaagcacttctgccaggagatacttgactttgccagccagccgtcagacagcccaggtcataagatagtgctacccatgcattcctttgcacaactgcgagatctccattttgatccctccaatgccgtggtccacgtgggcggcgttttgtgcgttgagataaccatgtacagccagatgcctgtgcctgttcacgtggagcagattgtggtcaatgtccacttcagcattgagaaaaacagctaccggaagactgcggagtggcttaccaagcacaagacgtccaatgggatcattaactttccacccgagaccgcacctttccctgtatcccaaaacagtttgcccgcgctggagttgtatgaaatgtttgagagaagcccatctgataactccttgaacacgactgggattatctgcagaaacgtccacatgctcctgagaaggcaggagagcagctcctctctagagatgccctcaggggtggctctggaggagggtgcccacgtgctgaggtgcagccacgtgaccctggaaccaggggccaaccagataacattcaggactcaggccaaggaacctggaacgtatacactcaggcagctgtgcgcctcggtgggctccgtgtggttcgtcctccctcacatctaccccattgtgcagtacgacgtgtactcacaggagccccagctgcacgtggagccgctggctgatagccttctggcaggcattcctcagagagtcaagttcactgtcactaccggccattatacgataaagaatggagacagcctgcagcttagcaatgccgaagccatgctcatcctgtgccaggcggagagcagggccgtggtctactccaacacgagagaacagtcttctgaggccgcgctccggattcagtcctccgacaaggtcacgagcatcagtctgcctgttgcgcctgcgtaccacgtgatcgaatttgaactggaagttctctctttaccttcagccccagcactcggaggggagagtgacatgctggggatggcagagccccacaggaagcataaggaccaacagagaactggccgctgcatggttaccacagaccacaaagtgtcgattgactgcccgtggtccatctactccacagtcatcgcactgaccttcagcgtacccttcaggaccacacacagcctcctgtcctcaggaacacggaaatatgttcaagtttgtgtccagaatttgtcagaacttgactttcagctgtcagatagttatcttgtagataccggtgatagtaccgacctgcaactagtaccactgaacacgcagtcccagcagcccatctacagcaagcagtcggtgttcttcgtctgggaactcaagtggacagaagagcctcccccttctctgcattgccggttctctgttggattttccccagcttctgaggaacagctgtctatctccttaaagccgtatacttatgaatttaaagtggaaaatttttttacattatacaacgtgaaggctgagatctttcccccttcgggaatggagtattgcagaacaggctccctctgctccctggaggttttgatcacgaggctctcagacctcttggaggtggataaagatgaagcactgactgaatctgatgagcatttttcgacaaagcttatgtatgaagttgtcgacaacagtagcaactgggcagtgtgtgggaaaagctgcggtgtcatctccatgccagtggctgctcgggccactcacagggtccacatggaagtgatgccgctcttcgccgggtatctccccctgcccgacgtcaggctgttcaagtacctcccccatcattctgcacactcctcccaactggacgctgacagctggatagaaaacgacagcctgtcagtagacaagcacggggacgaccagccggacagcagcagcctcaagagcaggggcagcgtgcattcggcctgcagcagcgagcacaaaggcctacccatgccccggctgcaggcactgccggccggccaggtcttcaactccagctcgggcacacaagtcctggtcatccccagccaagatgaccacgtcctggaagtcagtgtaacatgacaacgccagggtgaacacacgccacttcccagctaggagtgcactttatgggactgtgactggactcttccgttctggctccagccagaccttcagtggtcctgcctggccgtggggacatcagagagtgtcatcacgcagctggccagctgagttctgttgttgttttcatgccgcctgtgatctcagattcctgcttttctcaccccgtccccatgctggtgtccgacgccgcttactcagagccctggcctccctccccctacctcacacgctgctcatgaaagtttccacccacgctgtctccacggaacagcctccgtctgctggctcttcgtggaaggccatttgtctttcaggtagacactcagcagccctcacggtcttagtgacgtgtgtgcctttctggtcacacagctgcccagtttcctgatcggggtggatttgtgtcccctaaggggtaaaacagccgtttaccgcagatcctctcattgtgcttttctagaataacacccttctaggggaggcgggtgggggagggagggatcataaccccttctgtgccttgggatgccggagctgggggacctggaggcccatcagccggagccacgtgaaaggtactgaagaaagctgagacccggctgtgaggagcgcctcagcggtgaggtggtttagggataaatgtttctggaaccctgtggtcccccataatgttgatagaatatcatatgcactgggagttaaatatatttaatttaatgatcattatatatgtgggggttaatatgttgtttttctgtccctttaaagtctttacatgtaattgtagctgtataatcgttatttttcttttgcatcttaagtcttagaaattaagatattccatcgtgaggatgagagaggtcctcagtgtgtttttggtctggttgtagggaaggactcaagtcctggaatgtcctccactggtctactgagttgcagtcacactgttccaatggattatttgctttcggttgtaaatttaattgtacatatggttgatttattatttttaaaaatacagactaactgatgtaatgtttatgtataagttgcaccaaaaatcaaggacaaaaataagtgtgtttgtttttacaggtgtgaaagtcacagcttgtaaataagtgttgtatgtattaaaccttttccagttctccaaagcgatgtatttttgtacacttgaaatagagtactcttaatttactgggcaaatgtgcttggaattgaacttgacaagattagctcaagcagatagagtcgggtccagcagtgggtggccctcgtgtgaatccccgtggatgtgcaagttgtggagagaaggagcaccgggttcctgcccagcactgtgcttgcgggaggcggtggggcatgggaggaaggaggcacagaccggggaaatatgacagccgtcatttccagtattctctgtgttgtcttttagctcattcaataaataaaggtggtgtgatttttttttcctcctgtctttttcatttgtagaaactggagacgtgtaaagaagataaataattgtgtaattaaactttccagaaatttatcttcctcatgtgcagtttaacaaacttggtcaaactagttagcaaattagaacttcagaatctaatgatagtttagggtttctaaaataaggttttttattgtaaaaattgacgattgccctgcatttctaccaagtcctgtgaataaagagatgggagatttgattccgtcagaagagactgtaatccgtgtcgtcagcctgggagccttccccagtgtaatgtagctttctctcttaccttctggaagagggaatgtttcatttattactgtttgattttcttgtatctggttctactcccaggatgaaattatccaactacatatatatttagaggaagaaagtgaaggggaaatttaaaatgtttacggcgcttaattgcctggaaatgaaatgaaatcaaatttatcagtttttttccccctaattacccaaaagatcttttggcaaactatgttacatgaatgcttctgcctctttaagacaaagaagaatgtcacccaaaattgtcatttttttcttaatgttcatcataaaagtcctaaaagagtaactgtaattggatgtttattgtttttatctaaagtaaggtgtatgtgtttgagacaagcaggttttgttgataaagagatgttaaataattgtgaagccagatatgcaatgtgtatctaaaaagcaaggaatttgcagccgttttacaaatatctgtggaacatgtaaatactgtcaaatggaaaataaaataagttataattttttgtgaatttcatgggatgtcctatgattgggaaaaattataactcttctgattctaatgtggaaattgttgtatttaatctgaaaatgactttacctacaacagttccattgtcagcacagcctaggagggtcagattcctgtattaattactcttagtggagatgccagatatcccatacagaattagcagagaaaatacacacaggcttctattcaaattttctttagtgcttaaaattaagttttaaaatgaaatcagacactgcaggtttgtatataaaatgaaaagctatactactttttataaaagggcaaactgggctgatgtaaatgttttactttcaactgtgttctttaaaataaat

SEQ ID NO: 258 - DNA, 901 bp, Homo sapiens
ctcttcccgcagccaagggtgggcgccggtcctaggaggcgacggttgtaagccagacaaaaagaactggggtgcccggagtgccaggtggcgggcaagcggtgggcttttcggcggggtctttaggatttgcagctccaggaagcgagatgtcgaagccgccacccaaaccagtcaaaccagggcaagttaaagtcttcagagccctgtatacgtttgaacccagaactccagatgaattatactttgaggaaggtgatattatctacattactgacatgagcgataccaattggtggaaaggcacctccaaaggcaggactggactaattccaagcaactatgtggctgagcaggcagaatccattgacaatccattgcatgaagcagcaaaaagaggcaacttgagctggttgagagagtgtttggacaacagagtgggtgttaatggcttagacaaagctggaagcactgccttatactgggcttgccacgggggccacaaagatatagtggaaatgctatttactcaaccaaatattgaactgaaccagcagaacaagttgggagatacagctttcgatgctgctgcctggaagggttatgcagatatcgtccagttgcttctggcaaaaggtgctagaacagacttaagaaacattgagaagaagctggccttcgacatggctaccaatgctgcctgtgcatctctcctgaaaaagaaacagggaacagatgcagttcgaacattaagcaatgccgaggactatctcgatgatgaagactcagattaattcctttctggagctttgagatctaaaacttctgttgcttttgccattccaaaactttgtctttgccagaaaagtgttggtaactataaagaaaatatatatgaaaa

SEQ ID NO: 259 - DNA, 953 bp, Homo sapiens
cgtggtcgacggcccgggctggtctgtgccttgactacgtaacatcttgtcctcacagcccagagcatgttccagatcccagagtttgagccgagtgagcaggaagactccagctctgcagagaggggcctgggccccagccccgcaggggacgggccctcaggctccggcaagcatcatcgccaggccccaggcctcctgtgggacgccagtcaccagcaggagcagccaaccagcagcagccatcatggaggccgctggggctgtggagatccggagtcgccacagctcctaccccgcggggacggaggacgacgaagggatgggggaggagcccagccctttcggggccgctcgcgctcggcgccccccaacctctgggcagcacagcgctatggccgcgagctccggaggatgagtgacgagtttgtggactcctttaagaagggacttcctcgcccgaagagcgcgggcacagcaacgcagatgcggcaaagctccagctggacgcgagtcttccagtcctggtgggatcggaacttgggcaggggaagctccgccccctcccagtgaccttcgctccacatcccgaaactccacccgttcccactgccctgggcagccatcttgaatatgggcggaagtacttccctcaggcctatgcaaaaagaggatccgtgctgtctcctttggagggagggctgacccagattcccttccggtgcgtgtgaagccacggaaggcttggtcccatcggaagttttgggttttccgcccacagccgccggaagtggctccgtggccccgccctcaggctccgggctttcccccaggcgcctgcgctaagtcgcgagccaggtttaaccgttgcgtcaccgggacccgagcccccgcgatgccctgggggcccgtgctcactaccaaatgttaataaagcccgcgtctgtgccgcc

SEQ ID NO: 260 - DNA, 13449 bp, Homo sapiens
  misc_feature (1)..(13449): n=a,t,g or c
gcggccgcgtcgacgcggcggcggcagcggcgtcggctcggggttctccgggagagggggagtgcgcggcggccgcagctgccacaaaccaggtgaagctttgttctaagaatatttgtttcatctagtttatgagtccaaatgatatagactgtaaatgtcacagcagtggtgaaagactgctcggtcatgagcaccgacagtaactcactggcacgtgaatttctgaccgatgtcaaccggctttgcaatgcagtggtccagagggtggaggccagggaggaagaagaggaggagacgcacatggcaacccttggacagtaccttgtccatggtcgaggatttctattacttaccaagctaaattctataattgatcaggcattgacatgtagagaagaactcctgactcttcttctgtctctccttccactggtatggaagatacctgtccaagaagaaaaggcaacagattttaacctaccgctctcagcagatataatcctgaccaaagaaaagaactcaagttcacaaagatccactcaggaaaaattacatttagaaggaagtgccctgtctagtcaggtttctgcaaaagtaaatgtttttcgaaaaagcagacgacagcgtaaaattacccatcgctattctgtaagagatgcaagaaagacacagctctccacctcagattcagaagccaattcagatgaaaaaggcatagcaatgaataagcatagaaggccccatctgctgcatcattttttaacatcgtttcctaaacaagaccaccccaaagctaaacttgaccgcttagcaaccaaagaacagactcctccagatgctatggctttggaaaattccagagagattattccaagacaggggtcaaacactgacattttaagtgagccagctgccttgtctgttatcagtaacatgaacaattctccatttgacttatgtcatgttttgttatctttattagaaaaagtttgtaagtttgacgttaccttgaatcataattctcctttagcagccagtgtagtgcccacactaactgaattcctagcaggctttggggactgctgcagtctgagcgacaacttggagagtcgagtagtttctgcaggttggaccgaagaaccggtggctttgattcaaaggatgctctttcgaacagtgttgcatcttctgtcagtagatgttagtactgcagagatgatgccagaaaatcttaggaaaaatttaactgaattgcttagagcagctttaaaaattagaatatgcctagaaaagcagcctgacccttttgcaccaagacaaaagaaaacactgcaggaggttcaggaagattttgtgttttcaaagtatcgtcatagagcccttcttttacctgagcttttggaaggagttcttcagattctgatctgttgtcttcaaagtgcagcttcaaatcccttctacttcagtcaagccatggatttggttcaagaattcattcagcatcatggatttaatttatttgaaacagcagttcttcaaatggaatggctggttttaagagatggagttcctcccgaggcctcagagcatttgaaagccctaataaatagtgtgatgaaaataatgagcactgtcaaaaaagtgaaatcagagcaacttcatcattcgatgtgtacaagaaaaaggcacagacgatgtgaatattctcattttatgcatcatcaccgagatctctcaggtcttctggtttcggcttttaaaaaccaggtttccaaaaacccatttgaagagactgcagatggagatgtttattatcctgagcggtgctgttgcattgcagtgtgtgcccatcagtgcttgcgcttactacagcaggcttccttgagcagcacttgtgtccagatcctatcgggtgttcataacattggaatatgctgttgtatggatcccaaatctgtaatcattcctttgctccatgcttttaaattgccagcactgaaaaattttcagcagcatatattgaatatccttaacaaacttattttggatcagttaggaggagcagagatatcaccaaaaattaaaaaagcagcttgtaatatttgtactgttgactctgaccaactagcccaattagaagagacactgcagggaaacttatgtgatgctgaactctcctcaagtttatccagtccttcttacagatttcaagggatcctgcccagcagtggatctgaagatttgttgtggaaatgggatgctttaaaggcttatcagaactttgtttttgaagaagacagattacatagtatacagattgcaaatcacatttgcaatttaatccagaaaggcaatatagttgttcagtggaaattatataattacatatttaatcctgtgctccaaagaggagttgaattagcacatcattgtcaacacctaagcgttacttcagctcaaagtcatgtatgtagccatcataaccagtgcttgcctcaggacgtgcttcagatttatgtaaaaactctgcctatcctgcttaaatccagggtaataagagatttgtttttgagttgtaatggagtaagtcaaataatcgaattaaattgcttaaatggtattcgaagtcattctctaaaagcatttgaaactctgataatcagcctaggggagcaacagaaagatgcctcagttccagatattgatgggatagacattgaacagaaggagttgtcctctgtacatgtgggtacttcttttcatcatcagcaagcttattcagattctcctcagagtctcagcaaattttatgctggcctcaaagaagcttatccaaagagacggaagactgttaaccaagatgttcatatcaacacaataaacctattcctctgtgtggcttttttatgcgtaagtaaagaagcagagtctgacagggagtcggccaatgactcagaagatacttctggctatgacagcacagccagcgagcctttaagtcatatgctgccatgtatatctctcgagagccttgtcttgccttctcctgaacatatgcaccaagcagcagacatttggtctatgtgtcgttggatctacatgttgagttcagtgttccagaaacagttttataggcttggtggtttccgagtatgccataagttaatatttatgataatacagaaactgttcagaagtcacaaagaggagcaaggaaaaaaggagggagatacaagtgtaaatgaaaaccaggatttaaacagaatttctcaacctaagagaactatgaaggaagatttattatctttggctataaaaagtgaccccataccatcagaactaggtagtctaaaaaagagtgctgacagtttaggtaaattagagttacagcatatttcttccataaatgtggaagaagtttcagctactgaagccgctcccgaggaagcaaagctatttacaagtcaagaaagtgagacctcacttcaaagtatacgacttttggaagcccttctggccatttgtcttcatggtgccagaactagtcaacagaagatggaattggagttacctaatcagaacttgtctgtggaaagtatattatttgaaatgagggaccatctttcccagtcaaaggtgattgaaacacaactagcaaagccgttatttgatgccctgcttcgagttgccctcgggaattattcagcagattttgaacataatgatgctatgactgagaagagtcatcaatctgcagaagaattgtcatcccagcctggtgatttttcagaagaagctgaggattctcagtgttgtagttttaaacttttagttgaagaagaaggttacgaagcagatagtgaaagcaatcctgaagatggcgaaacccaggatgatggggtagacttaaagtctgaaacagaaggtttcagtgcatcaagcagtccaaatgacttactcgaaaacctcactcaaggggaaataatttatcctgagatttgtatgctggaattaaatttgctttctgctagtaaagccaaacttgatgtgcttgcccatgtatttgagagttttttgaaaattattaggcagaaagaaaagaatgtttttctgctcatgcaacagggaactgtgaaaaatcttttaggagggttcttgagtattttaacacaggatgattctgattttcaagcatgccagagagtattggtggatcttttggtatctttgatgagttcaagaacatgttcagaagagctaacccttcttttgagaatatttctggagaaatctccttgtacaaaaattcttcttctgggtattctgaaaattattgaaagtgatactactatgagcccttcacagtatctaaccttccctttactgcacgctccaaatttaagcaacggtgtttcatcacaaaagtatcctgggattttaaacagtaaggccatgggtttattgagaagagcacgagtttcacggagcaagaaagaggctgatagagagagttttccccatcggctgctttcatcttggcacatagccccagtccacctgccgttgctggggcaaaactgctggccacacctatcagaaggtttcagtgtttccctgtggtttaatgtggagtgtatccatgaagctgagagtactacagaaaaaggaaagaagataaagaaaagaaacaaatcattaattttaccagatagcagttttgatggtacagagagcgacagaccagaaggtgcagagtacataaatcctggtgaaagactcatagaagaaggatgtattcatataatttcactgggatccaaagcgttgatgatccaagtgtgggctgatccccacaatgccactcttatctttcgtgtgtgcatggattcaaatgatgacatgaaagctgttttactagcacaggttgaatcacaggagaatattttcctcccaagcaaatggcaacatttagtactcacctacttacagcagccccaagggaaaaggaggattcatgggaaaatctccatatgggtctctggacagaggaagcctgatgttactttggattttatgcttccaagaaaaacaagtttgtcatctgatagcaataaaacattttgcatgattggccattgtttatcatcccaagaagagtttttgcagttggctggaaaatgggacctgggaaatttgcttctcttcaacggagctaaggttggttcacaagaggccttttatctgtatgcttgtggacccaaccatacatctgtaatgccatgtaagtatggcaagccagtcaatgactactccaaatatattaataaagaaattttgcgatgtgaacaaatcagagaactttttatgaccaagaaagatgtggatattggtctcttaattgaaagtctttcagttgtttatacaacttactgtcctgctcagtataccatctatgaaccagtgattagacttaaaggtcaaatgaaaacccaactctctcaaagacccttcagctcaaaagaagttcagagcatcttattagaacctcatcatctaaagaatctccaacctactgaatataaaactattcaaggcattctgcacgaaattggtggaactggcatatttgtttttctctttgccagggttgttgaactcagtagctgtgaagaaactcaagcattagcactgcgagttatactctcattaattaaatacaaccaacaaagagtacatgaattagaaaattgtaatggactttctatgattcatcaggtgttgatcaaacaaaaatgcattgttgggttttacattttgaagacccttcttgaaggatgctgtggtgaagatattatttatatgaatgagaatggagagtttaagttggatgtagactctaatgctataatccaagatgttaagctgttagaggaactattgcttgactggaagatatggagtaaagcagagcaaggtgtttgggaaactttgctagcagctctagaagtcctcatcagagcagatcaccaccagcagatgtttaatattaagcagttattgaaagctcaagtggttcatcactttctactgacttgtcaggttttgcaggaatacaaagaggggcaactcacacccatgccccgagaggtttgtagatcatttgtgaaaattatagcagaagtccttggatctcctccagatttggaattattgacaattatcttcaatttccttttagcagttcaccctcctactaatacttacgtttgtcacaatcccacgaacttctacttttctttgcacatagatggcaagatctttcaggagaaagtgcggtcaatcatgtacctgaggcattccagcagtggaggaaggtcccttatgagccctggatttatggtaataagcccatctggttttactgcttcaccatatgaaggagagaattcctctaatattattccacaacagatggccgcccatatgctgcgttctagaagcctaccagcattccctacttcttcactactaacgcaatcacaaaaactgactggaagtttgggttgtagtatcgacaggttacaaaatattgcagatacttatgttgccacccaatcaaagaaacaaaattctttggggagttccgacacactgaaaaaaggcaaagaggacgcattcatcagtagctgtgagtctgcaaaaactgtttgtgaaatggaagctgtcctctcagcccaggtctctgtcagtgatgtcccaaagggagtgctgggatttccagtggtcaaagcagatcataaacagttgggagcagaacccaggtcagaagatgacagtcctggggatgagtcctgcccacgccgacctgattacctaaagggattggcctccttccagcgaagccacagcactattgcaagccttgggctagcttttccttcacagaacggatctgcagctgttggccgttggccaagtcttgttgatagaaacactgatgattgggaaaactttgcctattctcttggttatgagccaaattacaaccgaactgcaagtgctcacagtgtaactgaagactgtttggtacctatatgctgtggattatatgaactcctaagtggggttcttcttatcctgcctgatgttttgcttgaagatgtgatggacaagcttattcaagcagatacacttttggtcctcgttaaccacccatcaccagctatacaacaaggtgttattaaactattagatgcatattttgctagagcatctaaggaacaaaaagataaatttctgaagaatcgtggattttccttgctagccaaccagttgtatcttcatcgaggaactcaagaattgttagaatgcttcatcgaaatgttctttggtcgacatattggccttgatgaagaatttgatctggaagatgtgagaaacatgggattgtttcagaagtggtctgtcattcctattctgggactaatagagacctctctatatgacaacatactcttgcataatgctcttttacttcttctccaaattttaaattcttgttctaaggtagcagatatgttgctggataatggtctactctatgtgttatgtaatacagtagcagccctgaatggattagaaaagaacattcccatgagtgaatataaattgcttgcttgtgatatacagcaacttttcatagcagttacaattcatgcttgcagttcctcaggctcacaatattttagggttattgaagaccttattgtaatgcttggatatcttcaaaatagcaaaaacaagaggacacaaaatatggctgttgcactacagcttagagttctccaggctgctatggaatttataaggaccaccgcaaatcatgactctgaaaacctcacagattcactccagtcaccttctgctccccatcatgcagtagttcaaaagcggaaaagcattgctggtcctcgaaaatttccccttgctcaaactgaatcgcttctgatgaaaatgcgttcagtggcaaatgatgagcttcatgtgatgatgcaacggagaatgagccaagagaaccctagccaagcaactgaaacggaacttgcgcagagactacagaggctcactgttttagcagtcaacaggattatttatcaagaatttaattcagacattattgacattttgagaactccagaaaatgtaactcaaagcaagacctcagttttccagaccgaaatttctgaggaaaatattcatcatgaacagtcttctgttttcaatccatttcagaaagaaatttttacatatctggtagaaggattcaaagtatctattggttcaagtaaagccagtggttccaagcagcaatggactaaaattctgtggtcttgtaaggagaccttccgaatgcagcttgggagactactagtgcatattttgtcgccagcccacgctgcacaagagagaaagcaaatttttgaaatagttcatgaaccaaatcatcaggaaatactacgagactgtctcagcccatccctacaacatggagccaagttagttttgtatttgtcagagttgatacataatcaccaaggtgaattgactgaagaagagctaggcacagcagaactgcttatgaatgctttgaagttatgtggtcacaagtgcatccctcccagtgcatcaacaaaagcagaccttattaaaatgatcaaagaggaacaaaagaaatatgaaactgaagaaggagtgaataaagctgcttggcagaaaacagttaacaataatcaacaaagtctctttcagcgtctggattcaaaatcaaaggatatatctaaaatagctgcagatatcacccaggcagtgtctctctcccaaggaaatgagagaaaaaaggtgatccagcatattagaggaatgtataaagtagatttgagtgccagcagacattggcaggaacttattcagcagctgacacatgatagagcagtatggtatgaccccatctactatccaacctcatggcagttggatccaacagaagggccaaatcgagagaggagacgtttacagagatgttatttaactattccaaataagtatctccttagggatagacagaaatcagaagatgttgtcaaaccaccactctcttacctgtttgaagacaaaactcattcttctttctcttctactgtcaaagacaaagctgcaagtgaatctataagagtgaatcgaagatgcatcagtgttgcaccatctagagagacagctggtgaattgttactaggtaaatgtggaatgtattttgtggaagataatgcttctgatacagttgaaagttcgagccttcagggagagttggaaccagcatcattttcctggacatatgaagaaattaaagaagttcacaagcgttggtggcaattgagagataatgctgtagaaatctttctaacaaatggcagaacactcctgttggcatttgataacaccaaggttcgtgatgatgtataccacaatatactcacaaataacctccctaatcttctggaatatggtaacatcaccgctctgacaaatttatggtatactgggcaaattactaattttgaatatttgactcacttaaacaaacatgctggccgatccttcaatgatctcatgcagtatcctgtgttcccatttatacttgctgactacgttagtgagacacttgacctcaatgatctgttgatatacagaaatctctctaaacctatagctgttcagtataaagaaaaagaagatcgttatgtggacacatacaagtacttggaggaagagtaccgcaaaggagccagagaagatgaccccatgcctcccgtgcagccctatcactatggctcccactattccaatagcggcactgtgcttcacttcctggtcaggatgcctcctttcactaaaatgtttttagcctatcaagatcaaagttttgacattccagacagaacttttcattctacaaatacaacttggcgactctcatcttttgaatctatgactgatgtgaaagaacttatcccagagtttttctatcttccagagttcctagttaaccgtgaaggttttgattttggtgtgcgtcagaatggtgaacgggttaatcacgtcaaccttcccccttgggcgcgtaatgatcctcgtctttttatcctcatccatcggcaggctctagagtctgactacgtgtcgcagaacatctgtcagtggattgacttggtgtttgggtataagcaaaaggggaaggcttctgttcaagcgatcaatgtttttcatcctgctacatattttggaatggatgtctctgcagttgaagatccagttcagagacgagcgctagaaaccatgataaaaacctacgggcagactccccgtcagctgttccacatggcccatgtgagcagacctggagccaagctcaatattgaaggagagcttccagctgctgtggggttgctagtgcagtttgctttcagggagacccgagaacaggtcaaagaaatcacctatccgagtcctttgtcatggataaaaggcttgaaatggggggaatacgtgggttcccccagtgctccagtacctgtggtctgcttcagccagccccacggagaaagatttggctctctccaggctctgcccaccagagcaatctgtggtttgtcacggaatttctgtcttgtgatgacatatagcaaggaacaaggtgtgagaagcatgaacagtacggacattcagtggtcagccatcctgagctggggatatgctgataatattttaaggttgaagagtaaacaaagtgagcctccagtaaactttattcaaagttcacaacagtaccaggtgactagttgtgcttgggtgcctgacagttgccagctgtttactggaagcaaatgcggtgtcatcacagcctacacaaacagatttacaagcagcacgccatcagaaatagaaatggagactcaaatacatctctatggtcacacagaagagataaccagcttatttgtttgcaaaccatacagtatactgataagtgtgagcagagacggaacctgcatcatatgggatttaaacaggttatgctatgtacaaagtctggcgggacacaaaagccctgtcacagctgtctctgccagtgaaacctcaggtgatattgctactgtgtgtgattcagctggcggaggcagtgacctcagactctggacggtgaacggggatctcgttggacatgtccactgcagggagatcatctgttccgtggctttctccaaccagcctgagggagtatctatcaatgtaatcgctgggggattagaaaatggaattgtaaggttatggagcacatgggacttaaagcctgtgagagaaattacatttcccaaatcaaataagcccatcatcagccttacattttcttgtgatggccaccatttgtacacagcaaacagtgatgggaccgtgattgcctggtgtcggaaggaccagcagcgcttgaaacagccaatgttctattccttccttagcagctatgcagccgggtgaatgcgaatgaacttcacgttctccaaagcactttaactccaaactagatttgttgacttcaccagttttaggaggttgaacctaaagaaatggatgactggacaaaccatccaaataatgataaagtctattcatctgcacaaaattctgaagagtcacatgatcctaagaggaaagttctgttctattttagtgataatctggaagattgtgtcaatatgcactagccaacaagttttaagcctcgcatggtacattaaaatgatattcttaaaattttttcccaccaaggtattccaaagaaaatattaaggtctcccctttttctatgattccaaaaggaccagtagaatttaaattggttggttgatngtttatataaaacacactaaaattatattttaaaagtttantgccntgaaatactcctcccaccacacacacatgctccaaaagaggaaagaaaaaaagataatttttaggacttgataattgctttctttgagaagcaaattattcagtaggtgcctctgtaccaaatattttatggaatatctaaatactaaaataaactatgaatgaatctcaaaattaggcagtttttgccagttgctttcttagctcaaaggagaaccagaatttttttgacagccacaaacaagaatacaggtatcttggatttcagacacattctgtttcttcataaaaattttacttaaaatctgtaacgctagatattgactatccttagttgagtcactgaggtttaaacacaatggtaagtcttaaagtctgctatttacagagcattgaatctgtaccaatttgcaatagaaagccttcagtatgcaagaagtttgcatgggtattaagaacacagcctaaataaggcatttgatctaatctgcaggaagaattttcttccccaaaacagaattataaaagcttactttaaacaggaggcagaataattcttttaggaaaccatttcattctgtttctactaacctataccatctgagaattcctaaacatcttggagccgtctgtctctcccatatgatggctgtctgtatatttttacttggggtgctgctttattggctttgaaaacactgtcagataagctcagtaatatgttaccatgggataaaaatatgtatccctgcctaagaataacttgtgcatttgttatggaaatttaattcatatggtgtttacagtactacttttgtaacttccagactttctaaaacattctgcttaaaaaccatataaaatataattccaaagtctctgctgtcaagatagattcgagagaaagcacgtggccatgtatgctttaaccttaaactgcatacacatgtagtgatacctaggctgcatttagatcaccgtgtgctcaggccaggtgtgaatcctgaggtccatggaggtgcagagatgagattactcctattcacgttgaagtgatttgctttgttaacaaaaaattgcagctattgtctagctttcatttttttactgagaactttaaattagtcccctattagaatagggttgctactcatctttttttaaaaaccgaatttcatcatttatctaaagagaaaatatgcagaataactggtcttgttaagagtgcaatattatatttttatgtaaaaataaaaattaatttggggggattatttattcagcatgaaacctaatatgtatatgtttgaaatacttcataatgtgcatgttgtagcaaacatttctgtaaattatcacaagctctgttacctttatatacgctgcctcttcaatttggaaataaatttcataaaaaaaaaaaaaaaaaaaaaaaaa

SEQ ID NO: 261 - DNA, 1716 bp, Homo sapiens
gccaactccgtggtggtctgggtgaatatccaggccaagaccacaggctatgacacgcactgctacatcttgaacctggccattgccgacctgtgggttgtcctcaccatcccagtctgggtggtcagtctcgtgcagcacaaccagtggcccatgggcgagctcacgtgcaaagtcacacacctcatcttctccatcaacctcttcagcagcattttcttcctcacgtgcatgagcgtggaccgctacctctccatcacctacttcaccaacacccccagcagcaggaagaagatggtacgccgtgtcgtctgcatcctggtgtggctgctggccttctgcgtgtctctgcctgacacctactacctgaagaccgtcacgtctgcgtccaacaatgagacctactgccggtccttctaccccgagcacagcatcaaggagtggctgatcggcatggagctggtctccgttgtcttgggctttgccgttcccttctccattatcgctgtcttctacttcctgctggccagagccatctcggcgtccagtgaccaggagaagcacagcagccggaagatcatcttctcctacgtggtggtcttccttgtctgctggttgccctaccacgtggcggtgctgctggacatcttctccatcctgcactacatccctttcacctgccggctggagcacgccctcttcacggccctgcatgtcacacagtgcctgtcgctggtgcactgctgcgtcaaccctgtcctctacagcttcatcaatcgcaactacaggtacgagctgatgaaggccttcatcttcaagtactcggccaaaacagggctcaccaagctcatcgatgcctccagagtctcagagacggagtactctgccttggagcagagcaccaaatgatctgccctggagaggctctgggacgggtttacttgtttttgaacagggtgatgggccctatggttttctagagcaaagcaaagtagcttcgggtcttgatgcttgagtagagtgaagaggggagcacgtgccccctgcatccattytctctttctcttgatgacgcagctgtcatttggctgtgcgtgctgacagttttgcaacaggcagagctgtgtcgcacagcagtgctgtgcgtcagagccagctgaggacaggcttgcctggacttctgtaagataggattttctgtgtttcctgaattttttatatggtgatttgtatttaaattttaagactttattttctcactattggtgtaccttataaatgtatttgaaagttaaatatattttaaatattgtttgggaggcatagtgctgacatatattcagagtgttgtagttttaaggttagcgtgactttcagttttgactaaggatgacactaattgttagctgttttgaaattatatatatataaatatataaatatatgccagtcttggctgaaatgttttatttaccatagttttatatctgtgtggtgttttgtaccggcacgggatatggaacgaaaactgctttgtaatgcagtttgtgacattaatagtattgtaaagttacattttaaaataaacaaaaaactgttctggactgcaaatctgcacacacaacgaacagttgcatttcagagagttctctcaatttgtaagttatttttttttaataaagatttttgtttcctaaaaaaaaaaaaaaaaaaaaa

SEQ ID NO: 262 - DNA, 2041 bp, Homo sapiens
aggttcgatacaagaggctgttttcctagcgtggcttgctgcctttggtaagaacatgtcgtccatcttgccattcacgccgccagttgtgaagagactgctgggatggaagaagtcagctggtgggtctggaggagcaggcggaggagagcagaatgggcaggaagaaaagtggtgtgagaaagcagtgaaaagtctggtgaagaagctaaagaaaacaggacgattagatgagcttgagaaagccatcaccactcaaaactgtaatactaaatgtgttaccataccaagcacttgctctgaaatttggggactgagtacaccaaatacgatagatcagtgggatacaacaggcctttacagcttctctgaacaaaccaggtctcttgatggtcgtctccaggtatcccatcgaaaaggattgccacatgttatatattgccgattatggcgctggcctgatcttcacagtcatcatgaactcaaggcaattgaaaactgcgaatatgcttttaatcttaaaaaggatgaagtatgtgtaaacccttaccactatcagagagttgagacaccagttttgcctccagtattagtgccccgacacaccgagatcctaacagaacttccgcctctggatgactatactcactccattccagaaaacactaacttcccagcaggaattgagccacagagtaattatattccagaaacgccacctcctggatatatcagtgaagatggagaaacaagtgaccaacagttgaatcaaagtatggacacaggctctccagcagaactatctcctactactctttcccctgttaatcatagcttggatttacagccagttacttactcagaacctgcattttggtgttcaatagcatattatgaattaaatcagagggttggagaaaccttccatgcatcacagccctcactcactgtagatggctttacagacccatcaaattcagagaggttctgcttaggtttactctccaatgttaaccgaaatgccacggtagaaatgacaagaaggcatataggaagaggagtgcgcttatactacataggtggggaagtttttgctgagtgcctaagtgatagtgcaatctttgtgcagagccccaattgtaatcagagatatggctggcaccctgcaacagtgtgtaaaattccaccaggctgtaatctgaagatcttcaacaaccaggaatttgctgctcttctggctcagtctgttaatcagggttttgaagccgtctatcagctaactagaatgtgcaccataagaatgagttttgtgaaagggtggggagcagaataccgaaggcagacggtaacaagtactccttgctggattgaacttcatctgaatggacctctacagtggttggacaaagtattaactcagatgggatccccttcagtgcgttgctcaagcatgtcataaagcttcaccaatcaagtcccatggaaaagacttaatgtaacaactcttctgttcattagcattgtgttgtggtccctatggctgtttactatccaaaagttcaagagagaaaacagcacttgaggtctcatcaattaaagcaccttgtggaatctgtttcctatatttgaatattagatgggaaaattagtgtctagaaatactctcccattaaagaggaagagaagattttaaagacttaatgatgtcttattgggcataaaactgagtgtcccaaaggtttattaataacagtagtagttatgtgtacaggtaatgtatcatgatccagtatcacagtattgtgctgtttatatacatttttagtttgcatagatgaggtgtgtgtgtgcgctgcttcttgatctaggcaaacctttataaagttgcagtacctaatctgttattcccacttctctgttatttttgtgtgtcttttttaatatataatatatatcaagattttcaaattatttagaagcagattttcctgtagaaaaactaatttttctgccttttaccaaaaataaactcttggggaag

SEQ ID NO: 263 - DNA, 886 bp, Homo sapiens
  misc_feature (1)..(886): n=a,t,g or c
gactggaagtcatcgcatactaggaccttgcacttgcttactctgaacctctcagaaaaaggggtaagtgncagtttgctctttgatacgtcagatgatgaagagctgagagaacagctggatatgcactcaatcatcgtctcctgtgttaatgatgaacccctcttcacggcagaccaggttattgaagaaattgaagaaatgatgcaggaatcaccggacccagaagatgatgaaacccctacacagtcagatcggctttcaatgctttcccaggaaattcaaactctcaagaggtctagtaccggcagttatgaagagagagtgaaaaggctctcagtgtctgagttaaatgaaatcctggaagaaattgagactgccattaaggagtactctgaggagctggtgcagcagttggctttacgagatgaactggagtttgaaaaggaagtgaaaaacagctttatttctgttcttattgaagtgcaaaacaaacagaaagagcacaaagaaacagcaaaaaagaaaaagaaactaaaaaatggcagctctcagaatgggaagaatgagagaagtcatatgcccggcacatatttgactacagtcattccttatgagaaaaaaaacggaccaccgtctgttgaagatcttcaaatattaacaaaaattcttcgtgccatgaaggaggacagtgaaaaagttccgagcttgttaactgattatattctgaaagtgctgtgtcctacatagagcagcaactttatctgcggtgggctccaagctagatttccgacagcattattctgagagctggctaccattacccttcttgctattggaaactcagcacatttgaacttgggtttgattcagtattaacagatct

SEQ ID NO: 264 - DNA, 1033 bp, Homo sapiens
ggacggtgcaagaaatgcactgaaggcccaattgacctggtctttgtgatcgatggatccaagagtcttggagaagagaattttgaggtcgtgaagcagtttgtcactggaattatagattccttgacaatttcccccaaagccgctcgagtggggctgctccagtattccacacaggtccacacagagttcactctgagaaacttcaactcagccaaagacatgaaaaaagccgtggcccacatgaaatacatgggaaagggctctatgactgggctggccctgaaacacatgtttgagagaagttttacccaaggagaaggggccaggcctttttccacaagggtgcccagagcagccattgtgttcaccgacggacgggctcaggatgacgtctccgagtgggccagtaaagccaaggccaatggtatcactatgtatgctgttggggtaggaaaagccattgaggaggaactacaagagattgcctctgagcccacaaacaagcatctcttctatgccgaagacttcagcacaatggatgagataagtgaaaaactcaagaaaggcatctgtgaagctctagaagactccgatggaagacaggactctccagcaggggaactgccaaaaacggtccaacagccaacagaatctgagccagtcaccataaatatccaagacctactttcctgttctaattttgcagtgcaacacagatatctgtttgaagaagacaatcttttacggtctacacaaaagctttcccattcaacaaaaccttcaggaagccctttggaagaaaaacacgatcaatgcaaatgtgaaaaccttataatgttccagaaccttgcaaacgaagaagtaagaaaatttacacagcgcttagaagaaatgacacagagaatggaagccctggaaaatcgcctgagatacagatgaagattagaaatcgcgacacatttgtagtcattgtatcacggattacaatgaacgcagtgcagagccccaaagctcaggctattgttaaatc

SEQ ID NO: 265 - DNA, 2333 bp, Homo sapiens
ggcacgaggctagagcgatgccgggccggagttgcgtcgccttagtcctcctggctgccgccgtcagctgtgccgtcgcgcagcacgcgccgccgtggacagaggactgcagaaaatcaacctatcctccttcaggaccaacgtacagaggtgcagttccatggtacaccataaatcttgacttaccaccctacaaaagatggcatgaattgatgcttgacaaggcaccaatgctaaaggttatagtgaattctctgaagaatatgataaatacattcgtgccaagtggaaaagttatgcaggtggtggatgaaaaattgcctggcctacttggcaactttcctggcccttttgaagaggaaatgaagggtattgccgctgttactgatatacctttaggagagattatttcattcaatattttttatgaattatttaccatttgtacttcaatagtagcagaagacaaaaaaggtcatctaatacatgggagaaacatggattttggagtatttcttgggtggaacataaataatgatacctgggtcataactgagcaactaaaacctttaacagtgaatttggatttccaaagaaacaacaaaactgtcttcaaggcttcaagctttgctggctatgtgggcatgttaacaggattcaaaccaggactgttcagtcttacactgaatgaacgtttcagtataaatggtggttatctgggtattctagaatggattctgggaaagaaagatgccatgtggatagggttcctcactagaacagttctggaaaatagcacaagttatgaagaagccaagaatttattgaccaagaccaagatattggccccagcctactttatcctgggaggcaaccagtctggggaaggttgtgtgattacacgagacagaaaggaatcattggatgtatatgaactcgatgctaagcagggtagatggtatgtggtacaaacaaattatgaccgttggaaacatcccttcttccttgatgatcgcagaacgcctgcaaagatgtgtctgaaccgcaccagccaagagaatatctcatttgaaaccatgtatgatgtcctgtcaacaaaacctgtcctcaacaagctgaccgtatacacaaccttgatagatgttaccaaaggtcaattcgaaacttacctgcgggactgccctgacccttgtataggttggtgagcacacgtctggcctacagaatgcggcctctgagacatgaagacaccatctccatgtgaccgaacactgcagctgtctgaccttccaaagactaagactcgcggcaggttctctttgagtcaatagcttgtcttcgtccatctgttgacaaatgacagatctttttttttttccccctatcagttgatttttcttatttacagataacttctttaggggaagtaaaacagtcatctagaattcactgagttttgtttcactttgacatttggggatctggtgggcagtcgaaccatggtgaactccacctccgtggaataaatggagattcagcgtgggtgttgaatccagcacgtctgtgtgagtaacgggacagtaaacactccacattcttcagtttttcacttctacctacatatttgtatgtttttctgtataacagccttttccttctggttctaactgctgttaaaattaatatatcattatctttgctgttattgacagcgatattattttattacatatcattagagggatgagacagacattcacctgtatatttcttttaatgggcacaaaatgggcccttgcctctaaatagcactttttggggttcaagaagtaatcagtatgcaaagcaatcttttatacaataattgaagtgttccctttttcataattactctacttcccagtaaccctaaggaagttgctaacttaaaaaactgcatcccacgttctgttaatttagtaaataaacaagtcaaagacttgtggaaaataggaagtgaacccatattttaaattctcataagtagcattgatgtaataaacaggtttttagtttgttcttcagattgatagggagttttaaagaaattttagtagttactaaaattatgttactgtatttttcagaaatcaaactgcttatgaaaagtactaatagaacttgttaacctttctaaccttcacgattaactgtgaaatgtacgtcatttgtgcaagaccgtttgtccacttcattttgtataatcacagttgtgttcctgacactcaataaacagtcactggaaagagtgccagtcagcagtcatgcacgctgataaaaaaaaaaaaaaaaaa

SEQ ID NO: 266 - DNA, 3136 bp, Homo sapiens
  misc_feature (1)..(3136): n=a,t,g or c
ccccgccttcacccactgcctctgcctccctggggcagagctgtttcccagacgggtggggcggggcccaactgtcccagctccttcagccctttctgtccctcccagtgaggccagctgcggtgaagagggtgctctcttgcctggcgttccctctgcacggctgccccctcccaccctgcccactaagccagacccactgtcgccattcccacttctggtcctgccacctcctgagctgccttcccgcctggtctgggtagagtcatggcctcgagcacaggtgaccggagccaggcggtgaggcatggactgagggcgaaggtgctgacgctggacggcatgaacccgcgtgtgcggagagtggagtacgcagtgcgtggccccatagtgcagcgagccttggagctggagcaggagctgcgccaggtatggcccagggcccctcgctgccctccaggtcacaatggggtggccgagttggccccagccccactggcacatgggacaagggctgaggggttaggtagggcacagtctccctgcctgcacccctcccagggtgtgaagaagcctttcaccgaggtcatccgtgccaacatcggggacgcacaggctatggggcagaggcccatcaccttcctgcgccaggtgaggcttctctgcactccctcccggagcacccccccacccccagcccatgtaccctggcctcagcactccgtctctcaggtcttggccctctgtgttaaccctgatcttctgagcagccccaacttccctgacgatgccaagaaaagggcggagcgcatcttgcaggcgtgtgggggccacagtctgggtgagagagagccagggccagggccaggcggaagcagagggccgcccttgccactggaggagggaagtcccttgggagggctgaggagaacttcacctgtaccttcccaatcctttcctgcccgactccaggggcctacagcgtcagctccggcatccagctgatccgggaggacgtggcgcggtacattgagaggcgtgacggaggcatccctgcggaccccaacaacgtcttcctgtccacaggggccagcgatgccatcgtggtaggctgggcatgggcaccaagacattcctgacactgcagagggggcgcccagggtgggggacaggtgcggccccaggccctcgccaaccctgccttccccttcctttccgcagacggtgctgaagctgctggtggccggcgagggccacacacgcacgggtgtgctcatccccatcccccagtacccactctactcggccacgctggcagagctgggcgcagtgcaggtggattactacctggacgaggagcgtgcctgggcgctggacgtggccgagcttcaccgtgcactgggccaggcgcgtgaccactgccgccctcgtgcgctctgtgtcatcaaccctggcaaccccaccggtgcgttccccgccgccccgcccaattccccccgcgccaacgttgcgttccccgccgccccgcccaattccccccgcgcccacggtgcgttccccgccgccccgcccaactccccccgcgcccacggtgcgttccccgccgccccgccccactccccccgcgcccacggtgcgttccccgccgccccgccccactccctccgcgcccacggtgcgttccccgccgccccgccccactcctccccacccaacgtgcgccctggcccggcnngccggtccgctggaccccgctgcccagcggagggcagtgcgcccccttggctcacccagcactgctgcctccccggcaccccagggcaggtgcagacccgcgagtgcatcgaggccgtgatccgcttcgccttcgaagagcggctctttctgctggcggacgaggtcgcggcgggggagcggggagccgggcaacagtccgcccccgtgacgccttgcgccccttaccgaggtgtaccaggacaacgtgtacgccgcgggttcgcagttccactcattcaagaaggtgctcatggagatggggccgccctacgccgggcagcaggagcttgcctccttccactccacctccaagggctacatgggcgagtgcgtgcaacgaggcgggtgggggctcgcgggccatggccaggccctcctcgcccgatgggccaccccctcctccgcacctgacctggccgtgcgcaggtgcgggttccgcggcggctatgtggaggtggtgaacatggacgctgcagtgcagcagcagatgctgaagctgatgagtgtgcggctgtgcccgccggtgccaggacaggccctgctggacctggtggtcagcccgcccgcgcccaccgacccctcctttgcgcagttccaggctgtgagttgggggcaggagggggtccaggtgacctaatcaggggtgggggatccgagtgccgtgccctgatgggccctccctccgcggccacaggagaagcaggcagtgctggcagagctggcggccaaggccaagctcaccgagcaggtcttcaatgaggctcctggcatcagctgcaacccagtgcagggcgccatgtactccttcccgcgcgtgcagctgcccccgcgggcggtggagcgcgctcaggtcaggcgggggcggggcctgcggggtgggtaggggggtttgggtatccctctctgacggctctccgtccacaggagctgggcctggcccccgatatgttcttctgcctgcgcctcctggaggagaccggcatctgcgtggtgccagggagcggctttgggcagcgggaaggcacctaccacttccggtgaggcctggccctcactccctgtcccgccaccctggcccttcactcactgtcaactcctttcaggatgaccattctgccccccttggagaaactgcggctgctgctggagaagctgagcaggttccatgccaagttcaccctcgagtactcctgagcaccccagctggggccaggctgggtcgccctggactgtgtgctcaggagccctgggaggctctggagcccactgtacttgctcttgatgcctggcggggtggggtggggggggtgctgggcccctgcctctctgcaggtccctaataaagctgtgtggcagtctg

SEQ ID NO: 267 - DNA, 4040 bp, Homo sapiens
gtcgcctctcacccgccccggccgctccagcccgaggcgccccgaccccgcgccactccgcgcccggccagccgcccgcagccatggggctcctgcccaagctcggcgtgtcccagggcagcgacacctctactagccgagccggccgctgtgcccgctcggtcttcggcaacattaaggtgtttgtgctctgccaaggcctcctgcagctctgccaactcctgtacagcgcctacttcaagagcagcctcaccaccattgagaagcgctttgggctctccagttcttcatcgggtctcatttccagcttgaatgagatcagcaatgccatcctcatcatctttgtcagctactttggcagccgggtgcaccgtccacgtctgattggcatcggaggtctcttcctggctgcaggtgccttcatcctcaccctcccacacttcctctccgagccctaccagtacaccttggccagcactgggaacaacagccgcttgcaggccgagctctgccagaagcattggcaggacctgcctcccagtaagtgccacagcaccacccagaacccccagaaggagaccagcagcatgtggggcctgatggtggttgcccagctgctggctggcatcgggacagtgcctattcagccatttgggatctcctatgtggatgacttctcagagcccagcaactcgcccctgtacatctccatcttatttgccatctctgtatttggaccggctttcgggtacctgctgggctctatcatgctgcagatctttgtggactatggcagggtcaacacagctgcagttaacttggtcccgggtgacccccgatggattggagcctggtggctaggcctgctcatttcttcagctttattggttctcacctctttccccttttttttcttccctcgagcaatgcccataggagcaaagagggctcctgccacagcagatgaagcaaggaagttggaggaggccaagtcaagaggctccctggtggatttcattaaacggtttccatgcatctttctgaggctcctgatgaactcactcttcgtcctggtggtcctggcccagtgcaccttctcctccgtcattgctggcctctccaccttcctcaacaagttcctggagaagcagtatggcacctcagcagcctatgccaacttcctcattggtgctgtgaacctccctgctgcagccttggggatgctgtttggaggaatcctcatgaagcgctttgttttctctctacaaaccattccccgcatagctaccaccatcatcaccatctccatgatcctttgtgttcctttgttcttcatgggatgctccaccccaactgtggccgaagtctacccccctagcacatcaagttctatacatccgcagtctcctgcctgccgcagggactgctcgtgcccagattctatcttccacccggtctgtggagacaatggaatcgagtacctctccccttgccatgccggctgcagcaacatcaacatgagctctgcaacctccaagcaactgatctatttgaactgcagctgtgtgaccgggggatccgcttcagcaaagacaggatcgtgccctgtcccctgtgcccacttcctgctcccggccatcttcctcatctccttcgtgtccctgatagcctgcatctcccacaaccccctctacatgatggttctgcgtgtggtgaaccaggaggaaaagtcatttgccatcggggtgcagttcttgttgatgcgcttgctggcctggctgccatctccagccctctatggcctcaccattgaccactcctgcatccggtggaactcgctgtgcttggggaggcgaggggcctgcgcctactatgacaacgatgctctccgagacaggtacctgggcctgcagatgggctacaaggcgctgggcatgctgctgctttgcttcatcagctggagggtgaagaagaacaaggagtacaacgtgcagaaggcggcaggcctcatctgaccccaccctgggccactgcctgctccagagagtggaccttgactcttccacacctgcctatactcactaatgttaacacgtcatttcctttttgtatttttaaacaagaaagaaaaccccagtcctcatttgccttccctacctcttcctcccagagtcctccccacagttcctaagggccactgtgtacccgggctgtgtgggccagaactggggggctgagtcttccctggccccttggaagaggcccccagatgcccaggctcacttcagtgttgagtcctccattgaggatgcccactgaggcagccaggcccctcaccagccctggggggaatcctaaacagagagagaaaaagggtatctgcccttcttgccaggcagctccactctcccgctgactgcccacaccctgcagagtggcaggggtgaaaggaagaaggaagtggctgagttattaatagccagagccactgggagactggggagactggctgtaacccccttcacacctgggtttggcatcagcacagactacgggaggggctggctccctccccctcagaccctcacttcctgtacctagaggccattctggatgctgccatgttgggaagtacagtctctgcccattacctgcatgcaggcaccagagcagggactgagaaaccccaaggatgggtcatctaagtgctgtccatatgaaccctggactttctgtccttagatcctcacatgttatccctgtctttctggggtacgtttcaaactgaggaagctacaacacagtgaagacccaaggaaggcctatgaaatggtcctgatgcccaacctcccaccccttcaatgtggggacgagaccccctcatctcagagtaatgggaagaacctcccacatctccctggcagcagatgaggtggcttcacatgcacttccctgtctggacttcagcccgtattccgaggagtagagaggcagaagagatgtcagcaaagcaagtgatgaagcagagtggatgtccactgtcaccaagctggatggcaagctgcggcccacaaaacagccagtcaggttggctttcctggtttcagacatgctcataccattcccattttctcagcctcttctctgcctccagagaggtggatgcctgggttgagagacacagctgctacgtgatagatgttgagagacagaagccaacgaaggaggtcattcatcaacaaatatatttattggagaccgactttgtgcaaagcaatgctaatcagggttctccatggagcttccctcagctcttacctcacctccctccatttacattagggccttctcccagggtgtgctcggtgggcagtgtgggactgggggtgtgggagttggtgagagcaggaggagaggtggggacagcaagaagccacagattggcatgaaggatcctgacctgactatccatgccatccatggcccccagactgactctgcacctggccctttgccagacagctctgtctccccatgtcctctggaacagctgggcatgggtcatggccattcatgacccttaagtgccacccttcttggaagaccccctccagaagcatactggaagccacctctggaaaagcctcatatggtgatatgccaaaatatttatgtcaatgtccaaacaaagtccaatgccatgagactgaagtctttgtggaaaccactgttacagacaagcttatttccaaagccacctcatttccaaacatctcactcaggaagggaggctcaatgtaacctcaggggccagttttagcatttgaaatggttctgcttggaaaatgatgccctgcaactaaccctggtctttcccatggcaatttaaccacatttggaaggcactgccttcagctgagtttatgaacaatgaatgccaaccttcaggttctagaagattggttgcactcccaaacctttattctattatattactattaaaatattctaattttgctattgaggtaaaaaaaaaaaaa

SEQ ID NO: 268 - DNA, 1208 bp, Homo sapiens
gaaagtggcgtggtaaccaggcaactactgatcaatcccctccccggctgatttgcgcatcaggaggaggactgagcttatctgactccagagctttcaggagggaagaaagatgtcagatgaagatgatctagaagactctgagccagaccaggatgattctgagaaagaagaggacgagaaggagacagaggagggggaggactacagaaaagagggggaagagttccctgaggaatggctgcccacccccctcacggaggacatgatgaaggaagggctttctctgctctgtaagacaggcaatgggctggctcatgcttatgtcaagctggaggttaaagagagggacctgacagacatctacttgctgcgctcctacatccatctgcgctatgtggatatttctgagaaccacctgacagacctgtctccactcaactacctcacccacctgctctggctcaaggctgatggcaatcggctgcgaagtgcccagatgaatgaactgccctacctgcagattgctagttttgcttataaccagattactgacactgaaggcatctctcatcctcgtcttgaaaccctgaatctcaaagggaacagcatccacatggtgacaggtctggaccccgagaagttgatcagcctgcacacagtggagcttcgggggaaccagctggaaagcaccctgggaatcaatcttcctaagctgaagaacctctacctggcccaaaacatgctgaagaaggtggaaggcttggaggatctgagcaatctcaccaccttgcatcttcgagacaaccagattgacaccctgagtggcttctccagagaaatgaaatcattgcagtacctcaacctgaggagatcaaagacgctggccttcagacctgatcagactcccaggggcagccaccacatgtatgacagaggacagaggatgcctgtttttgccccaaagctggaaattcatcacaacctgaggcccaggatctgctctgtgccggtcctctgggcagtgtggggtgcagaatggggtgcctaggcctgagcgttgcctggagcctaggccgggggccgccctcgggcaggcgtgggtgagagccaagcccgcgtgggccgcggggtgctggtaggagtggttggagagacttgcgaaggcggctggggtgttcggatttccaataaagaaacagagtgat

SEQ ID NO: 269 - DNA, 2815 bp, Homo sapiens
tgcttatcaacaaacaccttaatttatcaaacacagcaaagctagtgacagctgagaggtccatgtctgggtagaaccaggcccacgatgctgcctctcccgtgttctggagttcagctgcagggattctgctgatgtgcccagcaccatcgttctgtttgtgcttaaatggcacagcatttggtcagcacatctgaaaaggaaggtgtgagaagcaaagcccatggccacgttcccctgccagttatgtggcaagacgttcctcaccctggagaagttcacgattcacaattattcccactccagggagcggccgtacaagtgtgtgcagcctgactgtggcaaagcctttgtttccagatataaattgatgaggcatatggctacccattctccccagaaatctcaccagtgtgctcactgtgagaagacgttcaaccggaaagaccacctgaaaaaccacttccagacccacgaccccaacaaaatggcctttgggtgtgaggagtgtgggaagaagtacaacaccatgctgggctataagaggcacctggccctccatgcggccagcagtggggacctcacctgtggggtctgtgccctggagctagggagcaccgaggtgctactggaccacctcaaagcccatgcggaagagaagccccctagcggaaccaaggaaaagaagcaccagtgcgaccactgtgaaagatgcttctacacccggaaggatgtgcgacgccacctggtggtccacacaggatgcaaggacttcctgtgccagttctgtgcccagagatttgggcgcaaggatcacctcacccggcataccaagaagacccactcacaggagctgatgaaagagagcttgcagaccggagaccttctgagcaccttccacaccatctcgccttcattccaactgaaggctgctgccttgcctcctttccctttaggagcttctgcccagaacgggcttgcaagtagcttgccagctgaggtccatagcctcaccctcagtcccccagaacaagccgcccagcctatgcagccgctgccagagtccctggcctccctccacccctcggtatcccctggctctcctccgccaccccttcccaatcacaagtacaacaccacttctacctcatactccccacttgcaagcctgcccctcaaagcagatactaaaggtttttgcaatatcagtttgtttgaggacttgcctctgcaagagcctcagtcacctcaaaagctcaacccaggttttgatctggctaagggaaatgctggtaaagtaaacctgcccaaggagctgcctgcagatgctgtgaacctaacaatacctgcctctctggacctgtcccccctgttgggcttctggcagctgccccctcctgctacccaaaatacctttgggaatagcactcttgccctggggcctggggaatctttgccccacaggttaagctgtctggggcagcagcagcaagaacccccacttgccatgggcactgtgagcctgggccagctccccctgccccccatccctcatgtgttctcagctggcactggctctgccatcctgcctcatttccatcatgcattcagataattgatttttaaagggtatttttcgtattctggaagatgttttaagaagcattttaaatgtcagttacaatatgagaaagatttggaaaacgagactgggactatggcttattcagtgatgactggcttgagatgataagagaattctcgaactgcatgtattgtgccaatctgtcctgagtgttcatgctttgtaccaaatttaatgaacgcgtgttctgtaatcaaactgcaaatattgtcataaccaacatccaaaatgacggctgctatatataagtgtttgtcatatggaatttaatcgtaagccatgatcataatgttaactaaataactttatgtggcactgcctagtaagggaactatggaaaggtttggatttctccaaatctgggagaattttcaaaataagaaaataacctttatatgatatactatgactaggctgtgtatttcttttcagggatttttctaccttcagggttggatgtagtttagttactattaccatagccaacctgtagttttacatatacattttcttgtggagcaatagagttctccattttacagaagcattttaaatgtagtttgaatattttccacaagatgctgcaatgtgagttatcacttcatttatcttaaagaaagactaaactggttgtcagttacatctgacagaaaaaaaaaaaaaaatcactgtgtaaccagggttaagtggttaaaataatccagggcgtcagtcaaaggcattttgctgactttaatattgattatatttttaacagggaatttaaggaaaatattaccggggaattaaaaaatatatatatattaaaacaagaattttcctttgcccctgtccagcctaaacctacctacctcaaggctgcctaagttcctaagtattgtttgtaatcacccaataaataagtgcatttgtaattcatcagtcattattagcttttattaaaagaagattacgttttacaatgtaactataatctcttgaatttggtatcttattaatgagttttaaagatgtaaaacctaaccttttttaaagctccattgtcttatgtttttagaggcttttccgtaaacatatatcttacatataataaacttttcaaatcttgcaaaaaaaaaaaaaaaaaaaaaaaaaaaaaaaaaaaaaaaaaaaaaaaaaaaaaaaaaaaaa

SEQ ID NO: 270 - DNA, 756 bp, Homo sapiens
atggctcagcgacttcttctgaggaggttcctggcctctgtcatctccaggaagccctctcagggtcagtggccacccctcacttccaaagccctgcagaccccacaatgcagtcctggtggcctgactgtaacacccaacccagcccggacaatatacaccacgaggatctccttgacaacctttaatatccaggatggacctgactttcaagaccgagtggtcaacagtgagacaccagtggttgtggatttccacgcacagtggtgtggaccctgcaagatcctggggccgaggttagagaagatggtggccaagcagcacgggaaggtggtgatggccaaggtggatattgatgaccacacagacctcgccattgagtatgaggtgtcagcggtgcccactgtgctggccatgaagaatggggacgtggtggacaagtttgtgggcatcaaggatgaggatcagttggaggccttcctgaagaagctgattggctgacaagcagggatgagtcctggttcccttgcccgcgtgggaccccaatagaactcagcccttccatgccagcccttcctgctgcctccctcctgtctggctcctggggcccatgcttagagcccaggctccagccctgagtgcttccgagctggcggactgcccaggggccatcagaggatggtggtgctgctgctgatccggggaccgctgtcttccctcccatacgcctttcatccctccttctagggcctatgg

SEQ ID NO: 271 - DNA, 2150 bp, Homo sapiens
  misc_feature (1)..(2150): n=a,t,g or c
ggtcccggatccgcgcgggtttggggatccanatgtccagccccgtgtccccctccaaacatccagtccctctcatattgcctttgaaattagcagcctctgggtgaccagaccttggccctcagaggaatcccgganaaaggtanaaccagcttcgcgttgggaacgcaggcgcgcttacgcatttagtgagggtttggcggtctccatanttaccgccgccgcgcgtgacntcatantggagcgctgagggcttggtggcgtggggtgggggctgtcctactgatcctgaatttgggtcactggtaanangagttgcccattccanccaggtggaacggggaggggtagccacatgtctcagatctgccattgtctgcgaaaagaaactgctgcgaggaccatccccaatcccctgcttcccttgggaagagtaaccgccgttttgtaggacacttggggacaaccccgcttgtcctgaaatttattgacacggtaaatagtatttcctgtgtgccgaggatgcagttaaaccaacactgaccccctgcccttgagaaacacaagatggctacagaaccaaagaaagctgcagcccagaactctccagaggatgaaggacttctgatagtgaagatagaagaggaagaatttatccatgggcaggacacttgcttacagagaagtgaactccttaagcaggagctctgcaggcagctttttaggcagttctgctaccaggattctcctggacctcgcgaggcactgagccgcctccgggagctctgctgtcagtggctgaagccagagatccataccaaggaacagattctggaactgctggtgctagagcagttcctgaccatcctgccaggagatttgcaggcctgggtacatgaacattacccagagagtggagaggaggcagtgaccatactagaagatttggagagaggcactgatgaagcagtactccaggttcaagcccatgaacatggacaagaaatattccagaaaaaagtgtcacctcctggaccagcacttaatgtcaagttacagccagtggagaccaaggcccattttgattcatcagaaccccagctcctatgggactgtgataatgagagtgaaaacagtagatccatgccaaagctggaaatttttgaaaaaattgaatcacagagaattatatctggaagaatctcaggatacatatcagaagcatctggtgagtctcaagacatctgtaagtctgcaggcagggtaaagagacaatgggaaaaagaatcaggggagtctcagagactctcgtctgcccaggatgaaggttttggtaaaatcctcacccacaaaaatacagtcagaggtgaaataataagccacgatggatgtgagaggagattaaatctgaactcaaatgaattcacacaccagaaatcttgtaaacatggtacctgtgaccagagcttcaaatggaactcagattttattaaccatcaaataatttatgctggagaaaaaaatcaccaatatggaaaatctttcaagagcccaaaacttgctaaacatgcagcagttttcagtggagataaaactcatcagtgtaatgaatgtgggaaagctttcaggcacagctcaaaacttgctaggcatcagagaatccacactggagagagatgctatgaatgtaatgaatgtgggaaaagctttgcagagagctcagatcttactagacatcggcgaattcacactggggaaagaccctttggttgcaaagaatgtgggagagcattcaacctgaactcacatcttatcaggcatcagagaattcacaccagagagaaaccctacgagtgtagtgaatgtgggaaaaccttccgagtgagctcacatcttattcgacactttagaattcacactggagaaaaaccctatgaatgcagtgagtgtggaagagccttcagtcagagctcaaaccttagtcaacaccagagaattcacatgagggaaaacctattaatgtaaggaacttaaatttgtaagtaaatgctgaggaaatggcacaatatgaaaaatattaaataaaaaataaatattgggcaagtggaagactgaaaaaaaaaaaaaaaaaaaaaaaaaaaaaaaaaaaa

SEQ ID NO: 272 - DNA, 1275 bp, Homo sapiens
ctggacttggaggatcagcagttgcaggtcatgcctcagacaagattgaaaacatggtgcctgttaaagatcgaatcattaaaattagctttaatgcagatgtgcatgcaagtctccagtggaactttagacctcagcaaacagaaatatatgtggtgccaggagagactgcactggcgttttacagagctaagaatcctactgacaaaccagtaattggaatttctacatacaatattgttccatttgaagctggacagtatttcaataaaatacagtgcttctgttttgaagaacaaaggcttaatccccaagaggaagtagatatgccagtgtttttctacattgatcctgaatttgctgaagatccaagaatgattaaagttgatcttatcactctttcttacactttttttgaagcaaaggaagggcacaagttgccagttccaggatataattgaagtcagcaactaagtcttccttcaaagttgtgatttttgggaaaatcatatatcctatcttctcaaaggagaaatattgtacaataatatgaaggcttatattttaaataattattttttctcaactaatttttttcacttaaacttgagagaacaagttcagcttttatcataagaaactcatatgcctagctagaatatatgactgactattcaataccatactgaagagtttgatactattaaaataagccgctttgttttttaaatatgcaggcatgggttcagcttaattccataattcccttccagattattaactcttcatacttacagcaatgaatctgacaatgtttttcaaaaatgtatgctcagggttatttgtttcaagtcataggccagaacttctaaccatgtttattgtgtctaaaagagttggttgctattttccttcattatgaatagtcagtattttaaaagctcaaagtagaagaggagtcactaagccctaacagcttgtccaaagatttaaattcttatttcaaatttgatttgtcctttaaggtttagggctattttatattcagagttctgaataattactttgaaactgtagtatcataaaattgaaataaaatacatctactaggctgttagccaaagcatcaccattacaagtccatgaatgttaaaatgtacaggtgggattgtgaagatttactgacatcaaaagttcttctggaaacaaacctttgttaaaaaaaaaaagtattaaattgttttaatagtgatttaaaaaaaaaaaaaaaaaaaa

SEQ ID NO: 273 - DNA, 1719 bp, Homo sapiens
caacttatcagtttgttcttcttttatattctctaaagctttctgttaaaaatggtggtgcttctgctgctataacgttgtcaagaaacttgtgggtcttttacatatgtcacagggatgcactcatttagataggaggctcctcacgtatctttcctggaaaatcctgtctctgtttttggctttttctgaaatagctgagaggatctatgattcacacccttaatatcttcaaagagtcttgtgtgtgacctgatactcagaccttttgatgtttctgaagtattagcaaaaggttatacagccatatcttcatcactttctctagagtaaaggctgtcctgacggtgaatcttagttttagtggcttttgccatttgaataggccgcgaatttcccaaatcatcaagtcctggtttctttatatttaacaggtcttccctcaatctacctctttccacattttactataatcagcaagaagacagcaggctgtaccttccacagcttgcttggaaatatcctcagctaaatattgaagtcatcacttaaaagttctgctttacacataacggcaggacacaactcagcttagcttttcgccactatgtaacaaggactcctttcctccacttctccagtaacatattcctcattttttaccaacagtctattcatgatgatttagatattctatggcaatcgaggtattctctattatgctcctttcttcaaggccgccctagcattaacattccatatttctactaacagtctgtttaaggcagtttagcttcttttctggcatgctcctcagaattcttccagcctccacctactgcccaattccagagccacttttctacttttaggtatttgttacagcagcacctcaagtacctagaaaactcttttatgcctgcttctctgccagatgacttgaatatggtactagatttggaattcacctttctccagggtcactgtttatttcaaagaggtgaatttacctgtgctagggttttcacactgggagtgctaccagaactaccacaggatgaaagtggtgagcccaccactgcagagaagttttctcagtgccgtaatatagaggaattctcaaaataagccctactccttttcacttactgaaaacaacttggataatgtgtaacagccagccccatttcaaaaagattaccaggggtaaaacaactttttcatgggtcaaaatcatcttccgaagaaaatgatttcttaaaagaattgaacattgtaaatcaaagggcattgtcctgttttggattaacaaaacaggaaaaataaccaatccttgtaaaattatttgaaattttcttgtttttatcagttgagtgcctatagatgcacatacaaaaacaactgccatttttgtatataatagtcttccaagatagagatttacattaggagagaattaaacatccaggagggatgaacagtatttcgtgtgtgctatgtagtgttttgcttcattgagagtcattttcatgaattatttttactactgcagtcatcttaaatttataatcatctcaaaaaagatgtcacaatgaacagacaaccatctgtgaggtcagtcattttgcatgatgtatgtaatcaaaaagtttgaaatgtctgcttactaataaagaatgttttcactgaaacttaaaaaaaaaaaaaaaaaaaaaaaaa

SEQ ID NO: 274 - DNA, 1616 bp, Homo sapiens
tgctgaaccatttttcttaggatgcagccgtctcactcccttgtcctgtaaatcgtgtattcatgttgatgattcttggagataggtttcactttttcccagctgcgtccacaggaaaggggagtcggatgccagctgcaccccgcctggctcgcacaggctaagaccacagacagagcagggcttcccggagccacacaggccacgcaccccaggaacccttgctgccgcgggccaggaacaggaatgtgttggtgcctgagacaccaaatggaagaagcacatcaagactgttctcctgcggccaacactggcccggaagccgccctccatacaggccctcagggggcctgccttctgcgcctcagtcccccgtgcatccctgggcctgggtatcacatgctctccaggaaagggacggaatcaatcgtgtgaccgatgggctcgcaaggatgggtgccgccgtgggagccctgcctctggtgctggcaagggattgggtttgtgtgggtgtctctagcctgcagagtgcagtgagtgagagtccttgggagcgcggcgctgcctgtagctgtgcctggggatgcacgtggccacgggatttcagtgggacagcgctcccacaggggctgggggtgggggtggggtttcttagttactgttggaaagggaaaaattcaccatatccaaggggagagacgatgggctgggtttgtttactccaacttcccttctacacccctcctgcaggacagtacgatttggggagaacccagctccccactttatctgcagactctgggacctgacaaaacagtcagagcctgagtgcactgcagcctgaactcccttgagcagcgctataagggactttgcactttaaaaaggggatgcctgtcagtaaatcccctgtgcattgactagaactggggggctgcgcccgctccctccttaatcctagatgatttgctcatgaaatagaggtgggggacgaccgcatgcactctgggaggtgcagccctaaggggtggactccagatctccctgcaagagacagcttggcttggctttggctgttggggaggagtccctgccatcccggtgagcctggggctgttgcttagggtcttctgggtggacacgtggagaaagagaaggcaaacgttggaacactaggaaaagctagaaattcagacaacacacatggatccccttaaaacatgtaaatgtgtcagaacacggttgacctgccgccttcttgaacctggtggcccccgttggaactatcagtggcgtctcccatgcacacgccctctgctttctctttcctagactcgcggtgctcacatccagacattaccttgttggtagcccccaagtggcgtgcagtgacaccagtatcttctctgttgcatttttgcaatcttgtgtcccgctcggtgatgttctacaactctgttttaaggttgagaaagtttcaagggtgaagatctcaaaacagtgctaaaatcaaaggtgtttgctgtgaagaaaaacatgtgtatatattgcaccttgagttgtcagaaggtagaaactgaaataaactaactttaaaaaaaaaaaaaaaaaaaaaa

SEQ ID NO: 275 - DNA, 6608 bp, Homo sapiens
ccttcttttaaggagtttgccgcgagcgcgtctccttcattcgcaggctgggcgcgttcgcagtcggctggcggcgaaggaaggcgctctcgggacctcacgggcgcgcgtcttttggctcttgcccctgtccctgcggcttggggaaagcgtaacccggcggctaggcgcgggagaagtgcggaggagccatgggcgccgggagctccaccgagcagcgcagcccggagcagccgcccgaggggagctccacgccggctgagcccgagcccagcggcggcggcccctcggccgaggcggcgccagacaccaccgcggaccccgccatcgctgcctcggaccccgccaccaagctcctacagaagaatggtcagctgtccaccatcaatggcgtagctgagcaagatgagctcagcctccaggagggtgacctaaatggccagaaaggagccctgaacggtcaaggagccctaaacagccaggaggaagaagaagtcattgtcacggaggttggacagagagactctgaagatgtgagcgaaagagactccgataaagagatggctactaagtcagcggttgttcacgacatcacagatgatgggcaggaggagaaccgaaatatcgaacagattccttcttcagaaagcaatttagaagagctaacacaacccactgagtcccaggctaatgatattggatttaagaaggtgtttaagtttgttggctttaaattcactgtgaaaaaggataagacagagaagcctgacactgtccagctactcactgtgaagaaagatgaaggggagggagcagcaggggctggcgaccaccaggaccccagccttggggctggagaagcagcatccaaagaaagcgaacccaaacaatctacagagaaacccgaagagaccctgaagcgtgagcaaagccacgcagaaatttctcccccagccgaatctggccaagcagtggaggaatgcaaagaggaaggagaagagaaacaagaaaaagaacctagcaagtctgcagaatctccgactagtcccgtgaccagtgaaacaggatcaaccttcaaaaaattcttcactcaaggttgggccggctggcgcaaaaagaccagtttcaggaagccgaaggaggatgaagtggaagcttcagagaagaaaaaggaacaagagccagaaaaagtagacacagaagaagacggaaaggcagaggttgcctccgagaaactgaccgcctccgagcaagcccacccacaggagccggcagaaagtgcccacgagccccggttatcagctgaatatgagaaagttgagctgccctcagaggagcaagtcagtggctcgcagggaccttctgaagagaaacctgctccgttggcgacagaagtgtttgatgagaaaatagaagtccaccaagaagaggttgtggccgaagtccacgtcagcaccgtggaggagagaaccgaagagcagaaaacggaggtggaagaaacagcagggtctgtgccagctgaagaattggttggaatggatgcagaacctcaggaagccgaacctgccaaggagctggtgaagctcaaagaaacgtgtgtttccggagaggaccctacacagggagctgacctcagtcctgatgagaaggtgctgtccaaaccccccgaaggcgttgtgagtgaggtggaaatgctgtcatcacaggagagaatgaaggtgcagggaagtccactaaagaagctttttaccagcactggcttaaaaaagctttctggaaagaaacagaaagggaaaagaggaggaggagacgaggaatcaggggagcacactcaggttccagccgattctccggacagccaggaggagcaaaagggcgagagctctgcctcatcccctgaggagcccgaggagatcacgtgtctggaaaagggcttagccgaggtgcagcaggatggggaagctgaagaaggagctacttccgatggagagaaaaaaagagaaggtgtcactccctgggcatcattcaaaaagatggtgacgcccaagaagcgtgttagacggccttcggaaagtgataaagaagatgagctggacaaggtcaagagcgctaccttgtcttccaccgagagcacagcctctgaaatgcaagaagaaatgaaagggagcgtggaagagccaaagccggaagaaccaaagcgcaaggtggatacctcagtatcttgggaagctttaatttgtgtgggatcatccaagaaaagagcaaggagaaggtcctcttctgatgaggaagggggaccaaaagcaatgggaggagaccaccagaaagctgatgaggccggaaaagacaaagagacggggacagacgggatccttgctggttcccaagaacatgatccagggcagggaagttcctccccggagcaagctggaagccctaccgaaggggagggcgtttccacctgggagtcatttaaaaggttagtcacgccaagaaaaaaatcaaagtccaagctggaagagaaaagcgaagactccatagctgggtctggtgtagaacattccactccagacactgaacccggtaaagaagaatcctgggtctcaatcaagaagtttattcctggacgaaggaagaaaaggccagatgggaaacaagaacaagcccctgttgaagacgcagggccaacaggggccaacgaagatgactctgatgtcccggccgtggtccctctgtctgagtatgatgctgtagaaagggagaaaatggaggcacagcaagcccaaaaaggcgcagagcagcccgagcagaaggcagccactgaggtgtccaaggagctcagcgagagtcaggttcatatgatggcagcagctgtcgctgacgggacgagggcagctaccattattgaagaaaggtctccttcttggatatctgcttcagtgacagaacctcttgaacaagtagaagctgaagccgcactgttaactgaggaggtattggaaagagaagtaattgcagaagaagaaccccccacggttactgaacctctgccagagaacagagaggcccggggcgacacggtcgttagtgaggcggaattgacccccgaagctgtgacagctgcagaaactgcagggccattgggttccgaagaaggaaccgaagcatctgctgctgaagagaccacagaaatggtgtcagcagtctcccagttaaccgactccccagacaccacagaggaggccactccggtgcaggaggtggaaggtggcgtacctgacatagaagagcaagagaggcggactcaagaggtcctccaggcagtggcagaaaaagtgaaagaggaatcccagctgcctggcaccggtgggccagaagatgtgcttcagcctgtgcagagagcagaggcagaaagaccagaagagcaggctgaagcgtcgggtctgaagaaagagacggatgtagtgttgaaagtagatgctcaggaggcaaaaactgagccttttacacaagggaaggtggtggggcagaccaccccagaaagctttgaaaaagctcctcaagtcacagagagcatagagtccagtgagcttgtaaccacttgtcaagccgaaaccttagctggggtaaaatcacaggagatggtgatggaacaggctatcccccctgactcggtggaaacccctacagacagtgagactgatggaagcacccccgtagccgactttgacgcaccaggcacaacccagaaagacgagattgtggaaatccatgaggagaatgaggtcgcatctggtacccagtcagggggcacagaagcagaggcagttcctgcacagaaagagaggcctccagcaccttccagttttgtgttccaggaagaaactaaagaacaatcaaagatggaagacactctagagcatacagataaagaggtgtcagtggaaactgtatccattctgtcaaagactgaggggactcaagaggctgaccagtatgctgatgagaaaaccaaagacgtaccatttttcgaaggacttgaggggtctatagacacaggcataacagtcagtcgggaaaaggtcactgaagttgcccttaaaggtgaagggacagaagaagctgaatgtaaaaaggatgatgctcttgaactgcagagtcacgctaagtctcctccatcccccgtggagagagagatggtagttcaagtcgaaagggagaaaacagaagcagagccaacccatgtgaatgaagagaagcttgagcacgaaacagctgttaccgtatctgaagaggtcagtaagcagctcctccagacagtgaatgtgcccatcatagatggggcaaaggaagtcagcagtttggaaggaagccctcctccctgcctaggtcaagaggaggcagtatgcaccaaaattcaagttcagagctctgaggcatcattcactctaacagcggctgcagaggaggaaaaggtcttaggagaaactgccaacattttagaaacaggtgaaacgttggagcctgcaggtgcacatttagttctggaagagaaatcctctgaaaaaaatgaagactttgccgctcatccaggggaagatgctgtgcccacagggcccgactgtcaggcaaaatcgacaccagtgatagtatctgctactaccaagaaaggcttaagttccgacctggaaggagagaaaaccacatcactgaagtggaagtcagatgaagtcgatgagcaggttgcttgccaggaggtcaaagtgagtgtagcaattgaggatttagagcctgaaaatgggattttggaacttgagaccaaaagcagtaaacttgtccaaaacatcatccagacagccgttgaccagtttgtacgtacagaagaaacagccaccgaaatgttgacgtctgagttacagacacaagctcacgtgataaaagctgacagccaggacgctggacaggaaacggagaaagaaggagaggaacctcaggcctctgcacaggatgaaacaccaattacttcagccaaagaggagtcagagtcaaccgcagtgggacaagcacattctgatatttccaaagacatgagtgaagcctcagaaaagaccatgactgttgaggtagaaggttccactgtaaatgatcagcagctggaagaggtcgtcctcccatctgaggaagagggaggtggagctggaacaaagtctgtgccagaagatgatggtcatgccttgttagcagaaagaatagagaagtcactagttgaaccgaaagaagatgaaaaaggtgatgatgttgatgaccctgaaaaccagaactcagccctggctgatactgatgcctcaggaggcttaaccaaagagtccccagatacaaatggaccaaaacaaaaagagaaggaggatgcccaggaagtagaattgcaggaaggaaaagtgcacagtgaatcagataaagcgatcacaccccaagcacaggaggagttacagaaacaagagagagaatctgcaaagtcagaacttacagaatcttaaaacatcatgcagttaaactcattgtctgtttggaagaccagaatgtgaagacaagtagtagaagaaaatgaatgctgctgctgagactgaagaccagtatttcagaactttgagaattggagagcaggcacatcaactgatctcatttctagagagcccctgacaatcctgaggcttcatcaggagctagagccatttaacatttcctctttccaagaccaacctacaattttcccttgataaccatataaattctgatttaaggtcctaaattcttaacctggaactggagttggcaatacctagttctgcttctgaaactggagtatcattctttacatatttatatgtatgttttaagtagtcctcctgtatctattgtatatttttttcttaatgtttaaggaaatgtgcaggatactacatgctttttgtatcacacagtatatgatggggcatgtgccatagtgcaggcttggggagctttaagcctcagttatataacccacaaaaaacagagcctcctagatgtaacattcctgatcaaggtacaattctttaaaattcactaatgattgaggtccatatttagtggtactctgaaattggtcactttcctattacacggagtgtgccaaaactaaaaagcattttgaaacatacagaatgttctattgtcattgggaaattttgctttctaacccagtggaggttagaaagaagttatattctggtagcaaattaactttacatcctttttcctacttgttatggttgtttggaccgataagtgtgcttaatcctgaggcaaagtagtgaatatgttttatatgttatgaagaaaagaattgttgtaagtttttgattctactcttatatgctggactgcattcacacatggcatgaaataagtcaggttctttacaaatggtattttgatagatactggattgtgtttgtgccatatttgtgccattcctttaagaacaatgttgcaacacattcatttggataagttgtgatttgacgactgatttaaataaaatatttgcttcacttaaaaaaaaaaaa

SEQ ID NO: 276 - DNA, 1698 bp, Homo sapiens
tcggcacaggagcgaggagacccgagagcagacgcgccctggcgcccgccctgcgcagtcaccatggcgatgcatttcatcttctcagatacagcggtgcttctgtttgatttctggagtgtccacagtcctgctggcatggccctttcggtgttggtgctcctgcttctggctgtactgtatgaaggcatcaaggttggcaaagccaagctgctcaaccaggtactggtgaacctgccaacctccatcagccagcagaccatcgcagagacagacggggactctgcaggctcagattcattccctgttggcagaacccaccacaggtggtacttgtgtcactttggccagtctctaatccatgtcatccaggtggtcatcggctacttcatcatgctggccgtaatgtcctacaacacctggattttccttggtgtggtcttgggctctgctgtgggctactacctagcttacccacttctcagcacagcttagatggtgaggaacgtgcaggcactgaggctggagggacatggagccccctcttccagacactatacttccaactgccctttcttctgatggctattcctccaccttattcccagcccctggaaactttgagctgaagccagcacttgctccctggagttcggaagccattgcagcaaccttccttctcagccagcctacgtagggcccaggcatggtcttgtgtcttaagacagctgctgtgaccaaagggagaatggagataacaggggtggcagggttactgagcccatgacaatgcttctctgtgactcaaaccaggaatttccaaagatttcaagccagggagaagggttcttggtgatgcagggcatggaacctggacaccctcagctctcctgctttgtgccttatctacaggagcatcgcccattggacttcctgacctcttctgtctttgagggacagagaccaagctagatcctttttctcacctttctgcctttggaacacatgaagatcatctcgtctatggatcatgttgacaaactaagttttttttatttttcccattgaactcctagttggcaattttgcacattcatacaaaaaaatttttaatgaaatgatttcattgattcatgatggatggcagaaactgctgagacctatttccctttcttggggagagaataagtgacagctgattaaaggcagagacacaggactgctttcaggctcctggtttattctctgattgactgagctccttccaccagaaggcactgcctgcaggaagaagatgatctgatggccgtgggtgtctgggaagctcttcgtggcctcaatgccctcctttatcctcatctttcttctatgcagaacaaaaagctgcatctaataatgttcaatacttaatattctctatttattacttactgcttactcgtaatgatctagtggggaaacatgattcattcacttaaaatactgattaagccatgggcaggtactgactgaagatgcaatccaaccaaagccattacattttttgagttagatgggactctctggatagttgaacctcttcactttataaaaaaggaaagagagaaaatcactgctgtatactaaatacctcacagattagatgaaaagatggttgtaagctttgggaattaaaaacaaatacattttagtaaatat

SEQ ID NO: 277 - DNA, 1236 bp, Homo sapiens
actgatagctcccaaggcatcccccagcttgtgagtaacatcagtgcctgccaggtgattgctgaggctgtaagaactaccctgggtccccgtggcatggacaagcttattgtagatggcagaggcaaagcaacaatttctaatgatggggccacaattctgaaacttcttgatgttgtccatcctgcagcaaagactttggtagacattgccaaatcccaagatgctgaggtgggtgatggcaccacctcagtgaccttgctggctgcagagtttctgaagcaggtgaaaccctatgtggaggaaggtttacacccccagatcatcattcgagctttccgcacagccacccagctggcagttaacaagatcaaagagattgctgtgaccgtgaagaaggcagataaagtggagcagaggaagctgctggaaaagtgtgccatgaccgctctgagctccaagctgatctcccagcagaaagctttctttgctaagatggtggtggatgcagtgatgatgctcgatgatttgctgcagcttaaaatgattggaatcaagaaggtacagggtggagccctcgaggattctcagctggtagctggtgttgcattcaagaagactttctcttacgctgggtttgaaatgcaacccaaaaagtaccacaatcccaagattgcccttttgaatgtcgagctcgagttgaaagctgagaaagacaatgctgagataagagtccacacagttgaggattatcaggcaattgttgatgctgagtggaacattctctatgacaagttagagaagatccgtcagtctggagccaaagttgtcttgtccaaacctcccattggggatgtggccacccagtactttgctgacagggacatgttctgtgctggccgagtacctgaggaggatctgaagaggacaatgatggcctgtggaggctcaatccagaccagtgtcaatcctctgtcagcagatgtgctgggtcgatgccaggtgtttgaagagacccagattggaggcgagaggtacaatttttttactggcttgcccaaggccaagacatgcaccttcatttctccgtgcggcgccgagcagtttatggaggagacagagcggtccctgcatgatgccatcatgatcgtcaggagggccatcaagaatgattcagtggtgcctggtggcgggcccattgagatggaactctccaagtacctgcgggattactcc

SEQ ID NO: 278 - DNA, 7178 bp, Homo sapiens
gggtaactcattcgactgtggagttcttttaattcttatgaaagatttcaaatcctctggaagccaaaatgggacacagtaaacagattcgaattttacttctgaacgaaatggagaaactggaaaagaccctcttcagacttgaacaagaaactgggtctcactatgttgcccaggttgatattgaactcctggactcaagcaaccctccctctttggcctctgaaagtactgggattacaagcataagccaccgggcatggccccacttctgagcattaatttatttattgggtatgagctacagttccgattaggcccaactttacagggaaaagcagttaccgtgtatacaaattacccatttcctggagaaacatttaatagagaaaaattccgttctctggattgggaaaatccaacagaaagagaagatgattctgataaatactgtaaacttaatctgcaacaatctggttcatttcagtattatttccttcaaggaaatgagaaaagtggtggaggttacatagttgtggaccccattttacgtgttggtgctgataatcatgtgctacccttggactgtgttactcttcagacatttttagctaagtgtttgggaccttttgatgaatgggaaagcagacttagggttgcaaaagaatcaggctacaacatgattcattttaccccattgcagactcttggactatctaggtcatgctactcccttgccaatcagttagaattaaatcctgacttttcaagacctaatagaaagtatacctggaatgatgttggacagctagtggaaaaattaaaaaaggaatggaatgttatttgtattactgatgttgtctacaatcatactgctgctaatagtaaatggatccaggaacatccagaatgtgcctataatcttgtgaattctccacacttaaaacctgcctgggtcttagacagagcactttggcgtttctcctgtgatgttgcagaagggaaatacaaagaaaagggaatacctgctttgattgaaaatgatcaccatatgaattccatccgaaaaataatttgggaggatatttttccaaagcttaaactctgggaatttttccaagtagatgtcaacaaagcggttgagcaatttagaagacttcttacacaagaaaataggcgagtaaccaagtctgatccaaaccaacaccttacgattattcaagatcctgaatacagacggtttggctgtactgtagatatgaacattgcactaacgactttcataccacatgacaaggggccagcagcaattgaagaatgctgtaattggtttcataaaagaatggaggaattaaattcagagaagcatcgactcattaactatcatcaggaacaggcagttaattgccttttgggaaatgtgttttatgaacgactggctggccatggtccaaaactaggacctgtcactagaaagcatcctttagttaccaggtattttactttcccatttgaagagatagacttctccatggaagaatctatgattcatctgccaaataaagcttgttttctgatggcacacaatggatgggtaatgggagatgatcctcttcgaaactttgctgaaccgggttcagaagtttacctaaggagagaacttatttgctggggagacagtgttaaattacgctatgggaataaaccagaggactgtccttatctctgggcacacatgaaaaaatacactgaaataactgcaacttatttccagggagtacgtcttgataactgccactcaacacctcttcacgtagctgagtacatgttggatgctgctaggaatttgcaacccaatttatatgtagtagctgaactgttcacaggaagtgaagatctggacaatgtctttgttactagactgggcattagttccttaataagagaggcaatgagtgcatataatagtcatgaagagggcagattagtttaccgatatggaggagaacctgttggatcctttgttcagccctgtttgaggcctttaatgccagctattgcacatgccctgtttatggatattacgcatgataatgagtgtcctattgtgcatagatcagcgtatgatgctcttccaagtactacaattgtttctatggcatgttgtgctagtggaagtacaagaggctatgatgaattagtgcctcatcagatttcagtggtttctgaagaacggttttacactaagtggaatcctgaagcattgccttcaaacacaggtgaagttaatttccaaagcggcattattgcagccaggtgtgctatcagtaaacttcatcaggagcttggagccaagggttttattcaggtgtatgtggatcaagttgatgaagacatagtggcagtaacaagacactcacctagcatccatcagtctgttgtggctgtatctagaactgctttcaggaatcccaagacttcattttacagcaaggaagtgcctcaaatgtgcatccctggcaaaattgaagaagtagttcttgaagctagaactattgagagaaacacgaaaccttataggaaggatgagaattcaatcaatggaacaccagatatcacagtagaaattagagaacatattcagcttaatgaaagtaaaattgttaaacaagctggagttgccacaaaagggcccaatgaatatattcaagaaatagaatttgaaaacttgtctccaggaagtgttattatattcagagttagtcttgatccacatgcacaagtcgctgttggaattcttcgaaatcatctgacacaattcagtcctcactttaaatctggcagcctagctgttgacaatgcagatcctatattaaaaattccttttgcttctcttgcctccagattaactttggctgagctaaatcagatcctttaccgatgtgaatcagaagaaaaggaagatggtggagggtgctatgacataccaaactggtcagcccttaaatatgcaggtcttcaaggtttaatgtctgtattggcagaaataagaccaaagaatgacttggggcatcctttttgtaataatttgagatctggagattggatgattgactatgtcagtaaccggcttatttcacgatcaggaactattgctgaagttggtaaatggttgcaggctatgttcttctacctgaagcagatcccacgttaccttatcccatgttactttgatgctatattaattggtgcatataccactcttctggatacagcatggaagcagatgtcaagctttgttcagaatggttcaacctttgtgaaacacctttcattgggttcagttcaactgtgtggagtaggaaaattcccttccctgccaattctttcacctgccctaatggatgtaccttataggttaaatgagatcacaaaagaaaaggagcaatgttgtgtttctctagctgcaggcttacctcatttttcttctggtattttccgctgctggggaagggatacttttattgcacttagaggtatactgctgattactggacgctatgtagaagccaggaatattattttagcatttgcgggtaccctgaggcatggtctcattcctaatctactgggtgaagggatttatgccagatacaattgtcgggatgctgtgtggtggtggctgcagtgtatccaggattactgtaaaatggttccaaatggtctagacattctcaagtgcccagtttccagaatgtatcctacagatgattctgctcctttgcctgctggcacactggatcagccattgtttgaagtcatacaggaagcaatgcaaaaacacatgcagggcatacagttccgagaaaggaatgctggtccccagatagatcgaaacatgaaggacgaaggttttaatataactgcaggagttgatgaagaaacaggatttgtttatggaggaaatcgtttcaattgtggcacatggatggataaaatgggagaaagtgacagagctagaaacagaggaatcccagccacaccaagagatgggtctgctgtggaaattgtgggcctgagtaaatctgctgttcgctggttgctggaattatccaaaaaaaatattttcccttatcatgaagtcacagtaaaaagacatggaaaggctataaaggtctcatatgatgagtggaacagaaaaatacaagacaactttgaaaagctatttcatgtttccgaagacccttcagatttaaatgaaaagcatccaaatctggttcacaaacgtggcatatacaaagatagttatggagcttcaagtccttggtgtgactatcagctcaggcctaattttaccatagcaatggttgtggcccctgagctctttactacagaaaaagcagggaaagctttggagattgcagaaaaaaaattgcttggtccccttggcatgaaaactttagatccagatgatatggtttactgtggaatttatgacaatgcattagacaatgacaactacaatcttgctaaaggtttcaattatcaccaaggacctgagtggctgtggcctattgggtattttcttcgtgcaaaattatatttttccagattgatgggcccggagactactgcaaagactatagttttggttaaaaatgttctttcccgacattatgttcatcttgagagatccccttggaaaggacttccagaactgaccaatgagaatgcccagtactgtcctttcagctgtgaaacacaagcctggtcaattgctactattcttgagacactttatgatttatagtttattacagatattaagtatgcaattactgtattataggatgcaaggtcatcatatgtaaatgctatatgcacaggctcaagttgttttaaaaatctcatttattataatattgatgctcaattaggtaagattgtaaaagcattgattttttttaatgtacagaggtagatttcaatttgaatcagaaagaaatatcattaccaatgaaatgtgtttgagttcagtaagaattattcaaatgcctagaaatccatagtttggaaaataaaaatcatgtcatcttctatttgtacagaaatgaaaataaaatatgaaaataatgaaagaaatgaaaagatagcttttaattgtggtatatataatcttcagtaacaatacatactgaatacgctgtggttcattaatattaacaccacgtactatagtattcttagaatacagtgctcactgcatttaataaatatttaataaatgatgaatgatagaagtttccatctacaatatatgttcctaaatggagcacagatgttcaaactatgctttcattttttcactgatatattaatttttgtgtaatgaatgccaacagtatattttatatgatttacttatgtgaggaaacatgcaaagcattaggaaatttatttcctaaaaacagttttgtaaaattagtattgagttctattgagtattataagatagcttacattttcaaaatggaaattgtcggtcatatttctagaactttaaagaaaaaagaatgttatattagttttctaaaactcaactatctttagtcatgttcaaaaatctattgctagatcatagtagatactggttttctattaactcaaaacctacattgacaagtttaacattgagaagaatcttaacaaaaatatggatatgaattcagtagatatcttaaattcaataaaatcactggaagtttttcatgataacttattttaagatgccttaaaaatcttaaagtcacaaaaggaaaaaggtttttaacatttacatgagttaacattttttcatagaacttatttcctagatagaattttttactgttttttactgttttcttaagaaaacagttaaatcattatgcattcagttggaagaaagtagtggcaagaattctttcattgctatataatattcagtggctcatttatacctaataaaataatggtattttaaaataatgctactttcaaagtagcatttttttagttagtttacaggttacatacccaaaaccttaactatgactaagaaattaaagaagaaaaccagcaaactaaaacttctgggcagcaaaaatatataaatgcttcagatgtcaaatacccatgcttgaaagctcgtgtaatttactttaagattatctgcctgctcttcttcaaagctgaccttgctttagaaatagttttaactagcttagttttctggtttccaaaactaaaatagattaaatcctacaaatttaaggacagttgtgacagtaatctgaccactatctataaatacattggacattggtttccaaatctccctttctcttcagttccttccttgttcaatatatacccttctctaaactgtgcgggtaaaaggaatgactgtccttgagagaaccattagtttatcaaaggtttatgtagttttgttgctgtaccctaactttgatattcagggaggtaggaaaggtaacagaaaaccagcatatttaatcaaagcaagaagtaatcgctgacagttaaatgtgaccaaaaaaattaaaagttcacaatttttttaatgtagccatttggggttatctctagtaaggcagatacccacgttggtaaatttttaggatattgtgttgcactagaaaactaagtggttcatatttctaatgaggaagattaatgaaagaacattgttatattctgcgtggtatattttaaagtttaagaaggcatgttaaacattatttcctctatggtagttaaaatacagaattagatttttaacaggtgtcatttgactaaacgtttcggtagaatgcttcatacttgagtgatgctggataaggtattgtatttcaacaatggactatgccttggtttttcactaatcaaaatcaaaattactctttaacatgataaatgaatttaccagtttagtatgctgtggtattttaataagttttcaaagataattgggaaaacatgagactggtcatattgatgaatattgtaacatgtgaattgtgatccatttctgatatgtcttgaactactgtgtctagtaggcaaatgtcattgttacctctgtgtgttaagaaaataaaaatattttctaaaggtcg

SEQ ID NO: 279 - DNA, 5293 bp, Homo sapiens
caagagcggaggaccaggaaccagagagagagagagagaaaagagagaggagagacagagcgcttgggggcgaaaggagagagggagggaagggtgggtaaggaggagagagcggtctgctgcaaaccccaggaggagagcttggagcccaagccagaactcgagccctagccggagccgttcacagggaggcggctgccgggaccgtcagccctgcatgatgcatctccggctcttctgcatcctgctcgccgcggtctcaggagccgagggctggggctactacggctgcgacgaggagctggtgggtcccctgtatgcacgctccctgggcgcctcctcctactacagtctccttactgcgccgcgattcgccaggctgcacggcataagcgggtggtcaccacggattggggatccgaatccctggctccagatagacttaatgaagaagcaccggatccgggccgtggccacacagggctcctttaattcttgggactgggtcacacgttacatgctactctacggcgaccgagtggacagctggacaccgttctaccagcgagggcacaactcgaccttctttggtaacgtgaacgagtcggcggtggtgcgccatgacctgcacttccacttcactgcgcgctacatccgcatcgtgcccctggcctggaacccacgcggcaagatcggcctgaggctcggcctctatggctgcccatacaaggccgacatactctatttcgacggcgacgatgccatctcctaccgcttcccgcgaggggtcagccgaagcctgtgggacgtgttcgccttcagcttcaagaccgaggagaaggacggtcttctgctgcacgccgagggcgcccagggcgactacgtgacgctcgagctggagggggcacacctgctgctgcacatgagcctgggcagcagccctatccagccaagaccaggtcacaccaccgtgagcgcaggcggagtcctcaatgaccagcactggcactatgtgcgggtggaccgatttggccgcgatgtaaatttcaccctggacggctatgtgcagcgctttattctcaatggagacttcgagaggctgaacctggacactgagatgttcatcggaggtctggtgggcgccgcgcggaagaacctggcctatcggcataacttccgcggctgcatagaaaacgtaatcttcaaccgcgtcaacatcgcagacctggccgtgcggcgccattcccggatcaccttcgagggtaaggtggcttttcgttgcctggacccggtaccgcaccctatcaacttcggaggccctcacaacttcgttcaagtgcccggtttcccacgccgtggccgcctggcagtctcatttcgcttccgcacctgggacctcaccgggcttctccttttctcccgtctgggggacgggctgggccacgtggagctgacgctcagcgaagggcaggtcaacgtgtccatcgcgcagagcggccgaaagaagcttcagttcgctgctgggtaccgactgaatgacggcttttggcacgaggtgaattttgtggcacaggaaaaccatgcagttatcagcattgatgatgtggaaggggcagaggtcagggtctcatacccgttgctgatccggacagggacctcatatttctttgggggttgtcccaagccagccagtcgatgggactgccactccaaccagacggcattccatggctgcatggagctgctcaaggtggatggtcaactggtcaacctgactctggtggagggccggcggcttggattctatgctgaggtcctctttgatacatgtggcatcactgataggtgcagccctaacatgtgtgagcatgatggacgctgctaccagtcttgggatgacttcatttgctactgcgaactgacgggctacaagggagagacctgccacacacctttgtataaggaatcctgtgaggcttatcggctcagtgggaaaacttctggaaacttcaccattgatcctgatggcagtggccccctgaagccatttgtagtgtactgtgatatccgagagaaccgagcgtggacagttgtgcggcatgacaggctgtggacaactcgagtgacaggttccagcatggagcggccattcctgggggctatccagtactggaatgcatcctgggaggaagtcagtgcccttgccaatgcttcccagcattgtgaacagtggatcgagttctcctgctacaattcccggctgctcaacactgcaggaggctacccctacagcttttggattggccgaaatgaggagcagcacttctactggggaggctcccagcctgggatccagcgctgtgcctgtggtctggaccggagctgtgtggaccctgccttgtactgcaactgtgacgctgaccagccccagtggagaactgacaagggactgctgacctttgtggaccatctgcctgtcactcaggtagtgataggggatacgaaccgctccacttctgaggcccagttcttcctgaggcctctgcgctgctatggcgatcgaaattcctggaacaccatttccttccacaccggggctgcactacgcttccccccaatccgtgccaaccacagcctggatgtctccttctacttcaggacctctgctccctcgggggtcttcctagagaatatggggggcccttactgccagtggcgccgaccttatgtgcgggtggaactcaacacatcccgggatgtggtcttcgcctttgatgtggggaatggggatgagaacctcacagtacactcagacgactttgagttcaatgatgacgagtggcacctggtccgggctgaaatcaacgtgaagcaggcccggctccgagtggatcaccggccctgggttctgcggcctatgccactgcagacctacatctggatggagtatgaccagcccctctatgtgggatctgcagagcttaagagacgcccctttgtgggttgcttgagggccatgcgtctgaacggagtgactctgaacctggagggccgtgccaatgcctctgagggtacctcacccaactgcacaggccactgtgcccaccctcggctcccctgtttccatggaggccgctgcgtggagcgctatagctactacacgtgtgactgtgacctcacggcttttgatgggccatactgcaaccacgatattggtggtttctttgagccgggcacctggatgcgctataacctacagtcagcgctgcgctctgcagccagggagttctcccacatgctgagccggccagtgccaggctatgagcctggctacatcccgggctatgatactccgggctatgtgcctggctaccatggccccgggtaccgcctgcccgactacccccggcctggtcggcctgtgcccggttaccgtgggcctgtctacaacgttacgggagaggaggtctccttcagcttcagcaccagctccgcccctgctgtcctgctctacgtcagttcctttgttcgtgactacatggctgtgctcatcaaggatgatgggacccttcagctgcgatatcagctgggcaccagtccctacgtgtaccagctaaccactcgaccagtgaccgatggccagccccatagcatcaatatcacccgtgtttaccggaacctcttcatccaggtggactacttcccactgacagagcagaagttctcgctgttggtggacagccagttggactcacccaaggccttgtatttagggcgtgtgatggagacaggagtcattgacccggagatccagcgctacaacaccccaggtttctcaggctgcctgtctggtgttcgattcaacaacgtggctcccctcaagacccacttccgaacccctcgacccatgactgctgagctagctgaggcccttcgagttcagggagaactgtccgaatctaattgcggagctatgccacgtcttgtttcagaggtgccacctgagcttgatccctggtatctgcccccagacttcccctactaccatgatgaaggatgggttgccatacttttaggctttttggtggcctttctgctgctggggctggtgggaatgttggtgctcttctatctgcaaaatcatcgctataagggctcctaccataccaatgagcccaaggctgcccacgagtaccatcctggcagcaaacctcccctacccacttcaggccctgcccaggtccccacccctacagcagctcccaaccaagctccagcctcagccccagccccagccccaactccagccccagcccctggcccccgggatcagaacctaccccagatcctggaggagtccaggtctgaatgagtcagaagggcttctgggaccaattccagctcctgacattcccccagtcctgcctctcccccatcctatcagggacatttggctcctcttagctggctctgctcatccagaggatattcccccatcccccccccatcaagtttggtgggcagagctacagatgggacccaagggagtggccgagcctcactgcctaaaccaatgcccttctcatccctgtttccccaggctcctggctgtttatctgccccaaaggagaagcctcatggggttgacataggtcctttctgccatctctgttccagctgctgtcagggattaacaacagagtgtaggggagattaactgcctcccttccaatagacactatcagcagggacagatgtgtgggagtgcagggctgcagagggtatggggggaggaggctgctaaaccctatcccccagcctcccccctgccctgaagatcttccatttgcttccactcagctggaggctcaagagggcttgatggctgtcccctgcccccctccttttgttttgtacacagagaccaagaggcctcagtttagcaccttagtacctccgctgcttcacttgctttagccaaagccataaaaaacctgcaacgtagagaaaataatgcagataccctgactagccagccctctactcctccaaccttttccaagatatgcaatggcctttgtgcctgcccaaaggcttcgcccctccagtgcatgaggaaccctctttcctccgctcagagatgctgcttcatttacccaggaggtcatattctttatatatattttttgttgcaaagtgtctctctagagaaactctatatattattcgaatttttaaattatttgtttatatataaaagaaaagctcaattggcaaaaaaaaaaaaaaaaaa

SEQ ID NO: 280 - DNA, 1991 bp, Homo sapiens
cacgcgtccggctagaaacattcttgtggagatctcctgtccacacctccaagaatccctctaagtaaacacctagaagtaaaattgctttacacaataccactgtttgcagagtgctttacaaataaccactgtttccaaaagcaaatacactaattggcacacacacacagcagtacataagggttttgattgctccatatcagctgagcccttgatattgtcagacaacttggttttcctcagtttgatagatatgaaatgttatatcctatgcttttaatatgtacttcttatatatttttaggtgcttattcctcactcatgcttccaagaagtacctgttaacattttttgccatagttttaaaattttcattttgtcctttcctcatggatctataggaatgctttatgtattcaggattctaacattttgtccattatatattttacatatatctttgccaagctggtacttattgttttacttttattatgctatcttttttgatatacacgaattattaacaatatagtcaatttgatttttaacgtttacattggtcagtctttccctttatggtttacgctttttgtgtcttgttaaagacatctttccaggaacagcgtgaggaggacagaagcacccaacaggactgctcaagccacctgcgaacactgctgctaccatgcccaagagaaaggcaaaaggagatgctaaaggtgataaagcaaaggtgaaggatgagccacagaggagatcagctcggttgtctgctaaaccagctcctccaaaaccagagcccaggcctaaaaaggcctctgcaaagaagggagagaagcttcccaaagggagaaaggggaaagcagatgctggaaaggatggaaacaaccctgcaaaaaaccgagatgcctctacactccagtcccagaaagcggaaggcactggggatgccaagtgaaatgtacatttttgagagctctgtacttatagtgactctactgtttgaaatactatttttttaaatcaagttttataaaagtgtagaattttggcttttttaagttatgttgttagcacacaggacacttccttgttgtcttttgtggaaagggcaagtaccactaatagggtgtatctcagaaactgaattgaaataagggaaaataggattttctgtcctggtttttgaagattgttcttgattcccttgattcccaggagagattctctgacattcacgtgtcagccactttggcacggaagccttacagtgtggggaaccaaaacttcgtgtctcctctttccccgatgccatcagcatagacttgacttccttaaaccgagagttttgatgtggccttggcaaccctaaaatcagctgtgttaggtaacaaaactcaggctttctgttgatgacatcgagatggtgtcacttaaaagagccaagattcctgttttcagtttgtggattcatcctgctggttttactttagtccctccatgtcaaagtgggcctgagaaaagctcatacatgcctcatgtgaagtgtccaccctctctgaaaatctttcttgttcaaaacagcaacgacatatcttgttaacttttacggtgacttttggaggaggggagtttggaaattgtaaaatgttatagattgttgcctatttcctgctgaaagtaaatgtttttaaaaagtatcatataaagctgaatacaaattggtttggggggagatcctttcctacccaaagtcataaatatattctttactgccttgtggaaattttatagttttgcctttcacatttgtctttagtctgtcctgaactgatttttgtgaaaattatgagttagaaattcaacttaacatttttcatattcgaagtggttgtctctgcactatttactgaaaagttcatcctttccccagtgatttgtaacactgcctctttcataaattaaatttttgtgtaaaaaaaaaa

SEQ ID NO: 281 - DNA, 2207 bp, Homo sapiens
actgacggccggccggcttcccggaactggaaggttacattgattacccacctagtacaacatcttacgggaagagcatagtatttcctagaggaatatgaacataacaggaaggtatcattggctctgaattaaatttgaacttgtcccctgaatagctacaggttttggaagctgaatcaatgttatcagatgagttagaatccaaaccagagctcctggtacagtttgttcagaatacgtccatcccattgggacaggggcttgtagaatcagaagctaaagatattacttgcttgtccctccttcccgtgactgaagcctcagaatgcagtcggctaatgttaccagatgatactacaaatcattctaactcctccaaggaggtcccttcctcagctgttttgagaagccttcgggtgaatgtgggtccagacggagaggagacgagagctcagactgtacagaaatccccggagtttttgtccacttcagagtcttctagcttgttgcaagatctacagccaagtgatagcacttcttttattcttcttaacctaacaagagcaggtctgggctcttcagctgagcacttagtgtttgtacaggatgaggcagaagattcagggaatgatttcctctccagtgagagcacagacagtagcattccatggttcctccgggttcaggagttggcccatgacagtttgattgctgctactcgtgcacaactggcaaagaatgcaaaaaccagcagcaatggagaaaatgtccaccttggttctggtgatgggcagtcaaaagattctgggccccttcctcaagtggaaaagaagctcaagtgtacagttgaaggttgtgaccggacatttgtatggccagctcactttaaataccacctcaagactcatcgaaatgaccgctccttcatctgtcctgcagaaggttgtgggaaaagcttctatgtgctgcagaggctgaaggtgcacatgaggacccacaatggagagaagccctttatgtgccatgagtctggctgtggtaagcagtttactacagctggaaacctgaagaaccaccggcgcatccacacaggagagaaacctttcctttgtgaagcccaaggatgtggccgttcctttgctgagtattctagcctccgaaaacatctggtggttcactcaggagagaagcctcatcagtgccaagtctgtgggaagaccttctctcagagtggaagcaggaatgtgcatatgagaaagcatcacctgcagctgggagcagctgggagtcaagagcaggagcaaactgctgagccactaatgggcagtagtttgcttgaagaggcttcagtacccagtaaaaacctggtgtctatgaattcccagcccagccttggtggagagtccttgaacctaccaaataccaattctatcctgggagttgatgatgaggtgcttgctgaaggatccccacgttccctgtcttcagtgcctgatgtgacacatcacctggtgaccatgcagtcagggaggcaatcatatgaagtttctgtcttaactgcagtaaatccacaagagttactaaaccaaggagatttaactgaaagacggacatgagcgtgggtgctgactcctggaagagcaactctatctgatctcaaaatgcgtatactgggaacaggatgccttagcccacaacagaaccagaatgaatctttgaaggcacaagactctgcttttgccactcttcctctttcctggtatagaagatggatgtaggagagcttcttttctaactaccatctgatcagacaaggaatgaagcaatgactgtgggctgggaaactgtacctacctctcttcccactgcaaatttctgggatagaccaaaagtgaatttgattatgtgttggctgaagttcttcattctgactgttgaggggaggttttcctttgaagagttttcatcccagactcagctgtcttttcacatggatgaaataattcctgctaccaacaacagagcttcaccaggaagttgagttttcaagatgccttgttgctttgaagaagggagtgatgtcaattctcttgttacattctccctttagcaacctgagtaagagactctctgccactgggctgcaaaaaaataaattacttgaatctccccttgaaaaaaaaaaaaaaaaaaaaaaaaaaaaa

SEQ ID NO: 282 - DNA, 1909 bp, Homo sapiens
  misc_feature (1)..(1909): n=a,t,g or c
cggagacggcggagcgggccttgttggcgtccactgcgcggntgcaccctgccccatcctgccgggatcatggtctgcggcagcccgggagggatgctgctgctgcgggccgggctgcttgccctggctgctctctgcctgctccgggtgcccggggctcgggctgcagcctgtgagcccgtccgcatccccctgtgcaagtccctgccctggaacatgactaagatgcccaaccacctgcaccacagcactcaggacaacgccatcctggccatcgagcagttcgaaggtctgctgggcacccactgcagccccgatctgctcttcttcctctgtgccatgtacgcgcccatctgcaccattgacttccagcacgagcccatcaagccctgtaagtctgtgtgcgagcgggcccggcagggctgtgagcccatactcatcaagtaccgccactcgtggccggagaacctggcctgcgaggagctgccagtgtacgacaggggcgtgtgcatctctcccgaggccatcgttactgcggacggagctgattttcctatggattctagtaacggaaactgtagaggggcaagcagtgaacgctgtaaatgtaagcctattagagctacacagaagacctatttccggaacaattacaactatgtcattcgggctaaagttaaagagataaagactaagtgccatgatgtgactgcagtagtggaggtgaaggagattctaaagtcctctctggtaaacattccacgggacactgtcaacctctataccagctctggctgcctctgccctccacttaatgttaatgaggaatatatcatcatgggctatgaagatgaggaacgttccagattactcttggtggaaggctctatagctgagaagtggaaggatcgactcggtaaaaaagttaagcgctgggatatgaagcttcgtcatcttggactcagtaaaagtgattctagcaatagtgattccactcagagtcagaagtctggcaggaactcgaacccccggcaagcacgcaactaaatcccgaaatacaaaaagtaacacagtggacttcctattaagacttacttgcattgctggactagcaaaggaaaattgcactattgcacatcatattctattgtttactataaaaatcatgtgataactgattattacttctgtttctcttttggtttctgcttctctcttctctcaacccctttgtaatggtttgggggcagactcttaagtatattgtgagttttctatttcactaatcatgagaaaaactgttcttttgcaataataataaattaaacatgctgttaccagagcctctttgctggagtctccagatgttaatttactttctgcaccccaattgggaatgcaatattggatgaaaagagaggtttctggtattcacagaaagctagatatgccttaaaacatactctgccgatctaattacagccttatttttgtatgccttttgggcattctcctcatgcttagaaagttccaaatgtttataaaggtaaaatggcagtttgaagtcaaatgtcacataggcaaagcaatcaagcaccaggaagtgtttatgaggaaacaacacccaagatgaattatttttgagactgtcaggaagtaaaataaataggagcttaagaaagaacattttgcctgattgagaagcacaactgaaaccagtagccgctggggtgttaatggtagcattcttcttttggcaatacatttgatttgttcatgaatatattaatcagcattagagaaatgaattataactagacatctgctgttatcaccatagttttgtttaatttgcttccttttaaataaacccattggtgaaagtcccaaaaaaaaaaaaaaaaaaaaa

SEQ ID NO: 283 - DNA, 3574 bp, Homo sapiens
ttttggagagaacccccggcaggaccaaccccgcacccgccagcaccgcggcaatgtccagcaatagttttccttacaatgagcagtccggaggaggggaggcgacggagctgggtcaggaggcgacctcaaccatttccccctcgggggccttcggcctctttagcagcgatttgaagaagaatgaagatctaaagcaaatgttagagagcaacaaagattctgctaaactggatgctatgaagcggattgttgggatgattgcaaaagggaaaaatgcatctgaactgtttcctgctgttgtgaagaatgtggccagtaaaaatattgagatcaagaagttggtatatgtttacctggttcgatatgctgaagaacagcaggatcttgcactcctgtccataagcacttttcagcgagctctgaaggacccaaaccaactaattcgtgcaagcgctttgagagttctgtcaagtattagagtgccaattattgtacctatcatgatgcttgctattaaggaagcttctgctgacttatcaccatatgttaggaagaatgcagcccatgcaatacaaaaattatacagccttgatccagagcagaaggaaatgttaattgaagtaattgaaaaacttctgaaagataaaagcacattggtagctggcagtgttgtgatggcttttgaagaagtatgcccggacagaatagatctgattcataaaaattaccgcaagctatgtaacttactagtggatgttgaagagtgggggcaggttgtcataatccacatgctaactcgatatgctcggacacagtttgtcagcccttggaaagagggtgatgaattagaagacaatggaaagaatttctacgaatctgatgatgatcagaaggaaaagactgacaaaaagaagaagccgtatactatggatccagatcatagactcttaattagaaatacaaagcctttgcttcagagcaggaatgctgcggtggttatggcagttgctcagctgtattggcacatatcaccaaaatctgaagctggcataatttctaaatcactagtgcgtttacttcgtagcaacagggaggtgcagtatattgtcctacaaaatatagcaactatgtcaattcaaagaaaggggatgtttgaaccttatctgaagagtttctatgttaggtcaactgatccaactatgatcaagacactgaagcttgaaattttgacaaacttggcaaatgaagccaacatatcaactcttcttcgagaatttcagacctatgtgaaaagccaggataaacaatttgcagcagccactattcagactataggcagatgtgcaaccaacatcttggaagtcactgacacgtgcctcaatggcttggtctgtctgctgtccaacagggatgaaatagttgttgctgaaagtgtggttgttataaagaaattactgcaaatgcaacctgcacaacatggtgaaattattaaacatatggccaaactcctggacagtatcactgttcctgttgctagagcaagtattctttggctaattggagaaaactgtgaacgagttcctaaaattgcccctgatgttttgaggaagatggctaaaagcttcactagtgaagatgatctggtaaaactgcagatattaaatctgggagcaaaattgtatttaaccaactccaaacagacaaaattgcttacccagtacatattaaatctcggcaagtatgatcaaaactacgacatcagagaccgtacaagatttattaggcagcttattgttccgaatgaaaagagtggagctttaagtaaatatgccaaaaaaatattcctagcacaaaagcctgcaccactgcttgagtctccttttaaagatagagatcatttccagcttggcaccttatctcatactctcaacattaaagctactgggtacctggaattatctaattggccagaggtggcgcccgacccatcagttcgaaatgtagaagtaatagagttggcaaaagaatggaccccagcaggaaaagcaaagcaagagaattctgccaagaagttttattctgaatctgaggaagaggaggactcttctgatagtagcagtgacagtgagagtgaatctggaagtgaaagtggagaacaaggcgaaagtggggaggaaggagacagcaatgaggacagcagtgaggactcctccagtgagcaggacagtgagagtggacgggagtcaggcctagaaaacaaaagaacagccaagaggaactcaaaagccaaaggaaaaagtgattctgaagatggggagaaggaaaatgaaaaatctaaaacttcagattcttcaaatgacgaatctagttcaatagaagacagttcttccgattctgaatcagagtcagaacctgaaagtgaatctgaatccagaagagtcactaaggagaaagaaaaaacaaagcaagatagaactcctcttaccaaagatgtttcacttctagatctggatgattttaacccagtatccactccagttgcacttcccacaccagctctttctccaagtttgatggctgatcttgaaggtttacacttgtcaacttcctcttcagtcatcagtgtcagtactcctgcatttgtaccaacgaaaactcacgtgctgcttcatcgaatgagtggaaaaggactagctgcccattatttctttccaagacagccttgcatttttggtgataagatggtctctatacaaataacactgaataacactactgatcgaaagatagaaaatatccacataggggaaaaaaaacttcctataggcatgaaaatgcatgtttttaatccaatagactctcttgagcctgagggatccattacagtttcaatgggtattgacttttgtgattctactcagactgccagtttccagttgtgtaccaaggatgattgcttcaatgttaatattcagccacctgttggagaactgcttttacctgtggccatgtcagagaaagattttaagaaagagcaaggagtgctaacaggaatgaatgaaacttctgctgtaatcattgctgcaccacagaatttcactccctctgtgatctttcagaaggttgtaaatgtagccaatgtaggtgcagtcccttctggccaggataatatacacaggtttgcagctaaaactgtgcacagtgggtcattgatgctagtcacagtggaactgaaggaaggctctacagcccagcttatcataaacactgagaaaactgtgattggctctgttctgctgcgggaactgaagcctgtcctgtctcaggggtaacctgcttacatctggactttagaatctggcacacaacaaaagtgcctggcatccactactgctgcctttcatttataataatagcccttccatctggcagtgggggaagaatacactcttgacattcttgtctcctgctttagaatgctagtgtgtatctatcatgtatgcaatactttccccctttttgctttgctaaccaaagagcatatattttactgtcagttgtctcaactctt

SEQ ID NO: 284 - DNA, 149480 bp, Homo sapiens
aagcttgcatgggtagcatggacagttgacataaaacacagccttaaatcttattttagtcatttgtctgatctttaccacctccaaattgttggcagaagctattagagcaaatttaactgagttcaaatttcacttcctatattctacttattttctgaaaggaggatgaaagaaatgcaaaaacagaagattggagatgagagcagggttagtcacaaacccagttcatatcaagaaccaatgttgagattactgagatctgttgtaattttttaccattcccaatagtaataagaatttttttctcaagaattacttattaaaatatgggcagacatcagtgatagactggataaagaaaatgtggcacataatacacgatggaatactatgcagccataaaaaagaatgagataatgtcctttgcagggacatggatgaagctggaagtcattattctcagcaaactaatgtaggaacagaaaaccaaacagtgcatgttcttgccttataagtgggagttgaacagtgagaacacatggacacagggaggggaaaaacacacactggggtctgtctgtcggggttgggggaaggggaggaagagcattagaacaaatacctaatacatgtgggggcataaaacctagatgatgggttgataggtgcagcaaaccaccacggcacatgtatacctatgtaacaaacctgcacgttctgcacatgtaccccagaacttaaagtataataaaatttaaaaaataaaaaatatgggcagaatgtgtagcaattttctagcctcagctcctgcttattcacccttattataaattaatgcaggtaaccgttgcccacatcaatgctactgcaaagaatgccgctgatgataaactgcggcagagtctccgcagatttgcaaatacacacactgctccagccacagtggttcttgtgtcaagtaagtacagaaacatctgctaatttcagctaaactcactgtgtgggaaattatcatagaagccagcaacatgtgaaagtaaaatgtatccccaaagaggctgaagtacatgagacatgtttatggttattgttgagaactgtttagaaaaaaaattgggtctaggtggatttctgtatttcctccttggaacttgagttattgtgggaccaggtttattttttattttatttttttgtttatttattttgagatggagtttcgcttttgttgcccaggctggagtgcgatggcgcaatctcggctcactgcaacctccgcctcccaggttgaagtgattcttctgcctcagcctcccaagtagctaggattacaggcatgttccaccacgcccagctaattttgtatttttagtagagatgggggtttctccagttggtcaggctggtctcaaactcctgacctcaggtgatccaccctcctcggcctcccaaagtgctgggattacaggcgtgaaccaccacgcccggccgggaccaggtttattaaagaaaaatgtgatttttttttttttttttaccttgtgctcagtattaataatttttaaagtttaagttaattttcaaatttgagtctccccaacatatttgctcctttttaatactgaaagtaacatatgtgtcttggaattcttttggtaagattgtcttacattcttctgatgtgaaacgtgtttctttcctaagaaacgggggaagcaattttgaatatagtccagcctttcctttcttctcagtgggtgtcaatagagttgtctgtctttgtcaagtgtttctaatgtttggggatggggttggtctgtaccttttctttcagctgatgtcaattttgcattggaacttagtgacctgagacacaggcatggtttccacattattttggtccataaaaaccaggcctcagaagcactgctgcatcatgctaacgagctgatcagatttgaagagttcatttccgacttgccccccaggttaccactaaaaatgccagtaagtgggtttgcgttatttttgccattttccaatattacattgtggaggctgaaagacagcccataataagggggttgccaggcccagatggggctgttctttgtaagaggtgggttagattttgaagtaaggcttagaaaccttcggttcttctcacaaatatacagataattggtatgtatgaagtttgcttttatttatttcaaaatatcatatgaaattgacttgtagatttaccttcccaacttgccagtgtcttcaaagctagcagtgttttgtgtcaggtggatagaaataacggattaaaagtcatgattctttttgcttccaagtattatgggtagagaatatggcgagggttctcacatacttgtgtggttggcaccaaataagtggagtcaattgtgcatttttttcggtatttaatccttaagcttcagcgggcctctgagtctgtgctttctattgtgcattccctgtggtgcatggacacaattagcaggagtggttattgctccacctgtgtgtagcctgtttatgccatatactgggaggagggtgtgagcacatttccaggactagcatttctgatagacttgacttgggataagaatgtttattgcagtgctgggctgtgtttaagccgctggcgaatatgtgtgtaactctgaaagaattaatgataatggagaaggagccatggtgtgggtgatccaggagagtgggcaatcccatacgttaaatgaaagtcttcacatataatttaataactgagagttacagaagtacgttagacatgatctcatgcaaagtcttcatttaagggagaaagaaatcagctcttagaaaaagtaaacgtgtcattggtgattgcagcagttaagagagtgggccccgggtatcctgattccggcacttgcctgctagtcacctgtgtccccgatacccaacaagccccctgcggtctggcttaagttgaaactcatgctatggacagttgagagttgtggataccagaggcttacccagggagtaagcatatacaggccttaccttaatcttttgaggctctttcctaactcacctttgtcattatttgtttttagtcacttggctgtagttacatttcttcccttctgcttctgtttgacggtcacttttctaactttgaaggccttatgtaaatacggtgttttttcctgggaggtgaaggttgcagtgagctgagatcgcgccactgcactccagcctggtcgacagagcgagactctgtttcaaaaaaaaaaaaaaaagtaaatgtagtgttttaggtaagaacttgcccactttggagattcttattccttatggttaaaaaaaccaaaacaatgttttgataattcaaaccatttagttttgctggatgttttttcccatccactagagtgataatttaagatacatttctttttatgttctttagtctgttcctttaattttaataaattaaacatacattggtactgcctgggttttgagtcccaggtgtaataggaaaagtgtagattttgttgataattggtcagtacccctcaaataaaaagaaaagcctctgattagaaaagtatggtgtgggccgagtgatgtggctcacgcctgcaatcccagtactttgggaagctgaggtgggcagatcaccaatcacctaaggtcaggagttcgagaccagcctggccgatgtggcgaaaccccatctctactaaaaatacaaaaattagccaggtgtggtggcgggcactggtagtcctagctgcttgggaggctgagacaggagaatcacttgaacctgaaagtggaggttgcagtaagccgagatcacaccactgcactccagcctgggtgacagagtagactgtgtctcaaaaaatctaaaaaaaaaagaaagaaaagaatagtatggtatgatcattgtaaaaacaaacaaaacacaatatttagaaatgtggaaagtgaaaaccccacaattctaccctccagaagtaaccactgttaatattttggtattgccctccagatttaaaaaatgtacgtttaaaaaaaaatgtgtcacatatacagtgttctgtggcttttggaaaaaaactatgtcagagcttggatgtcttttcatgttaatatatattaatataaatctgccacattttaaaaaccagaactttggtttgaaaagtacttgtatggctggtctttatttaaccagtctacctgttagtggacattttgtttatacccagttttgtgttttgttttgttttttaccatttccagcaaggtaatttatatctttaggctcctgggctgacataccatagggtaatttccaaggcataagagttctgggttagaactttactagcaagatccatgtcttcctccaggaaggtggtactaatttacactcataagagtgtctgttttaaatgtttgccaggccagtaagtgaaaaacagcatcatcttataattgacttttaatctttaacacagtgcaaaatatccttttatgattatcgttgtttgctttttatttcttctgtaaattgttcacatcctttgcctgttgttagtgatttctcttatggtttctggatttaaccctttatataattatcttaagttttctcctggtgctttaatggttctgctttttaaaatattattcttatttaaaaaaaatttttttgagactctgtcacccaggctagagtgcagtggcgtgatctccgcttactgcagactccacctgccgggttcaattgattctccttcctcagcctcccgagtagctgggattacaggcgcccgccaccacgcctggctaattttgtatttttagtagagagggggtttcactgtgttggccaggcttgcctcgaacttctgacctcaggtgatcacccgctttggcctcgcaaagtgctgggattacaggcgtgagccaccgtgcccagcctctggctagttttttgtagacgaggtttcaccatgttggccaggctggtcttgaactcctgacctcaagtgatccacctgccccagcatccctaagtactgggattagaggagtgagccacaatgcctggcaatttttaaaaatttttaatagagatggggtctcactgtgttgctcaggctggttttgaactcctgggctcaagtgatccccccgcctcggcctcccaaagtgctgggattacaggcatgagccaccatgcctggccagttcgttcgttcgttcgtttgttcgttctttctctctctctctctcttttctttctttttctccagttctacttccttctttctttctttcttttttttttttttttcacagaatctcgctctgtcgcccaggctggagtacagtggtgccatctcagctcactgcaacctccgcctcctgggttcaggcaaattattctgcctcagcctctggagtagctgggattacaggcgtctgccactttgctcagctaactttttttgtatttttagtagagatggggtttcaccatgttggtcaggctggtcgccaactcttgacctcaggtgatccacctgccttggcctcccagagtgttgcgatgacaggcgtgagccactgtgccaggccaagttctacttcttaatacataaatttcaacttatctggaagaattatgactacccactgccaaataaaacttccagcctaactactggcaatctgctgttgaagctgaacaggctctaaattgttgggttttaaaaaaatttttgtttacttaagcctatagctcctagtattcccaggcattctcctatgcaaaaaccaaccaggactgaccctgctcaccttctggctctataagttattattcagcagacctgcagaataaatagacttttaaaaaacaacttcgttgagatatgatttacatattacaaaattcagctcttttaagtgtacaataatttttagtaaattgagttgtacaattttagaatatttttgtcacctcagtaaatctattatgctaatttataattaatccccttccccactcccaggcactactaatctttctgtctctgtagatttgtattttctggatgctttatagaaatggaatcatatagtatacagacctctgtgcctagcatattcttttttatttttattttttgagacagtgtctcactctgtcactcagagtggagtgcagtggcacagtcactccagcctcaatcttcctgggctcaggtaatcctcccacctgagtagctgggactgtaggcatgcaccaccatgcccagctaaagcatattctttaaaacaatattcagttactttgtcaacactaaataatttaccctctcccatctaaatcactgtcatcttctcttcaaagttgttaactgaagtttggaggtcacccattgttcttattttgaaattgaatgtgtgcccttgaattaacctgacgtaacacttctttcctctgtattagcagtgccacactctgctctatgtttataacctaccagcaaataaggatggcaagagcgtcagcaacaggctcagacgcctgtccgataattgtggtgggaaagtgctgagtatcacaggctgcagtgcaattctccgcttcataaaccaagatagtgcagagcgcgctcagaagcgaatggaaaacgaagatgtctttggtaataggatcattgtgtcatttactccaaaaaatagagaactctgtgaaacaaagagttcaaatgcaattgctgataaagtgaagtctcccaaaaaacttaagaatccaaaattgtgcctcatcaaagatgcaagtgaacaatcttccagtgccaaagccacgcctggaaaagggtcacaggcaaattctggatctgctacaaaaaatacaaatgttaaaagtttacaggtaattttgatacctcttgctttctgaagtttatggtaggtttggtttgtttctgtgttttacgtgcccgcttgcttttggcgtgtccctttttgatttcagtgtttgatgatactcaaagtcaatcgttttctgtaaaggatctaacacatcttgggtacttaaaatttaaaccccactgtgcttgtgtctttgaaggagctgtgccgcatggagtcaaaaactggtcatagaaacagtgagcaccagcaaggtcacctgaggctggtcgtacccactcacggtaactcaagtgctgcagtgtcgacgccgaaaaactcgggggtggcagaacccgtttacaaaaccagtcagaagtatgtgaaactactctttctcatagctgcttcttgaatgtgaaggaagacatatgaccttttgccttcaattttccccttctgttagaaaggagaacctcagtgcccgaagtgttaccagttctcctgtagagaaaaaagataaagaggagactgtattccaagtgagttacccgtctgcttttagcaagttagttgcatccaggcaagtcagtcctctgctcgcatctcagtcttggtcttctaggtgagtccagcttcttgacccatgggggtggttacatgtaataggaaggattatgaaatagtatgtttgttgaaaagaattcagatagtactgaaatgcacaaagtaagtctcccatcactcttctgccagtccccctctcctcaggtaatcatcgttaacatttaggggcaatgctttcaccatttcttcttcctccatctggaaattgtggtaagcagaggtcagaaagagaagcctgttggagagtccctggccagtgcaggggggcatgtaaagatgtccctatgttcgctgtgttgaggaaaaagcccaaacgagccgtgcattggtggttctgattcatatggttctgtataggaagctatttggaagtaaagttttctgtaaaccatggtaattatttatcactgtctctcacaccaaggaattcttgatgcttgggagacagagaagccgtaaggccgtgttgcattcccatgagctccttttagcattgtgtttgttctgctgagttggtggcagatcactgtagaaagtgactatggatcagccgggcgtggtggctcacgcctgtaatcccagcactttgggaggccgaggcgggaggatcatgaggttaggagatcaagaccatcctggctaaccggctaacacggtgaaaccccatctctactaaaaatacaaaaaattagccgggcgtggtagtgagtgcctgcagtcccagttacttgggaggctgaggcaggagaatggcatgaacctgggaggtggaggttgcagtgagctcagatcgcatgactgcactccagcctgggtgacagagcgagactccgtctcaaaaaaaaaaaaaaaaaaagagaaagtgactatggatctataaaattacatctaaaaagccacataaaagttttccttatgtgcagaaagaactgtaacatgtaggcaagaacgtttaactctttcagagacacagaggaggttagacgccttaaattggtatcacaggctgatttcctaaggataatgcacaaagcagaaggttaattcatcaggactgcctctaattcctgcctttagctttaacccaaaggaagaatatatattaattggttggcggtaattaggggtcagtagatagtacttttgacaatgtctgaaatcaatgtgtatttaagattaaaaacacagctgggcacagtggctcacgcctgtaatcccagccctttgggaggctgaggcaggtggatcacttgaggtcaggagtttaagaccagcctggccaacatggtaaaaccccatctctaccaaaaataaaaaaaattagctgggtgtagtggtgcatgcctgtagtcccagctactggggaggctgagacaggagaattgcttgaatccaggaggtggaggttgcagtaagccgagatcgtgccattgcactccagcctgggtgacagagcgagactctgtctcaaaaaaaaaaaaaaaaaaaaaaagattaaaaacacatttgaaaaccaaatgtttggtttggttgtgttgtggaaaatctgcttctgtatatagtttcaaacaaagcctaaatgataaaatctaaatatacagaacagttttttaaaataatgtcaatatgtgtgttttaagcaggagtatgtctccaaaccttttaaacagagcatccccgcttgctttcaacattgcaaattcgagcagcgaagccgactgcccagacccatttgcaaatggtgctgatgtccaagtcagcaacatagactacagattatcccggaaggagctgcagcagctcctgcaggaagcatttgccaggcatggcaaggtaactttttccctcttgtgcttgctttgttatactctctgatggagtctctagtcaagaggacctaatttgatatacataaccacagccgggatagaagtgtgactgaacaagtttgaactccttccttttccctttggtctgctcagggtggtgctataaatccagtttttacaatgttagccccagagagcaagacgcctagcagtgaaaagctcttgtcttaggcagaaattgaaatggcaatttgtggccaggcatggcggctcatgcctgtaattccagcactttgggaggccaaggcggccagatcacctgaggtcaggagtttgagaccagcctggcgagtgaaaccccgtctctactaaaaaaaaattagccgggcgtggtggtgcacgcctgtagtcccagctccttaggaggctaaggcaggagaattgcttaaacacgggaggcagaggttgcagtaagctgagatgacgccactgctctctggcctgggagacagagtgagactccatctcagaaagaaaaaaaaaaaaaggcaatttgataagtaaaacattgatggatttcagttagctcttcctgctgaaatacaggtaggattctaaaataatgttggctggtcttgtttatgccttattatatttgactcattttttaggtgcaattttgctaaaaatgcacctttttagtagattcttaaaaatggccatgtcctgggttttgtagagtctagaaaagaccccaaacactcttcccatgtgttggcctctgagcctgccttggaaacctgtgtgtgccagagcacacaggcaggccgggccagtgtcacatctctaaaggtcaccctatcctcactttcttacgtcctggtcagcagaagagcagagttcagacatactccttcatggaagcgctgcagtcgacaaatgtgttccttcatggttcaccttcagttttaagacgacagggttctgggcggacatagcgtttagttttcgcttttcctgttgtaggtgaagagtgttgagctcagcccccatacagattatcaactcaaggctgttgtgcaaatggaaaacttacaagatgcgatcggtgcagtgaatagcctccacagatacaaaattggcagcaaaaagatcctggtctcacttgccaccggggctgccagcaaatcactctctttactgaggtaagaaacaagcaagctgtttatttcaggaaataacatttgacccagaaacaattttagaaataataaaaatagattcaatcacattcccacccccttgtgatgattgcatgtggaataatgcttattctagattgatacagttagaaacaagccatttgactcttgtctaagtcattaatcaaagctggaatacagcttaaacttgacaggcacttgggagtaaaataatacgcaacatgttcaaataggttctaaaaatagtagacccctacaataaaagtttataagcctgaaaagtctaaaatattaccttgagatcttaggtagaaggtagatttgtgtgtaaagactagatctacaaatcttcaagctctccatttgcagatatatccttagtgtcaaatagatactcagccccataagtctaccttaagactatctcagtctcaagcgtctggtgatggttttattcatagtaaaatgtgatacttctttgggtctccctgtttcggggagactggcaaaacaggacccactcctgagtgtttccttggatgatcagagatcttttttctaacttgtacttcactattacttaaattacgagttacgggttttttttttgttgttgttctcagaataaaaatgatgcttattgaagaaaatttggaaagtttagaaacataaaagaagcaggggaaaaaaaaccatccacaggcctatggcccaaagccaattgcacttaacagtttggcatcttcttttagttttgtttggattttttccctttgagcgttttttggtgcctctggttttttaaaactgtagttgagattatgttgtattcagttgtgtatccttatctatgggaacgccaatcacatatatctaacaaactgcagtgtggcaggagatatttaagctcttctcccttttgctctgaattcatcatgcttttctgctccactggtgtggaaaaccctatgattgatactaattctactgtgtaacgtaatcttctttcattgccttgtccctaaaatcctttctttaaatttttctggaaaatacattctgacataccagaaatccgtaaatttattttgcatatgcactgggttaattttatgaactctgtttatataacttgtaatatggaggaaatggtctgttccctaatcaaacttctgttttacagtgcagaaacaatgtctgttcttcaggatgcccctgcctgttgcctgcctctgtttaaatttacagatatctatgaaaaaaagtaagttaggtatattttttctttatccagtcagtactgattggtggcttacatgcacaaaaccatggtaatgactcttgaggaacttcagcctggtagaggagaggagacagagacactggcattcagatttacatgtcaatgaatgtttagcagacagttttaaaacgtcttttatttttaacaaagttagacctttggtcctcagtgttgtgcttatttttcccctaattgactagctttagtttgttttttttgtttgtttgtttgttttttaatttttttggagacagagtctcgctctgttgccgaggctagagtgcagtggcacaatctcaactcactgcaacctctgcctcacaagttcaggtgattctcatgcctcagcctcccgagtagctgggactacaggcatgtgccaccaagccttgctaagttttcgtatttttagtagagacagggtttcgccatattagccaggctggtcttaaactcctgacctcaagtgatctgcccactttagcctcccaaagtgctaggattacaggtgtgagccactgcgcctggccaagttttagtatttattggatgaacatttttaagcactagactataagctccaggacagcagggactagctctgccataatactgtatcctaagcacccagcccatagtagatgcttagcagggactagtgagtacaagaccaaggcactgcagagaaggcagaactgggcaagacttaggtcttgtccttgaggagcttatgtctagcgggaagagaaaatgctcgtgaatccttatggacagtgaagaaaactgattggaaaggaggagaaaaagctttgagaacacagaggaagggaagaacaaggaacttggccattatcccacaggtaatagggagccactgaagtgctggaggaaggaggggaggggaaaggtgtggtgatgggaatcatgctgcaggaagactcttctcgtagcagtggtgtctgagagggcaggaacaggggagagaaggaggcagagagggaaagtagctacatcagtccaaattcagagcagatactgttgggacagaactcgatgttacagaaatgtcaaaatgtcaaatgtcattgaaactagagtgggtaactaattttttttattaaaaacaatttttattgagccagggtctcactctgtcacccagggtgtagtgcaggggcacgaccctaggtcattgcagcctcagactcctggactcagatgatcctcccatctcagccttttgagtagctgggaccacaggcatccgccatcctgcccagttaatattttttaatttttgtaatgagggggttttgctatgttgcccagggtggtcttgaactcctggcttcaagtgattctccctcctaggcctcccaaagtgctggaattacaggcacgggccaccacgtccagccagagtaactagttttatgtagcaagcaaggtaaaagggagaggtcattttgattctgagtgttttgccttgcatgactgggatgatggttgcacagttaaactggaaatagggaaataaagcatggcaaggaggtacagcaagtttttggtcttggttttggacattcaggttttaggggccattggagtagctgggtggagaggtcacatagtcttctgcacattgagggacttctttgggagagaagtaggctctggagatagggcagtcatttgcctttaagacgattgggacagactagagagcagataaggttgggagggggaaggagaaatagagggcaggaatggatggaatgccaccagggccagggatgtgggcgagcacccaggatgtgtgccaagagagcacatcaggaatggggggatccaaggccatgaggaaatgcatgaggtgtggggatgaggcagaggccgctgataacttttgagtcatcactacagagtcctgtggctaaaatccagtagggaaggggctgagagactcgggggtaacacagcagaagcagctcctgagcagctggatgtttccattacagggacagggtagagtacgagactgagaatgagagtacaagggagagtgtgtctctccgggaggtggaagaggaccaggggctggtttggtagatgggaatctgagcatatgtaggacactgggaagaaaacactggtcagacagtgagaagaccagggaacacttactgagcacttactatgagccaagttctgtccaggcctaaccacacttaatcctcacattgaccctgtgagataggcgctatcatcaccccattttacagatggaaaaagtgaggccccgattggtcgtggaacttgactaaggtcacacaggttgaagtggagtcaggatgtgaactcaaatctgccagcctccagggccagtgcctttaagttccaagtaagaaagatacaggtcaggaggagaactggggagtccagtgtcagagggtgtgtggatcatgcagttgaggcataggagagttgagagggtcacggaaagcacatatacttctgagaggggagaatggggatggtgagaagtaacacagagaattggaagtgaggggagctgcatcgagagaggtttccaactcaagagaatttggtgaggtcacttaaagaaactgggcaggggctgggggtggctttcaaatgaagtgagcattgtcatggtcggagccagagacgactcaggagtaccaagcatcactggtttgctagtgaatgaatttgtagtagaattattccagttttacctttgaagagatggaggaaccattcttggttattgttctttatttaaacaggatgcgtgtttctgtataatcaaagaaaaaccttctaagtcagcgtctctcttctcttgcttttaggtttggacacaagttgaatgtgtcagatctatataaattaacagacacggtcgcaatccgtgaacaaggaaacggacggctggtgtgtctcctacccagcagtcaggcccgccagagccccttggggtcttcccagtcacacgacggctcctccacgaattgcagcccaattatatttgaagagttagaatatcacgagcctgtctgcagacagcattgttccaataaggatttcaggtgtgccgttcgttttcctttagaagtaattcttttctataagattgtggaacatgttaggatgaccttgtgaacatcttagaccctgcggaatgtcagcttccaattgtgttctcttttcttcagcgaacatgaatttgatccagactcttacaagattccttttgtgattctttctttgaagacatttgcgccccaggttcacagtcttctccagacccacgagggcaccgtgcctttattgaggtgaaccatctcaaagcctttgtcgatataatgccctagttctgctttttataggaagcctgccctttctgcccacatctctttacaaataagtactctacaatgcttcatcctcatgtgtttagccttcagtcaaagtacagtcatgcaccacataacaaaattttggccaaccatggactgtatataggacagtggtcccataagattataatcacatattttcactagacctttcgatgattagatacacaaataccattgtgttatagttgctcacagtgtgtagtacagtaacaggctgtccagatgtgtagctcgggaaccatgggctgcaccagcctaggtgtgcagtgggccgcagcatctaggtttgcataagtgcacctgatgatgttctcaggtgacagaatcacccagcaacacattattgagtacatatccccatcatgaagcagcacgtgactgtttatctgaaatgggatccattcactcagtacttcaacaagaaaatgtgtgtttgcgctacattttagaaacgtaaacgtgaggagggcagattcttccacagaggggagatgtatcataagtgctgcagtcgaaatctccacaagtgttgagagtacacagcttcaaatatgcatacatttcaagacttgtgagagaaaagtattcttcagaagttcatttaatcactccatgagccacaacagtagacttaacacaaaggccaacacaggactcagtggcctgcacgtccctgctgatgtggaagcagacgcgtaactgacttggagcccagttgccctatttttaatccccctcctggaaaactacccagaaaatgccatcagaatgcatcagagaggccagtgcctcagtgcttgcctccctgggtccttaattttaaccttcaaacctggtggtgggcattcagacaaatgattaacacatacattaaaccaaagccttctgtttagcaagcgcctccttttctgttattttgatttaacctttcctttttttgttgttttttcctatttcagctttccagattgttacattgcagagtttggcgatctagaagtagtgcaagaaaaccaaggaggtgttcccttagaacacttcattacctgtgttccaggtgtaaacattgccactgctcagaatggcatcaaagtggttaaatggattcacaacaagcccccgcctcccaacactggtaggtgtcaggtattttgtcctggagctaccacctgtccactatgagaccagaggaggctattggcttttattttaaacagcagcacaatttgccaagtgtgaaaacaccatggatgtgtcctttgatcttttgaaaattcctaaaatgcttgaggggttggcgttactggactttgttttattttttatttatttattttttttgagacggagtcttgctctgtcgcctagctggagtgcagtggtgcgatctcggctcactgcaacctctgcctcccgggttcaagtgattctcctgcctcagcctcccgagtagctgggactacaggcaccagccaccacgcccagctaattttttgtatttttagtagagacagggtttcaccatattggccaggatggtcttgatctcttgacctcattatccacttgcctccgcctcccaaagtgctgggattacaggcctgagccacagcaaccggcctagactttgttttttagatagggccttgctgtgttgtccaggctgctcttgaactcctgagctgaagatgtcgtcccactatggcctcccaaaatgctgggattacaggcatgagccaccacacctggccagtttgaaagtaccaacataagctatgtaaaaaatttgaaactcaaatttcacatttacagatccttttagcaacctaattttgtgaagcttttggcttgccagttgactgaccttttaaaaatagtttcaggggctgggcctgttggctcacacctgtaatcccagcactctgggaagctgaggtgggtaaatcacctgaggtcaggagttcaagaccagcctggccaacatggtgaaaccccatctctactaaaaatagaaaaatcaggcatgatggtgggcacctgtaatcccagctactcgggaggctgaggcaagagaatcacttgaacccaggaggtagaggttgtggtgagctaagatcaagccattgcactccagcctgggtgacaagagtgaagctctgtctttttttttttgagacggagtcttgctctgttgcccaggctggagtgtagtggcacaatcttggctcactgcaagctccgcctcctgagttcacgccattcccctgcctcagtctcctgaggagctgggactacaggcgcccgccaccacgcccggctaatttttttttttttctgtatttttagtagagacgggtttcaccttgttagccaggatggtcttgatctcctgacctcatgatccgcccgcctcagcctcccaaagtgctgggattacaggtgtgagccaccgcgcccaggattttttttttttttttttttttgagacggagtcaccctctgtcaccaggctggagtgcagtggccggatctcagctcactgcaagtccgcctcctcggttcataccattctcctgcctcagcctcccgagtagctgggactacagacgcctgccaccacgcccggctattttttttgtatttttagtagagacagggtttcaccgtgttagcaaggatggtctcgatctcctgacctcgtgatccgcccgcctcagcctcccaaaatgctgggattacagacgtgagccaccgcacctggccgaaactctgtctttaaaaaaaaaagtactttcaggtatttgaaggaaataccacttaatgcagatttaccttcgaaagtcattttggtccacgttttggactttgataaatgtgaaaataaatttaaaagaccaaggtatttggacctagacttgggtgagtgtctgagttacgggcatgtcctgagttgcagatatccaaggctgctgcccgtgaacgacactttacttgttgccttcctgtgtatacacacatacttcctcctctttgtccccaacacttttgcttctcccacctcccttaccctacaggaaaaaaggtgaggataaccaaggaattctttctgagtcagcctgctcttaggaatgtgtgtactcaggtttcttacgggacacctcctttcttttccctctgtcttagacttctcaggggccatagattatgccactcctcctttctcctaagccatgagcccacaagcctccactttttattttattttattttattttatttatttatttatttatttatttattgagacggaatctcgctctgtgtcccaggctggagtgcagtggtgcaatctaggctcactgcaagctccacctcctgggttcatgccattctccttcctcagcctcctgagtagctgggactacaggtgcctgccaccacgcccggctaatttttttgtatttatttttgtatttttagtagagacggggtttcaccttgttagccaggatggtctcgatctcctgacctcgtgatccgcccgcctcagcctcccaaagtgctgggattacaggcatgagccgccgcgaccagcaagcctctccacctttctataaagatttccgtttgattacttatacctttttaataggtataagcagtcaagatggtgcaaaaacctgttccttacacccttttatgtcatgctaatcttacaacattatcactttctgtggttttctgggtaacgttttcagctccactatggattaattttgctcttctgggccacctacctgatgaccatttataactttgtggaaaggtacgttccacatgaccaagtttcagaaggatcttggaaatataactagtttctaaactgggagcttcttgtgtactttgacttctgctataaataacactatagtagactctgctttaccttggccgcttaactttgaggattagtgggacagcatttgacagcccgtgaataagttagttagctagttattggactatgagacctgaatatagaaactgagacgtaaagcagctactgtatttggttttgtttgcttccccatgatcgaactcaagccagggactgcagggccattttcccttctttcagctggtgaaatctgtgctttctgtcttatacacgttctttttcttctagacccttggcttctgcgttcgaagagtcctgtaggtaacccccagctgatccagttcagtagagaagtgattgacttgctgaaaagccagccatcttgtgtcatacccatcagtcatttcatcccatcctatcaccatcattttgcaaagcagtgccgagtgtcagactacggatactccaagctgattgagttattagaagcagtgcctcatgtattgcaggtaaggcgtgtcacgggattacttgtttacaggcaggaatgttcctccatggctttggctgcctccatcaaagaaacagtttaattcctaagaagtcagttctgggcagaacatccactaaaaactttcttcagagggcaggaataacacacacaggcggcttctcaatttttcagaacgctgctagtttccagttttagaggaactccttggaggactgaggagtattttccctctaagctctatagaccttcttcatcccagcacagctttctccagaactgttcatgattacaaggaagctcccatgaatagccacatacttgtatgttggtgcctatgtgagagtcaagggcttaacctttcttctaaatttaactagttggagacaagttactgggctagagtgtagcactggatcctatgaagacttttaccagttaactcacagtgttataacagcttcccactcactaaaaacggcttgaaaaacttgtagaccaatttgtctggacaaccaatacagttttcatttctgtactcacgacttttcttttcaaaagattacacttttcatttttatactcaacgactgtttgggagaaggtgtgccaggccaaaaacgataagagtttcagaaggccttggacatttgttccttttgaccaactacattttgttgatcgacatgtgtttcaaattgcacacattctacataaagggagtcatgctctgaggctagtaacgagagggtgagccagcagcaaggaagtcgctgtctgctgaggtcttatgtgtataaataaactatttgctttgcagattcttggaatgggctccaaacgtctgctgacccttacccacagggcccaggtgaagcgctttactcaggatttactaaaacttctcaaatcccaggccagcaaacaggtcattgtgagagaattctcacaggcttatcactggtgagttgatgaaaagaacagaaatgaaagtaaatattttaggacattttatcttctgccaaactctaaatagttatctagtatttctattaagcattcttttggaaaacttgtagtagttttttgtttttttttttttttttttgagacggagtctcgctctgtcgcccagtggcacgatcttggctcactgcaagctccgcctcccgggtttatgccgttgtcctgcctcagcctccagagtagctgggactacaggcgcccgccaccacacccggcttattttttctattttttagtagagacggggtttcaccatgttagccaggatggtcgcgatctcttgacctcgtgatccgtccacctcggcctcccaaagtgctgggattacaggcgtgagccccagcgcccggccggaaaacttgtagttcttctaccgatgatactactcattccgtatccacttccgttgttaaaacctaggtgtttctcaaaggactgggatgtcactgaatatggtgtttgtgagttgattgacatcgtatcagagattccagacacaaccatctgcttgtcccaacaagataatgaaatggtgatttgtatccccaaaagaggtatgtgacttaacatttgctggaaggatattgtctatctcctgttattttaacatagtgtggcatggaagatgtggttttccctccctgtccgtgcttcctgaagattccacagaaagcacagtgtgaaaactgctgctctttggattctgtgttcttcaaagtaggtgaagctgttctcaagaacaaaagcaggctggctttttagaattgactctaaggggaaaaaggggcatcatcagcactttgctcaaatgccttctgcagcctggctgtggctacatgagccttagtcatccagttgagaatctgtcaccgtgcctgttggctttgctcttctgttgaactctgagctactttatttactgtgcacacttgagaagggaagacaactcgaatgtttttttttcttttgcctttcaaattttaatagttgaagtcagaactgcacaggtccagttacgggtagaaagtacagtatttgagggatgcgaaactcatggatactgggggccaatttttcgtgtctgcagtttccgcggggcagaccgcaagacttgagtaggtgcggattttggtatccaggcagggtcctggacccgatcccttgagaacaccaaggggtgactgtatggtcgtatcctccttctattatctggttcttaaacggtgctcctgcagaacattgatgtccatgaaatcatagaattccagggcccattctcacttaaaaattaatagaaacaatctcagcttaagctttccctcctgtttatttttgttcaacttttgaagcctgattctctcttctgctagcaagttttaactgaagatcagatgaataaacaaaaaaagtggggatattcagaagcgtgatttcatgggaataatttctagagtacttgcttaagtacagggacctgggtgtgtgtcatgttaatagatatggggcaggggctagaaaattgtttctagcttataagatgacattgtttctagcttataagatgaatatatatgaatttcataatataataatatcataacttcctggtgttctgccctggaacatgtttgagaaccacttgcaaagagggaagagtatatgtgtttgttttaggttgtgtgtgtttggaaggcaaggatgatatcgtttataaattcccaaaaggatttactctagtgtggatgttgaacacaaatgggtagaaaaaaactgtgattttatgttttttggtttttttaaaagaacgcactcaggatgaaatagaaaggacaaaacagttctccaaggatgtcgttgatttgctgcgtcaccaaccccatttccggatgccctttaataaatttatcccttcttaccatcaccactttggccggcagtgcaaacttgcgtactatgggtttaccaaactacttgaactttttgaagccatacctgatactttacaagtgagtgaagaaattctaattttataaagtatttttctgaacaacgtataggaaatactttttcacgttccagacctgtttttctgggaagtagggagttacgaaagaggatgaaaatctaagctattccagtcagagaagccatattcctgactcattagtatttttagataaatatggctttttccttcaataaaggattattcaaacttgttttgggggtaattattgaaaaaaagattcagtaggttttcttttttttgtttgtttgtttttgttttttgagacggagtttctttcttgtcgcccaggctggagtgcaatggcgcaatcttggctcactgcaacctccgcctgcgggttcaagcagttcacttgcctcaacctcccgagtagctggggattacaggtgcccgccaccatgcccagctaatttttctatttttagtagagatggtgtttcaccacgttggccaggctggtcttgagctcctgacctcagttgatccgcctgtctcagcctcccagagtgctgggattacaggcgtgagccaccacacctgctgatttcttacactgaatatttgttcattacttttatacttttaaaatccttcgtgttgaaggtaggtctgagtacatgaggtaacatcagtgctaagctgttcgctgttgctaagttaaaccaaatttctgttgttgattttattttctttttttactactgaagtgctttttaaaaattgttttattgtggcacaatacacataacatagaacttaccttcgtaactatctttatatctcctgtccagtagtggtcagcacattcacattgttatgcaaccgatcttctgaactttttcatcttacacaactgaaactttatacccattcagtaacgctgacttgttttttcattactagctgcatactttttttgctattctgtaaacacccgtgatttgtttattttccctttcctccccccgtgtgttttcaaaggtattggaatgtggagaagaaaagatccttactctgacagaggtggagcggttcaaagctctagctgcccagtttgttaaactccttcggtcccaaaaagataactgccttatgatgacagatctccttacagaatatgctaaaacttttggttatacatttcgtctccaagactatgatgtcagttccatttcggctttaactcagaaactctgccatgtcgtgaaggtaaatgtttttttttttttttttttttttccctcatgggataaaactcacagtgacctaattctcattaggacgtttgcgtgtgctgtagcgtttctttatttacaccttgaactacttaactgtcacagcattatgactcgttttgtgtcattagtgcttattaggtaatagaagccttggtttggaagttgagagttttggtcttcctcttgtgtgtttctgaatggccttgccaaagcaatgcctttgtgaactgatgaggtcactcttcaccccagggttcggtcatgaggtgcagctgcctcagcactgctggcctgagcttgactccttccagtgtgagttttgcctgtgacgttcttgggagcccgtaatcacacagtgtcctctccctccacattctcacccacttaggagtaggcttaggagcaagcgagggtgcagagtggcctttgtcactggcagagctgtagtagagagggcagctcgtgctgtttgctgtcctggactgcacttgacccttcctgtcctaggcagagcagctgccagttttcggcctcctcccccacaggaccagaagaagtcactgccaggaggaaggaatggaaagggaagcatgaaggacggcaccctcagttacaggcccattactagctgcacacatttctgtgtcatttaattccgtaaacagccagaacgggttcactctccctttccttcccactgtggggtttttttggagttggagtcttgctctgtggcccaggctagagtgcagtggtgcgatcttggctcactgcaacctccgcctcccaggttcaagagattcttcttcctcagcctcctgggtagctgggattacaggcgcccgccactacgcccagctagtttttgtatttttagtagagacagggcttcaccgtgttggccaggctgatctcgaactcctggcctcaggtaatccgcccacctcagcctcccagagtgctgggattacaggcatgagccactgcacccagcccccactgttttttaatgtattggactgcagctaagaagacgttcttaccttggcagaggtaggaacgctcagagctctccttaggtactgattggttggaggaggaggtgagagagcaggaagcacaaccaggagagccgaacatccctgagccaaggcagaggaatggccagcagcatcgcaggagggctggtcagagagggactgcctgacttccaggtttagctcagtgggaagagtcggtgctgctggccaggtcagtggcagtgttggttgtgtagacagaagccaccttggagtgtggtgaggagtgaggagaggtgagaaaatggcccaggtcatctggacagcatcctggtttgtctgcttgtgaagatggagggctgtggcagcagctagaggctgtggggctgagggagcaagggaggatttgggctgttggttttcctacctggaaaaacttgagcatgtctgaaagccattgatgtggatctgtctagagagagaagatgaacatacaagggcgagaaggggtaagacaggagggccttgaggtgtgggagactaggaaacagcacacagaggaaggaggaagtatacagggcaataggctgggggcaggcatgggcaggtctgatgtttatcatcaggaatagaagggagtcctcttccaagagtggttttccactagagagagggactgatctctgcttagagagagagaggagaggcagggctcaggacttaggagtggggagaaggtccacagttgtcatggtgagtggagagtggcttgatcaggatgtcacgtggagtgcaggggtatcgagagctcactgcaagttggcaccgtagactctgggagagcagcagttggggtgtggctatgcaggtgtcggttcagggaaagcaggtggttggattcaaggtgggagtttaccgatgggcgtcaggaaaaggcatgggatgagcgaatttaaatattgacaagaatgtcagtgccagcatgacaaaagaggagagtgaagcaagggagtgggctggcaaattgggagcagataggaggcagtgatgctgctgaggtttgagaaggggcggagttgagcgggtagagtctctttctgcactcccaccccaacagcagctccagacttgcttttgcaagtgggatgctcaggaggtttgaatgatttatgttggatggggtaatgacaggtttgcactgtgaccctggagatgggtgtctgcagtgaaattgaacacaggaggatgtcgtcggagatgacagaggcaaggcattgaaaggctatacggctgtggtgtgggacaggtccctgggtgttcagttgcccaggatgatgaaaggggtggactcaggtggataggaagaccccacgccatgacctagggctttgctgggtgagtgtgatgggtgggcagctggggtgtgagcagcaagaatggggagagctgagagaggctccgtggtgcctccctggctgcccactgggtctcctgggagcttctccaaccttacctttcagattcttatagaattagtcccagcacactctgagcattggtgtttttaaaagctccccaggcaattctaatgcatagccgggattgagaatcaagggatggatccaagtcgcaccagaggagcaggctctggtttggtttctttcctaagcagctgtagtgatggtgggggtctgggtggctaagatgactgggatcccctggacttgtatcggttggttgattaaacccgcttctgaggaggaaatctatacagtcccataatcatgataagtagggtgggaccctgccagcctccctcctgccttggctctgggcacatgtcagaaccagataaagatgccctggtcttgggatggctcctcaagtgccacccacctctctctgcctctcagaatccacggtccaaagagtgccaacttgtggtgacttagccctgccaagacctttggccctggcaggaaaaccagataaagggggcaaacaagctgtcaggatgagcattggtttgtgagagcagtgccggagccgtgtgtgtgccaaagctctgcctgtttttgtgccaggaaagctcacgccacagcctcaccctcgccacccacagcctgctggctcagtcaccagatgcgtgtttcttcacatggtgtttggtccccaagtgacaatctctgtcttttttgtaaggtttccctctcagcgcatttaaccgcttaaaccctttatctccttgagaatctgaaataattgaggagtggacagttactagtcagatgaaaataccagctttgtggtgagtaatagcagactagaaaaatgcagcttgccttgtaatcagagtaggccctctctcacctccccagcccgccctggggacgcatatgggcaagtcgggtctgcacagaagccatgtgagtgttgcttagagtctagcctccccatccctaccccccttcgagcacagcaacccacacttcacaagcttggaccactggccatcagctggccagtctgtgtccttcttatagtggggtttggaaagaatgaatgaaaaataaagagaatgatgcaatttcctcccccattattatcttgttgagagttttcagttatggaccggcagggggaggacagtttctgcttccatgttggtctggtgtcccaaagacgctaaaaacaaacccacttgctttatttcagtgtaagagaaaaaaattagagatttttcatctgttggtctcattaaccaaaatgaagtgagctgagttgggtataacctagggtgtctctcttgagctctgaaaagtgtgaattctcgttttccccaggttgccgatatagaatctggcagacagattcagctgatcaaccgaaagtctctgcgatctctcactgcccagttgctggtattgttgatgtcttgggaaggaaccacccatctttctgttgaggagctcaagagacattacgaaagtacccacaacactccccttaacccctgtgaatatggattcatgaccttgaccgaactgctgaagagcctgccatacttggttgaggtaggcacgttaatggctctttagaactatcattgaaaactatcgattgggcatttccggattacctgatggtctagattagagtgtgtagagctggaagggacccgagagaccatttcatggatgaacacgccgagacctcaggcagtgaagcagccctgcctaaatgggtggcagaagccagtgaaagcctggtctcctcatcctggcactggggtgtgtttgtcccgttctaggatgaaagcctggtctcctgatcctggctctggggtgtgtttgtcccattccaggatggatttcgctactgttttatctttctgaatgagatggtttatgtggtggcttgaagagagagatgagtaaggtgagggcagaaaggaaggttggccagccagtcccccaggcagcctttcaagaatggcgctccaagattgagagaatcttaagagaatactgcatgcaattctcgggcgacagatataaaaacctagagtaaataaatgaaatcctggaaaaaataagttaccaaaattcactcaagaagttaaaaattagaccaattaccataaaagagactataaaagatcactgaaatataccagtgaaaaaggcatcaggaccaagtgagataacaattgaatttcaaccaaccctaaaagaacagataaatctaccttttaaaaaaccattctggggcccggcaaggtggtacacgtctataatcccagctactaagaaggctgaggctagagaatcacttgagcccaggagtttgaggccagcctgggcaacatagcaagaacccatccccaagaaaaaaaatactgttctaggctgctgaaaaagaaaaaaggaaagcttaccatttatttttacgaagccaaaataaatttaataccaaaaacataagatagtcccttaaaatgatcctaaataagatattaacaaatgagctccagcaatttaaaagaatgatatgccattatcatctaactgtgggacacatcattaaataatgaaaggatatacatccagcattttctaaactctgttaatatctatcctaagaacaccagttctggacaggtgttaatgcatatttcaggacaaaggactttccctgtccagctaagattgggaatatcctttctcttggcgattccatagcatgttaaacactttgaaaaggtttgtggtaaagaaatctgcttccttaccctgcatacacaagggttttgtgtttgtttcttgttgcttttgatgtgtttttaaagaatgctagtgtcatcctcttatcacagtgtttcttggaaaactggtttggaggtgcagtttaatggccccagtgttcactgtgtgtaccgtgatttgccaacacagtttgcctcccccgatttcttccctactcacacactgtctcttcagaccgctgcagccttcgacttgcaaatagaactgaagtttgctggaggctatagccttctcttggaggaaatccttgaatatatccctcctccttttctttctcctcttccttctttccttcctcctcctcctttcttcttctttgtcttttttgtcatcttcatcttcttcatctttgtctttgtccaattcgtcgtcttcgtcttctttatcgtcgtcttcgtcttcttcatcgtcgtcttcgtcttgtcttcgtcttcttgttctttgtcttcatctttgtcgtctttatcttcgtttttgtctcgtcgtctttgtcttcatcttctttgttgttgtcttctttatctttgtcgtctccttcttcttcgtcatctttgtctccttcttcatcttcatcttctcatcttcgttgccttctttttcttctttgtcttcgtcttcaactctgggccttttccctcagtgggaggccttcactttccacggggcagggccagtcactaatatttctaatgctgcgttttctttttaaccaggttttcactaatgataagatggaagaatgtgtgaagctcacaagtctgtatttgtttgcaaagaatgtgcggtctttacttcatacttaccactaccagcagattttccttcatgagttttccatggcctataccaagtatgtcggagaaactctgcagcccaagacctacggccacagcagcgtggaggagctcttgggagcaattccacaggtgggcatttttctcagcttccgggagagcatcttctgaacagccacaggctaactgtcctgaacagaaaaataaaatgctgccagaataatggaacggcaggcattttgaattgatcctttcaaaacatactgttggtctaaagtaaatgattttagcatttctccttgattctttctgtaaacctttattaaatccctatatgccaggtgagtaagtttcaggctgtaactctagaaaggtgttggttaatgggagagtcaagacccccaagcaggcaactagtcagggcggtcagggcagtgggcgcgctgaggagggccgtgtcagggcccacttcccaagcctggggagcctgttgcaaaaccttcaaggatgtgcctgagggaagcacgtgacaaggaggggagagagcattctgggcaaaggggatgatgacatgagcagatgcagggttgtgacaagtggcatggagtgtcgagaggctaagagggagctgagagctcggttagggagggcgtggctcctccaggtaaggagggaggactgtgttggagagagctggagcccaggtttgcatttgaaaagcaccccagtggtgctgtccatggtagagccgagagaagcaggcatggagaagggaactgggctaggatcctggccactgcagaggtctgggtcagtgttagatggagggattgagccagagtaaaaatagtagaatagaggaagtaggaaggacccaggcaaagcttgcctgggagctgagatcagtgacctggcgacggtgtgcacatgtagggggcctgggagcctagctccactactaccactctgcttggctgagatggagagcggcaccatcagggagaggactttaagatgctgataatgaacttagtttaaagggtctgagagattgctcttaattcttttaggtggttgttcagtttctgcaaaaaaatggcaaagagctctcatgtgagaactaccttaatttatatgccaaagctggtgtttggaagacagtctttttaagaattataaaggatatttctgaaactgtgtctcatgatttttgaactactctgctttttataggggtatgtttctgtcagcttctgttgctttaaaagctaaggagagagtagagaaacatgcttcttggcagtaactcagctcctaaattctagcctaaggcaggctccgtaggtcacactcttcctgaatgttagggcttctgtcccctccttttccgctgcttaaccagtagtatgtcttgtgtgcaggtggtctggataaaaggacatggtcataagagaattgtagtgttaaaaaatgacatgaaaagtaagtaagcacccatcccctccccccttaaaaaatcacggttctctcactgacatttctctctgacgggtgctctttgtcctgtaggtcgtttgagttcactcagtctctcccctgccaatcatgaaaaccagccctcggagggcgagcgcatcctggaggtgcccgaatcgcacacagcctcggaactcaagcttggagctgacggcagtggtaagagaggaaaagcagagacataggagcttgtgaaattctaggagaaacggctttggggtcggggagagcgagggaaaggactccagcaagtcatccaatctgctgaagttacatagccacacatttttcaaagcagttttggtatttagttagtaacaggataaaattgacctttatctgttagcattgcatggttgactggttaaagtccctgaaggatgttggcacccccataatgatcatcttaccccagttcagatgttgaagaaaaaaattattccgacacttattataatggatattcatgacacttgcaacaggggagagagagccaactcccaatacatagcctaggagcagagtgagggctcagtgggtggaaaattactaagaggattcttgctataggcatgcaggccagccaaggatctagacatcagtggttgggaataaggaattcgatcagctgtgaagggtgaggggattctcactaaactgactcaagctaagactctagagcgagccggcaagttcagcaacagacatggaaggccaaggtcaggcctgatccggaagagggctcagggtgcctgactcatggctggtcaaggcgtctttgtcacaggacagccctaggcaggatttgatatactaatgcattaatattacccaaaattacactgagtcacatagatttcagatagatccacctctgtagtagatagaggccaattcttggaatgttatagcagttctaacttttctgaaggacttttgaattcatcgttataggtgagaattttgtcttcataacatgcggcgagatagcacgttaccgtcccctgtgcccttaggataactgagttacacagcatttgacgttttatgaagcgccctcctgggaatcatctgccgaagctgccccacagccttcagcagtgctgacctccgttgtgcagcggaggctcggaaatctcaggcagtcacgtattacagctcacccagagtcagcagctaggaagccacggaaccaggcccagggcttcggattctgagcttccacttgctgttaactacgtacaccccgtctcaggctgtcccttctctttggaagctgactgcaggacccttttctctggttgggtcttttgaggggccagtgttcctaagaacacggatcttcagaagaactagcttattaaggcgttccattaccaggatcttcctgttagtgggttttgggtttttgtttttttttttttttttttttaataccttaaatacttcttgactctcttatctttaaggcttagaaggaaaacttcaggtgtgagcccagggtgtgtgctgggggtgggcgtggaggtcctgtggtgtcacggccctccttgtttgcccagggcccagtcacacagagcaggagcttctccgcctgaccgacgactcccccgtcgacctcctgtgtgcgcctgtcccctcgtgcctgccgtcccctcagctgagaccagaccccgttatcctccaatctgctgatctcattcagtttgaggagcgccctcaagagccttctggtgggtgactccatgttgtcatggggattttcttcggggtttaaaacaaaaccacgatgagatactgatatagtaaatgacggaggtgggaagggactaccccttttcaggtggaaaacactgtgctgattattcgaccttctttccccacctgggttcctgcagaatgggatgcacagcctgaggttgcctggcgagcatcaggcaagggcgatttggcagctctggagggctggtggctcggggctgtgggcgagtccacaggggtgggtggggcctcctgggcttctgctctcccagactttgtgaaggttcagctgctctcaggcacacctgtcaccagatgtacacgtcacccatggtgggggtccagagggcccaagggctttataaaggggtgaatggagggaggtgtctgtggctggagccccggactctgcccagtgatataacagacaggaagctgagcacactgagtcccagcctagtgcaggcattggcactgaccctgtgctcagggctgacagacaccatcacatttaactcttaccacggctccaggtgagagccgtggaataaaggcagctgctttattccacaggctgcgtgactaaggcacagctggtgccgtcactagagaggcagtggccccgggctgctgggctagcaagggcagagccggcattggaacccaagccctcttgtcctgcggtgtctcctggcctctggagaggatggcccatctgccctgtacagatccctccctgctcttcatctgttggaacccaactcctccccactgctggtgctgctttccaggtcaccaggaacaacccgtggactcctggcttggcttttaccatcttggttgttcttggcagcgttcagcactgttgcccaggaaaagaactgaggctgttgacttggaaaataggagatggggaagtaactgcctgcggatagaaccagcctgtgcagtcagacctagaccatgccctgctcctgtgcagtgcccccctagggttggtggcacattgatgttagctcgtttgtggggttgtggcctttgtgccttcagtctgggcaagttcaactgcatgcaccggacaagagaggaaaataattaaaacactgtgggcagttctgtcagccgctcttctcttgagggtcagcctaggcagggagctggctctgctgtcccctctgccactctcaccttccatgggcctttgggagcaggagccctgtgccctatgcagtgggagtctaaggcataatgatgcatctctttcaagcagcgtggccctgtgtgtagagcaggtgaattacatgtggctcagccacagaaatggcagtccagaagcactgtgggaaagctggctgtgctcaacttcctgggttctgagggtaattctcactctgcgtagtccttccttatccccggtaatagacccatggggagcataggtcctctctaaatggagcaggccaggagctccctgacacccagatgctccgaccccaccccctaccacccacggcctcccgcctcaggaagtctctaagtcgtggatagctttatgggtccttaatatctggcaggcagaatgaatgggcagagaatccaaaatggaaaaacaaaaagttttaacctttgctcattcatttatagctcaaaatagagatctttccaactttgtaatccagtgggagaggtgggatgcagtttatagatacttgatttctgtgccaagttcactggccacacaactcatatgtaaactgtggcatagatgtagcatttagaagctttttattactattattatcttttgagaaaatatgagcaaggaagagaaaacccacacttcttacagttcctggatctgaatctgtttgcttttctgtgtttacagaaattatgattttaaaccaagaagaaaaaatggagattccaataccaggaaagagcaaaactctgacctctgactccagctcgtcctgcatctcagcagctgtccccgtgcctccctgcccctcctcggaaacctccgagtcactgctcagcaaggaccccgtggaaagcccggccaaaaagcaacccaaaaatagagtcaaattggcagccaacttttccttagcacctataaccaagctttaactcccatttggaatatagaattaggatgggaaaacactgtctgattctgcacacaaaagtgggtttcaaaaatacatccttttctgtgtcatgaaaaccccccgaagccattgacttcatcttacctgtgttctatcatgtttttcttttccattgaacacagctttgagctgaagtctttcttttcttcttcctttttctttcttttttcaattatttgaagaacttgtggcatttgttaaagaatccttaatatattttaccaaatttttagtaactattatgaaatacaatggtgttccaaaagaagaaagcactaaaaactcaactagcaggaagcggttttgcttccattgagccacgtcggtggtgtcatcctacatgtagcataatagagtctctcagcctttgcttactggtgtttccgacagtattaacccagtgcgtggcatgtctttgaagcaaagcctgtcccgctagcctgtgtgttcacacaccaaaggagaagggtaggcgaggggttcggagtgtattttcaggttggaatgtgaaggttcctggcttccatgtgacttgtaagtgtgccttgttttttatttaaactatgtctgtagttgacaaaagtggcttcatcacaaatttttttaaacgtttctactttggggttccatttaggagctttctagaaagttgaggatgtttgaagcttcccttctgtgttccagtttgatatgggttaggttaaggaaaaggagatggtctcgatgtcatggatttaaagtcagcatttggattacaacacacattattgtgtgtcgagaggcagcattggaaagagcctgattttctaaaatatgcatcaagtgcataaattacaaatcagagctgagtggggaggtgcttcagcagcagcgggatcaatacgatttccactgggaagagacaggaattctacctacacataggaaggccaaggttgatccacttaaccttgttattgtaattttaaagctggtatcggtagctgggaagctttatgtgtgtgtatgtcagctcagcatcttttaatcgtgtctgattttactctcgttacttctcgctgttggaagcatctctgggtttcttgtggcgtctggtgtggaatggccttcctctctaggtgcctgaggtgtccgctgacgggtggcctctcacccccctctagagaaacctgacatttacaatggattgtatttgtccggcaaaaaaggcggattcattcatagagcagaaagaacctgttggcgtaaggtcttccactagttagatggtttcttttggggaaatgtttatatttggtaacttctagaaagccagaaaatggactctgatttcatagcattttgataaaatgccacaaaataagggctatagagagatttttacaagtcagattttttgttccccaaatcttttaaatgaagccagtgactcccagttctcaacacatggccccagtcaagacagaacaccatggaaaaaaccctgtaagtattatggcactctccgaatcctcctgaaggcatttcctctacagacatagtgttacaggaagtgaaatgcaaatgtgcaattttttttaaaggagcttttaaacaaagtaataataattggtgttgagaacatcagttgccttattctaagatttcataaggctgagtttgcacgcttggacttcagttctgctagcatgtaaagagtggtggactttaaaaccgtaagaggtatcattacaagtcacctggaacagactcaaagaacaggttctttgggcaacagacaaagaagaatcaagttctgtgctgtcccgtgagtgtgtctgagtaccattcactggagttgctgcttaggtctgggacgtgtgtgtgactcttaacaattgctgtctgaaaatgagagagaagacttcggaagcacattgtgttcataatgtactccacaatggccagtccaattgctatctatttttttatccagaggcttaattaaatgatgtggtaaaatgatgtttgagcattaagacaatgtaattctttatttctgggtggaaagatataccggattaaatttatctgtttaaaaaaatgacaaaagttatcaccaaaaccccctttcccatcttgcactgtttgttttggattgggtttgggggaaagagatgtttttcttagttgtctactttgtttgaacacttttgttgtggttcaagtgctgttttgtgtgttgggaccaaacagttgtcaataaactttacaagcgagcatctattttgagtttcccaagtgagtggttttgtctgtctgtctgtctgtggggaggaattacaaaccaatacagttctgccatctttcattttgggtctcctcaacttctctccccttctggaaatagaattgtgaggtggagagtaaatccgtctacatcttagaggccttttaaactcagcacacgccgaagcaggtggctggatggtgggcccttcgtcgtcaggatcctccaagttttccagcctttgttccagcttataattacatgtgggaaaatacagtaaccacaaaaaccttccagttagaaaactctattaattcctaggctctctcttcttgtgaaagaaactccagcgtgcccgctgtctcgtttttggtcactgctaagcatgctttttgaataagccaatttggaaaagagttattccacagatacagttgtgaagccctcccatcccctgagaccgccattaccccgtcacccctgccaccagcaccctctggcaagaatttaaaaggacccagaagagacttgagtaaattgcttcttgatgacatttttttcaagttcagcaatgttaaaagctgctaaagacctttccaaacatttcacgatggcaaatttgtgcagaaaaagttgagtagccatcgtgccccttttgagcggcgtcaggaggtcttgttaggtgtggactggggctggaacggtggctttgcatttatctttgtttgtttcccacctaggaaggtgattcagaggtgggggcctagaagacagctgtctgggggagagcagacctgtccgtagcagagggggctgcgctgattgaagaagatctgttccctctctgttccctttgccagaaggagcgttgcgctttgggattcaccttcactttctagctgcttccatgggcagagggtgagtcatggcgcagaagccctcagcggcctccacccacctgctgtccccattgctgggggggggggcggtgggcggcaaaacttcctcaattctcctagtgtccctggctgggccttaaactgacaaagacattaataggaaaaaagcaaacaaattttacttcataccagttttgcgagagtcttcataaggaaatgaagaccccagagaaatggctaagcctgagtggttttttgttttgttttttggttttttgagacagtctcactctgtcacccaggctggagtgcagtggcataatctcagctcactgcaacctccacctcccaggttcaagcgattgtcctgtctcagcctcccgagtagctgggattacatatgtgcaccatcacactggcaaatttttgtatttttagtagagatgaggtttcaccatgttggccaggctagttttgaactcctgagctcaagtgatcctctgggctcagcctcccaaagtgctggaattacaggcatgagccaccacgcctggctgagaacgcttttttttggggggggggggggcggggggaaaagggctagagagcttagaaggtgccaagccagagcaccaagagccagaactttccttagcaagatgaagagaagaatacacacgttccgggaaggaacgccttggaagtgggggagctgaggtgcagaggaagaaggcattgcagggtggaaggggccgttcttagagggaaatcctgctcagtggctgggctgctcagctcctcactccgcacgaggtggtgaaccaaccaggagcatccgcaggggagcagtaccagggccagcagggaacatattgggcctgcttggcaccgtctcttccatccgcctcaggcagctcatgtgatggcctccaaaggcttcccaggtgcagggcctgggcatgagggaacccccgctcctaccacccacctgcccccactgcagtttctggtatcagcaagtgcagacaaatccacactggggctgcagggtcgccgcccttggtatttcagcagccagagtctgatgcatcaagggcaggtgtggcaagaatcaggaaatacattttttttttttttgagacagagtctcactctatcgcccagactggggtgcagtggcacgatctcggctcactgcaacctcctaccgggttcaagcgattctcatgcctcagcctccgaacagctgggattacagatgctgccaccacacctggctaattttttttgagacggggttttgccatgttgctctggctcgtctcaaactcctggcctcaagtggttcacttgcctcggcctcccaaagtgcggggattacaggcgtaatataatatagatattatatatagatatagatatagatgtctctataatatctatatataaatagatatatctattatatataatagagatatatatctatatataatatatagatatctatatattatatatagatatatatctatatattatgtatagatataatatagtcacacagtcaaccatgcccggaacccccaagcccccactttttttttccgagatggagtctcactctgttgcccaggctggagtgcaatggtgcgatctcggctctttgcaacctccgcctcctggtttcaaccgattctcctgccttagccttccgggtagctgggattacaagcatgtgccaccacacttgctaatttttgtatttttagtagacatggggtttcaccctgttttttaaattctctaaaaggaagaggacactttttttgttgttgttgttgttgtgttgtgttgtgtgtgtgtgtgtgtgtgtgtgtgtgtgtgtgttttgagacaaagtcttgctgtgtctccagactggagtgcagtggcgcaatctcggctcactgcaacctctgcctcccaggttcaagcgattctcctgcctcagcctcccaagtagctgggaccacaggcgcccaccaccatgcccaggtaatttttttgtatttttagtacagatgggttttcaccatgttagccaggatggtctcaatctcctgatctcgtgatttgcccgcctcggcctcccaaagtgctgggattacaggcgtgagccaccgtgtccagccctgtttgcttttaaatgggagagacctgtttaaatccctccgatgggaagagaaagaacaattggggctacagtggtggggagggagggagatgaatgatgactctgtcactaacaacccctgggaccgtgggcagtggatttactgccacttcctcatctgtaaagtgagaagtgataacaggatctgactcactgtttcaagtgtttattctgcctccgcttgcaacctcttgcaacctccgcttgaaaagggtaatggatttactgctacttcctcatctgtaaagtgagaagtaataacaggatctgactcatcaggctgatgtgaggagggaaccagccagtgtgagcacattgctcaaggcatagagataagctacaataaatgttattcccattatcaacctcctccatggcttctaaaaggagcaagtctaggtgtgcaggaccccacagtctgcaaggtttcccagcttggaaggtggccctggtaatctggaagcgtctgtgacagcttaaataaattggattttttaatgttttctttttttaaaaaaatcagtaggaattacaggaacatacagtaggtgtacccagagcttagcggaagtaccagaggcaggattttgatgagggtttgatctcctctggttcgttggatctgtgagtgactgctgtataactggcctgaggtcagacctcgctgacccccccactcccctctcccctttttttttgagatggagtctcgctctgtcgcccaggctggagtgcagtggcacaatctctgctcaccgcaagctctgctcactgcaagytccgcctcccgggttcacgccattttcctgcctcagcctcctgagtagctgggactacaggcgtccaccaccacgcccggctaattttttgtatttgtagtagagatggggtttcaccgtgttagccaggatggtctcgatctcctgaactcgtgatccgcccgcctcggcctcccaaagtgctgggattacaggcttgagccaccacgcccggaccccccaagcccccccttttttttttccgagatggagtctcactctgttgcccaggctggagtgcaatggtgcgatctcggctctttgcaacctccgcctcctggtttcaaccgattctcctgccttagcctcccgagtagctgggattacaagcatgtgccaccacacttgctaatttttgtatttttagtagacatggggtttcaccatgttagccaagttggtcatgagctcctgacctcaagtgagcctcccacctcggcctcccaaagtgctgggattacaggcatgatccacagtgcccagccttgacccacattttttatggggaaaagagggcggtgggccctttgcagcctgagttttcactgcacgttggagcgggaggggtctgtggtgggtggaattgggtcctccccaaatgcatgtctacgtggagcctcagaatgtgaccttggttggaaagagggtttttgcagaagtaattaaggaaagggtccaaatgagatcatactgcattcgggtggccctcactccaatgactggtgtctttttaagatgagagggtgcacagaggcacatatacagcggaggcggccacgtggagacagaggtgaagactggagtggtgcagccagggaactgccaaggtgccaggagccaccaggagctgcaagaggcaaaagaagattcttccccacagagggagcagagcaccgcagacaggttgatttcaggcttctggcctttaggactgtgaaaggagacggttccactgttttaagtcacccagtagaaggtcattcattatggcatccccagtacacgaagagtctggcttcatgattggtctaggttggtgaaggaggacacggggtcctctgaggccattgtggtggcactgagtagcccaagggacccttttcagcatcagaatggtgggaagtggtgtgcagaccaaagccgcgaacacgcagagtgggaggactggggtctagcagcctgctgggagggcctgtccaaccaaagaccttttgatctacaaatttttttttttttttcgagacgaagtctcgctgtgtcacccaggctggagtgcagtggcgcaatctcagctcagtgtaacctctgcttcccatgttcaagagattctcctgcctcagcttcttgagtagctgggattacaggcacaagtcaccacacccagctaatttttgtattttttggtagagatggggtttctctgtattggccaggctggtcgcgaactcctggcctcaagtgatcagcctgcctctgcctcccgacgtgctgggattacagatgcgagccaccgcacccagccaatttacaaatattttgaaaatgctacttatgaatggcccaataattttacttctaggagtttatcttaaggaaaaaataaaaaattcagatgaaaccttatccccctagatgtttatcaagacactattttttttttccagggggtgcgatcttgctctgttgcccaggctggaatacagtggtgtgatcatggctcactgcagctggaacctcccaggctccagcaatcctcccacctcccaagtagctgggatcacaggcccgcgccaccgcatatgcccagctatttgtatttttagtagagacagggttttgccatgttgcccaggctggtctcgaactcctggactcaagcaatcctcccgcctcagcgcctggcccaagacactttttttgtttttttttgagatggagtcttgctctgtcacccaggctggagtgcaatggcacgatctcggctcaccgcaacgtctgcctcctgggttcaagtgattctcctgccttagcctcccaagtagctgggattacaggcacccattaccatgcctggctaatccaagacactatttataagaaaacctagaaccagtctacacatccaatagtgaggaaatgattagatgaattacagtacatccacaagatggattactaaacagacattggcatgatttatgaagagtgtttaatgtttacaaagagcttttaatgatgtggaagatggtggtataataagtaggaaaaaactggttataaatgataccacaatatgatgtcaacgatgaaaaaatgcacaaaaaaagacttttttaaaacgtcgaaacatcagagtggtctctagttggaggaataattttttttttttttaagacaaacttcttcatactttttgtacttttaaaatgatttactatgtacatggattacttccataatcaagaaaaaaagtaaaaacttttaaaatgctgtgaacgtggtttccatttttattttctctgatgggtgactgcacatcagcatcttgagttatgctaactacttaggctggtcacgacacacacacacatacagagaagtcacacaggctgtaccgggctggctgttgcaaatgtacatgaattacacgggttgaagttgtttggcagctagttaacatatgccacccaatgacgggacacaatctggtcacacgctgcctctcctgcctgttgctgttctttacaaaggtccgtgtgtcgggctggcaaagtggcatcctgctggcatctctgtggtggccccggaatggtggagtgcccaggtcagcatctactctgggtcccattctcaactgctctggccttgacatcagagcttccggttccctgctggctcttctgcacactggatccatgccagtccaggccccctccaggcacacacctgaggcagactgagagcacaatggacgctgtcctgatgtgaactgtgcccagacacaggatggggggaagcgggagatgtgaccacgacaccacacacaagctcgatctttacagatgggccctctgggactgctatatgggtggtgcccgagagacacgggggccatgtggagccctccagggcacagttgctgggagaggacagacgggaggggacctgtgcccatgtgcctagctctgagagcagagctaggagggtggatggggaacgtgtccgacatggtgctagattgttgagaagtcacgactacacacagctggggagcatgcccctctcccagttcattcacacggtgggttagatacagctagagagaagtggagatatgcttttttgagggaggacctttcctggtgtttggataaacagtgagacagactcctgggttcggcatgctctggggaggaccatgcgacggtgagagactccctactgctacactctgtacagggtggccaggcccgcctgccgtgcccatggcctctggtgacagtcacgggcttgccttcaaccccttctgccttggagagctcttgggccccggtgaaatgggggctataaagacaagagggtgggggggggtccccatggcccagggcaccccacgtgggggctacatgatgttgcactgggtggccccgcaacaatccttgatcagtgccagccccgtcttggccaccgtgggcttgctaggtgggggctctgctttcttctctgcccgggagcctgcagcaagatgtgggcacagggagagggggagaaaggaacagagagagagaggtgaggtgagcagagccctgaccatctgcagcccagccccactgcaacccctggccaggtcttgttccaggccttgttcaggtggtatggagagctgatgcacatttcatatgatcctcagctggtcctcattttatagtcctcattttatatggtcctcaatgctcagcttccaaccctaactttcagcccttctcctagtcagctgttatcatcattgtacctgccaagcctagcacagggcctgacatccaagaagtatttggtaaatagataaatgggaaattttgttcaagtcacttcaatctgagggctcatatttttcaatttttgaaaatgctcatacattgtcttttcagatacctccacctcccattctctgttttatctcctagaatgcctatcacatgtaagttggaccttctcactctatcctctcggttttataacttctctttcatatttctcatctctttttctctttgtgctgcattctgtgtaactttctcagggctgtcttccaatgtataaattctcccttcagctgtgtctctgtatttaatccattgagtttttactttattgataaaaaaaaatttcagaaggccagttttttgcatgtctacttattcttttttcatagcatcttactatttcattttgggttttattccttctcttagctctttgatcatttaaaagtacttagtttattttcctttttaaatagttctatatttttggttcttgggaggacattctctttggtgcatctactgattctcctcatggtgattcagttcttcatgggtttttcttttcttttcttttcttgagatggagtctcgctctgtcacccaggctggagtgcagtggtgtgatcttggctcactgcaacctccgcatcctgggttcaagcgattctcctgctcagcctcctgagtagctgggattacaggtgtgcgccaccatgcctggctaatttttgtacttttagcagagacaaggtttcaccatattggtcaggctggtctcgagctcctgacctcatgatctgcccaccttggcctcccaaagtgctgggattacagacataagccactgtgcccggccgggtttttcatttttattgagggctcatcttcaagggggttgcttttttctgtgagaatactgtataccatgggatccagaagaatccctactgagcagttttgcatttgctaaatctgctaggatcccagagatttcactggttttacaatagtttttatttttcaacttggaattccagtaccagatgagtagtgtaaagttggccccttgcatgtggtgcatgcttggtgttttgatttctcgccagaatcatttcttttttccacccataatccaatagagaaggcaagtttccttgctcctcctccatgctgctaagtggagtttttctaccttgcctttcatgaaagggtccactgaggatgctggccttcggcagtgatcacgtgccttgtggttataggagccagcagaagagatcattgcccttctctttccttactccctccaaccatctttcacaggatgttaatgaaaactgggtttgtagttttatagacagtggcagcttttggtttttgtcttcccagcaagatttcaagtccctcttcctctaacagctcatgtccctgtggctgcaggagtgggcatgttatacattcctggccaatcccagtacccccagcctcttggtgatggtaatggatctaagaggtgggaacataatcccagaagggcgggtgagaatatttccctgagacttatgtatttcgataccagggaaaagaacctgtggtattgcttcagagttgctaagctatggttctagggttctggtcccatggagaaggcctgtgttgtaggaaaaaatgatgcttacatgcaaagagaggcagagatgagaaaaagaagaaaaggaggggaggtaatagtgttcagtccttgaggctctagttcttgttgctctttctccaacaaattcctttttttgcttagaccagtttgaattgggcatccatttcttttctttctttcttttttttttttttgagatggagtcttgctgtgtcacccaggctggagtgtagtggtgtgatctcggctcactgcaagctccgcctccccagttcacgccattctcctgcctcagcttcccgagtagctgggaatacaggcgcccaccaccaagcccggctaattttttgtatttttagtagagacggggcttcaccgtgttagccaggatggtgtcgatctcctgacctgtgatccgcccgcctcggcctcccaaagtgctggcattacaggcgtgagccaccgcgcccagccaggcatccatttcttctaactgaaagaggcctcactaatacagcagttaaacacatttgagaaacgctgggtcaacaaagaaaagacagtttcttgacagcaggatccatcatcactttaatatcctaatggacactgggactctccaaatacagggtcaagtaaacagcatttctcaaacttatttcatataaaaccctctttgctctgaggatctgatgaggttaatattctgagacatatgcttctggcttctccagagattccagacctaagagaggccagagctccctgagcctcagtagctacccaattctttctatgaaatgcaccaaactttgcaattagggaggaacaactaccaggaccaggtacgtagtttgcagagttcaatccaatatgaaaatgtagggccccatgttccaaacgtattaacaatttctagacagcaacaggagaacattaaaccaagcatggcacccttctaggcatgaggccccaggcaactgcctacaggcccatgaggctggtcaggcatgaggccccaggcaactgcctgcaggcccgtgaggctggtcctgcctgctgtcatcccatgctgaaatctgatctctagatctgatctctagaaagcattttgttgcgccccttatggctcccagacttctctgaaatggcctttttttttttttttttttttgagacaaagtcttaccctgtcacccaggctggagtgcagtggcccaatctcagctcactgcaacccccacctcccgggttcaagcaattctcctgcctcagcctctcgagtagctgggatttcaggtgtgtgccaccgtgcccagctaatttttatatttttggtagatacggggtttcaccatgttgaccaggctggtctcgaactcctgacctcaggtgatccacccaccttggcctctcatagtgctgggattacaggcgtgatccactgtgggcctggcctgaaatatacttttctcttttgtgggggaggggaatgaataatgtatatactcactggctggagatttggttactttgtctagaggttttaacttgattctcaggaaatcagccatttccttgtcttcttcttgctccctgtgaaagtagatgggtaaaagaaaagaagatacacagcaagcaaggaaagcatcaaggaaccaatgaaataaaccaataggttaagcaacaggctttgtggatggggcatgtatgttgtcacgtgttatgcgtgtacagtatgtatatgttgtatctggtgaacctgctctgaaccagagacacatatcaatgatggggtaaatgcttacccagaggtaggtatgtgaccccagggcagaggcagggacattacaggaccctgctggggggtcagtgagtgaggcagcacctctcctgaccttgtattttgaagccaccctattcacctgtgctcccacaaagtatgaggcaggtctcagagagcgagtcaccccagctcttccaaggatcaccaagataaagtaggtgggtgcagacttgctgaactgccttgaagagacacggtctttctttgccacccaggctggagtgcaatggtgcaatcgtaactcaagaagccttgaactcctgggctcaagagatcctcccacctcagcctcccaagtagctgagactacaggagcactccaccactcctagttaattaaaaaaaaaaattgtagagataggggggtctcactatgttggggcagcttgtctgcctgcccaagactggcattgataatttcttctagatctggaagcagaaccggaggtaaggagaatataatatttgttgtagttttctgtattttttgttttgttttgtttttgagatggaatctcactctgtcacccaggctagagtgcattggtgcaatcttggctcactgcaacctctgcctcctgggttcaaatgattgtttcctgcctcagcctcccaagtagctgggattacaggcatgcaccaccacgcccggctaatttctgtagttttagtagagacggggtttcaccatgttgcccaggctggtcttgaactcctgacctcaggtgatccacccaccttggcctcccagaagcgctgggattacaggcgtcagccactgtacccgaccatagaatataatatttggataggagggaaaagttggtttctctcattaaccagaagtccattgcagcatgaagaagggcagtggaactgctagtcccaggacccttgaagaaaggtctctgagaacacagacaataaagagcaagttgccctctgggttggaagggcctttttccttgtgaaaggccctaaaagctttgctctggtgtaaggaaacaaaaatcaagaaccaacatgtacagctttccacattttcaacatttacaacatgtttttacactgcagctccagggctgtggttgtcgaggtcaaggcagcagatgcaaagagaagaccctgatacttagaaaagggcattggcgccactaaggggaagggaaaggggagaacaaagctgggaggttgggaggacagaggttgggagcaagtcagttcaggtggcagagtttcggtagaaactgatagcagaagtttcaagacattgccttcaggagtgacaggatgtgaaggaagctctgccatgtattatgggatgtgactcctccctggtcacttcctggaacaacattccctcaagaggcacagatttgaaattctcttatatacaaaatgaattctcaagccagaaggctggggttccttgggattcagtgtccagagactgtggatcaaggccatgcctgttaggcaaggctgtgagtcccaggagcagaagatgggttctggaaggaagcagaaggttgctgtcctgcagcccagtgatcgggtacccgcagtgcactcaccttaaccgctcgacctccgcatcgtccaccaggaagtctctcttctgcaccagtttgtggatcttctggattagctcatcctctctctgcttctgcagtttggttttttctttttctggaaagaagacatcaacaaggagacagatgagcattttgggaggctgaggtgggcggatcacttgaggtcaggagtttcagaccagcctggtcaacatggtgaaacaaccccatctctaccaaaaatacaaaaattagccaggcgtggtggcacacacctggaattccagctactcgggaggctgtcagccaccacctcgggaggcgggagaattgcttgaacctgggaggcggaggttgcagtgagctgagactgcgccactgcactccagcctgggcaacagaatgagacttcatttcaagaaagaaaaaaaaaacaaaaaattacagagagacagatgagagggtgaccactaaaagcacttgagctggccgggtgcggtggctcacacctgtaatcccagcactttgggaggccaaggtgggcggatcacgaggtcaggagatcgagaccatcctggctaacagggtggaaccccgtctctactaaatacaaaaaattcgccgggtgtggtggcgggtgcctgtagtcccagctactcgggaggctgaggcaggagaatgacatgaacccgggaggtggagcttgcagtgagctgagatcgcaccactgcactctagcctgggtgatagagcgagactctgtctcaaaaaaaaaaaaaaaagcacttgagctgagcggccaggattgattggagacctgactctgcccttccaccctctggatgaacttggagaagcaacttgacctcttcaagcttcagttttctcatctgtaaaatacacagtgaggcttaaaatgggagtaatgggctgggcatagtgcctgccacctgtaatcccagcactttgggagaccaaggcaggaggatcacttgaggccaggagttcaagaccagcctgggcaacatagtgagaccctcctatgtctacaaaaattttctctgtaaattagccacatgtgatggagtgttcctgtagtctcagctacttgggaggctgaggtgggtggatctcttgagcccaggagttctaggctgcagtgagttatgattgcaccattgcactccagcctgggtaacagagaaagaccctgtctcttaaaaaaaaaaaaaaaaattgagagggcagggtgagtgtggggagggagagcatcaggaaaaatagctaatgcatgctgggcttaatacctatgtgtcgggctgacaggtgcagcaagccaccatggcccacgtttacctatgtaataaacctgcacatcctgcatactaaattgcatacaattttgaaatgcagtagtgttagtaaatggcttagtggagtgcttggccttggctgagagccttcagtaaatggtcatgacaaagccagggtcttctgcaaaggcagggggtgaggagaggctcagataggggtgctgggagggaactagttgtttttttccctttggtgaaggtaaaccaatttatcagaagaaaatcatccatgccaatgacactaaccctgtcccaaacaccaagtgctaggatgccaaagagaaaaaataaaaaaaagagagagggctgaagatgaggtttgagaaaattaagaggcaaaaacttaaacccacttgggctctttctgctcaaatcccttcagaataaaaaatgtgggacagcttgtctgcctgcccacgactgacgttgatcattttttctggatctggaagcagaaccaggggtaaggagaacataatatttggataggacagaaagttggtttctctcattaaccaggagtccaccactgcacgaagaagggcaataggcttgccagccgctccccattcccagccattggtgcattggatgatggtgtcactgctcctgccgtggtaaatcttgtgggttgggtctgattccccaaatcactcgtcagcaccgcagagccgctccctgccctctccaagcacgcaccaacacccatcgactcaccaggacccctgctcactcaggagctcgtggtgtgactttactctccaaataaccattgacagcactctgacattcccaagtgccctccactgctctctagatcttagccagaatcacccaacaactggctgggcccccaacatctgcaaacctctgtctccaagccattcatccatgtgttctgtcactcaccaatagaggcattccccagcctcagctgcagcaactcccaggagaaaccacctactcacacaagtggcctgcgtcagctcacagacctatgactagcccaagtctccaagtcattggccaatgctgctcacgtgcgtgtgtgccacatacctttcccatcatcttccacttgcctacaggtgccacccactgaaatcctaacctccatggtcatagtattaagaaatgaggcctttgggaagtgagtagattatgaaggtagaaccctcatgaatggaattagtgcccttataaaagagacccaagggagcttgtttgccccttccaccacacaaaggcacagtgagaaggtaccatctataaggaacaggccgtcaccaggcactgtatctgccaacaccttgatcttgcacctcccagcctccagaactgtaataaatgttgtttacaagcccccggtctagagcaagccacagagactaaggcacccccaaagttcatgtgtgccctatttggaaatagttttccccagtttatatctcttctatttggaaatactctatttccaaagtaatttgtaagttgctttgcacatgtaattataatagttaagctaaaatgaggtcatacttattagcatggaccctaaacccaatgacttgtgtccttatgagaagaggaaagagacccaagcatggtggcctgaacctgtaatcccagctacttgggaggctgaagcaggaggatcacttaagcctgggagttctagaccagcctgggcaacacagccagaccctgtcttttagaaaaaaaaaaaaaaaaagaggagaagagaagacacacagacacacacagggtcacgtgaagatggaggcagagattgaagtggtgcaaccagaaggcaagcaatgccaagaattgtgtgtgttactgttagagtaggtagccaggcagccatgagcaagaaaggagaggggatttcccccccaaggaatgccaggcaaccatcaggtgatgtcaggcagttgttaaaattgtctctctaaaataataattggtcacagctggtgccagggaaaggccatctcccaacagacagaaaacacctgaagttatcagcggtttcccgatgagatctcaggagttgggcaactgggctcaagcatgcacattaagaggcaaaatggcggagtctaactggtatatgaccttcctctaggaacactcaactggtgagggaaaaacatctcaaataatcaggcccatgacttctgtaaatacactgtgtttgcagcctctcccaagcgctggcaggccactgcgcatgcgcacaacctgccctgagggaaaatgaagggaggagagacataaaaccctggaatatgccaacatataaaaccccggaacatgccaacatataaaaccccaaatcaaaggtcaagcggtgcacttggatctctcaaatcacccacttggccgtcttccaagtgtcctttactgcctttcattcctgctctaaaacttgttaataaacttttgctccttctctaaaacttgcctcggtctctcactctgccttatgcccgctggtggaattatttcctctgaggaggcaagtatcaagttgcttcagactcgtatggatttgctactgctaatgatacaggagtgaagaagaaattatttaggcagatagggtaaggaagtcctcggtaaggttttccttttaatgaaaagcaacccccaaatcattttcttttctaacaaggagcagccagtaaaatcgagctgtagacatagtcaagggagctggaagcttacacgggtgaatgctggcagctgtgcccataggaaaaggccacctggtctaggtatgttcaaaatggcggctccacgctcccttctctttgccagccatgtgtacagtaaggagaagacaacatggcgccgcccaagtggaaagttcatttgcatgataagattagggtggggtggccagccttcccatgcactatgcaaacgtcacacctgctccaaccaatctgtgggccctatgtaaatcagacaccacctcctcaagcttgtctataaaatttggtgcagtctgccacaggccggaattcccattcagggacttctcgagagagaccgagagagctgttcccttttctctttcttttgcctattaaacctccactcctaaactcactcctctgtatgtcagtgtctgtgtccttaatctgcttggagagagacaacgaaccttgggtatttaccccagtcaacaacactacttcactaacactaccagaagctaagaggcaaaggagtctcctctagagccttagcagggaacaaggccctgttgacacctcgattttggatgtctggcctccagaaccgaaagagaatacatccagaaccgagagagaatacatttctgttgcttaagccatccagtttgcaccaatttgttaggcagctctgggaaatgaatgtaatgccctagggcttcaggagactccactgtccttccagtaattgtttgttttgtgcttacataagcttggatgggtttctgtacctttcagccagactaatccttggagaattgtgaaatgagagaggggaacaggcctggcggttcctaaccgtccctgcttatcacaatcaggtgcaaagctttaaaaattgccaatgctcggctaggcgcggtggctcacacctgtaattccagcactttggtaggccgaggcgggcagatcacgagatcaggaggttgagaccatcctggctaacacagtgaaacccagtctctactaaaaatacaaaaacaaaatttgccgggcatggtggcgggcgcctgtagtcccagctactcaggaggctgaggcaggagaatcacttcacttgaaccccggaggcggagactgcagtgaacccagatctcgccactgcactccagcctgggtgacagagcaagactctgtctcaaaaaaaaaaaaaaaaaaattactaatgctgagatggatcaggtgaggcaggagaatatggtctggaggcagggaacctagggccaacttcctagaactaaatcaaaagaaaaaccccaactttccacacataagtaacaaaaggactggaggctactccctttgcaaaccctcctccttttctgtgtgtcacatgagaaattgaaagtatatctgattggtcgcagaaagcaactgcaaaagctttctgcgaccaatcagactaattgtgggccactacttcatttacatagggtgtacaccaagtagccaacgggaaacctctagagggtatttaaacctcagaaaattctgtattggggctcctgagcccctatgctcaggcacactcccaccctatggagtgtactttcattttcaataaatttctgcttttgttgcttcattctttcctcgcttattttgtttgtgtgtgcattttgtccaattctttgttcaaaacaccaagaacctggacaccttccaccagtaacacagggactcccttttggggtctgtgggagacccccaccccaagcatggaaataaaggaaaatcttgagttccctcaaaggaaattctaggcacctagctagccttgaaaagtcaataagcaacttatcagtaagaaggtaatagtagcctaaaacaatagccaaggaagttagaatctggagatgttttgttttctatagaaactgaagataaacatcttagcatatatgtctgagttgtttttcagaaacccaggaccctaccaaatggatccactggcatatagacgtcagataaaggaagactaaggactgaattctgaccatctttccttgttctaagtgtcttccagagaggcctggagggagtcacacccatgggccagggatgccattcttttctgctgacccccgatttttattatttttatttatttatttatttgaggcagagtcttgctttgtcgcccaggctggagtgcagtggcacaatcttggctcactgcaacccccctctcccgagttcaagcaattctcctgcctcagtctcccgagtagctggaagtacaggcaggcgccaccacacgcggctaatttttgtaattttagtagagacgggggtctcgccatgttggccaggctggtctccaactcttggcctcaagcaatctgcccacttcggcctcccagggtgctgggattatacgcgtgagccactgcacctggccttgacccccgatttttaaacaaagcttctcttccttaaccaattgcaaattagaaaatctttcaatctacctatgacctgtgagccccagcttcaacgtatgcagcccttttaggccaaaattgatatgtaatctcaatgtattgatttacaattttgcctgtaacttctgcttgactgaaatttacccctgcctttaaaaacctgcactgaaatcgccattgcaaaattataagagacagtgaaagagatctgacctaatcaactccatcttgcttctaacctccaagctgtccttgttcattactgggcataggctgaactaactatgggaggaacttactttatcatttaaaacaaagacgataacagccttttcccaaaacaaactcccttcttgcctgggaactagactgcatttgtaggtgatacggttaggctttgtgtcgccacccaaaactcatcttgaattataatccccatcatccccacgtgtcaaaggagagaccaggtggaggtgactgaatcacgcaggcagtttccccatgctgttctcgtgatagtgagcgagttcccatgagatctgatggttttataagggttgggcagttcctcctgcgttcattctccttcctgtcaccttgtgaagagagtgccttgcttctccttcaccttccaccatgattgtaagtttcctgaggcttccccagctatgccgaactgtgagtcaatgaaacctctttcctttatacccagtcttgggcagttcttgacagcagtgtgaaaatggacttaacaaattaaccagaagattaggaattatgatagtgagtgagttccatgagatctgatggttttataagggttgggcagttcctcctgcgttcattctccttcctgtcaccttgtgaagagagtgccttgcttctccttgaccttccaccatgattgtaagtttcctgaggcttccccagctatgccgaactgtgagtcaatgaaacctctttccgttatacccagtcttgggcagttcttgacagcagtgtgaaaatggacttaacaaattaagcacaagattaggaattatggtttaggaatcatgcagctggaggctacaagatgctgaccctccccagattactcctgaagataacaccactattgtaaaaaccaagatcaatgcttgaggtattttgcagaccgtgcacttgatgggtcagtgggtaccacccagataaagtggctcatctgaccttgtggccccaacccaggaactgactcagtgcaagaggacagcttcggctccctgtgatttcatctccgacccaaccaatcagcactccattctcactgcacccccacccccatccaccaaatcgtctttaaaaactctgatcctggaatgctcaggggcactgatttgaggaataataaaactccagtctccctcagccggctatgcatgaattactctttctctattgtaattccccagtcttgataagtcaggtttgtctaggcagagggcaaggtgaacctgttggacagaacattacctataagccattgaggaggtcaggcttgaagcattagctgcccagtcctcctggcttggagccttgcaaataaactgtttcctttttaccactgcaaaaactctggggagacagctggtcttactgtgccaggaaagcagaccctagttgtattagtccattttcacgctgctgataaaaacatacccgcaactgggtaatttataaagaaaaagaggtttaatggactcacagttccacgtggctggggaggcctcacaatcacggcagaaggcaaaaggcacgtcttacttggcagcaggcagcacagaaaatgagaatcaagcgaaaggggaaaccccttataaaaccatcagctctcatgagacttcttcactaccatgagaatagtatgggggaaactgtcccccatgattcaatcatctcctactgggtccctcccacaacacacggggattataggagctacaattcaagatgagatttgggtgggaacacagccaaaccatatcacaagttgagttctattacaatgccagagtccaaagccaacaatgccagatcaattgcattggggtttctagtgggtggagaatagactttggtacttttccctcattccttcgttgttttatgtttgacatttaactttttttggtaacagctttattgcaatatgattcacataccatgcagttcatctgttccaagtgtatttgcagagttgtgcaaccatcaccacaatccattttagaacattttaatcacccccagaagaaaccccatacccactagctgtcgctctctttcaactaggaaagtctattcactcgtttatccttagggcctacacagtgctgggcacctagtaaatgctcacgaaagctagaggattcagttctactgtcattgcgcacactacccttacaacaagactgtgtggaagactcctacaccttgcctttgttatttatgggatattcacaacaaccatgcggggggtagtattattggcctcattttcccaacaaggaattcaaggctcagagaaattaagtcgcgaactttcacgaagttcacctgcctgctaaggctgaattcaaacccagattgctgcactctaattactaaagtagtagttcttatgtgggagctgtaagctgcaaagtgtctgagaaggtctcaatcaatctggaggtttattttgccaaagtcgaggaggcacctgggaaaaagagacacaggcagcaataggatccccggcctgtgcttttttctgcagaggatcttaaggacttcaatatttaaaggggaaagagagggcaggaaggggaggattgcattctctggccctcagtgaatttgcattttacataggataaaggaaacgcggagtagaggaggaagtcaaatgtgcatttgtctccgggtgggcggagggacgatgatttatagtcttgtcttagtcccctacctgttaggataagctgttaatttacattgacagggtgagggaggcccctgggaagataggtggcctttctatcttgcagctatctgtttaggaaaaaaagaaaggcagttttggctgggtgtggtggctcacacctgtaatcctagcactttgggaggcttgaggtgggtggatcatgaggtcaggagatcgagaccatcctggctaacacggtgaaaccccacctctactaaaaatacaaaaaattagccgggcgtggtggcaggtgcctacaggctcccagctactcgggagactgaggctgaggcatgaacccgggaggcggaacttgctgtgagcagagatcgcgccactgcactccagcctgggggacagagcgagactccgtctcaaaaaaaaaaaaaaaagtaggtttttgtatgactcatagttcccaagcttaacttttccttttggtatagtgaattggggtcctgggactttattttcctttcatagggcaatgttgcacacccccctgacctcgcttggggtacattcagcaacatctgtacatctatagacatttttggttgtcactgtcagaagggtttgaactacagtgactccatcttgaataggggctgggtaaaataaggctgagacctactgggctgaatgcccaggaggttaggcattctaagtcacaagatgagataggaggtcggcacaagatacaggtcacaaagaccttcctgataaaacagcattagtaaagaaggctgccaaaacccaccaaagccaagatggcgatgaaagtgacctctggtcgtcctcactactcattatatgctaattataaggtattagcatgctaagaggtactcccatcagtgccatgacagtttacaaatgtcatggcaacatcaggaagttaccctacatggtctaaaaaggggaggaaccctcagttgtgggaattgcccacccctttcccagaaaactcatgaataatctaccccttgtttagcatataatcaagaaatagctataagtacaatcaatcgaggagcccaagctgctaccctgcctacagagtagccattcttttattcctttgctttcttaataaacttgctttcactttacggactcgccctaaattctttcttgctcttggtccaagaactttggggtctggatcaggatccctttcaggtaacatcaccattgaggggtagcggagaggtacgttgtgctaatggcctgtagtgggtagaggccagggatgaaactcaacatcccacaagacacaacacagagccccgtacccccaacaaaaaatgatcaaccccaaaggaagatactgacatttgtcaaccccaaatgtcaatagttgaaggttgggaaacgctgctttaaggctcatcatgctgcacttgtagctcagtaagaactgccacttatgggcacccactgtgtgctgggcccagtctctttctgctaacctgggggctccttgagagtggagaaccgttctctgttcatcactgcaagcccggctcctaggttcagagcttgctgcagaacagcctcttgggacatagttattgaactgacagcatggcaaaaacattcaagtcaagggtaatggtgggtgcttatctggcctatttgaaaacacctttgcaaaaatgataacagtgagaaaattaggacagtgaaagggatctgatctaaccaacccccatcttgcctttaacctccaagctgcccttaatcattcccaggtttaggccatgctagctttgggagacatttagtttatagtttaaatgattataaccttttccaccaactaaactgcctttgtaaagctaataaaaggcccccatgttagaaggatgggaggaggctgaattctgctaaggtgtagacataaatgactactgccattattccagaggtcacaagatttgcaacttccccaattactcctgcagataacatcactattgcagaatctaagatcagccttttgagatatctctttaggttttgcatttctgatgaatgatgatccacgtggacctgccacccagaagtggacttagcacccctgagaatcatttttcacacacctatgattgcatccccaaccaatcagcagcatccattctgatatagtttggatgtgtgtccccgcccaaatctcatattgaaatgtaatacccagtgttggaggcgtggcctgatgagaggtgattggatcatgatggaggtttctcatgatggtttagccccatcctccttggtactgtccttgtgatagtgagttctcatgagatttggtcttttaaaagtgtgtggcacctcccgcctcactctcttgctcctgctctgggcacgtgacatgtctgctcccttgtcttccgccatgattataagtttcctgaggccttccagcagctgagcagacaccagcatcatgcttctggtacagcctgcaggactgtgagccaattaaacttattttctttataaattactcagttctctctttcttttttttgagtcggagtctcgctctgtcacccaggctgaagtgcagtggtgagatctcacctcactgcaacctccacctcctgggttcaagcaattctcccacctcagcctcctgagtagctggaattacaggcacccgccaccacccctggctaattttcatatttttactagagatggggtttcaccatgtttgccaggctgttctcaaactcctgaactcaagtgatctgccctctcagcctcctaaactgctgggattacaggcgtgagccaccatgcctggcctgggactagcattttgataagggtaagccccacagagggcaactaacacagcctgatgggcaggggaaaattttttggagaagatgccaaataagtcaggcattattaactaccaaatctggggtgacttcaaagttagagtttgtacacacttcatctgttcccaagtaggataataatggtcataattgctaatatttactggactcttgaggccaaatatcaagctaagcacttagtttgcatcatctcatcgatttttatgatatttaatttaatttaattatatatttttttgagacagtgtctcgctgtgttgcccaggctggagtgcaatggcacaatctcagctcactgcaacctccacctcccaagctcaagtgattctcctgcctcagcctgccggttacctgggattacaggtgtgtgccaccacacctggctaatttttgtatttttagtagagatggggttttgccatgttggccaggctggcctcaaactcctgacctcaagtaagccacccatctcagcctcctaaagtgctgggattacaggcattagccaccgtgcccagcctctttaggatatttatactcaatgaattagaccctcttactattactagccaattttcagaggaggagaaattgagtctcagagaagtacagtgacttgtccaaggacaagaaggtgaccagaattcactaggacttgaacccaggtcttcctgactcgaagttgtgtttgacacatgcagtcagggagcactgcattgcaagaatgaggctctgtcttccagacccaggcgtacagatgggccaggctgggggcccccaagcacctgtttagcacaaggtgaagttgcaaatggttacctgggatggcgaccaagttctgcagctcctgcttcaagtccatgatgtccttgcagagctggatgtcatccatcctggggaaacaggacaccatcaacagcaggttacatcagcagagcattacgccctgagcatcacccggttaacacaaagaagctattaaaggtgggttatcttttgaagaggccatacatgctcattgtagaggttttccctcaaaaggaaaaagccaaacactgctcaattatcccaccacctagaaatgatcactgttttttgtttgtttgtttgtttgtgacagagtctcactctgttgcccaggctggagtgcagtggcatgatctcggctcaccgcaacctccaccttccgggttcaagcgattctcctgcctcagcctcccaagtaactgggattataggtgcctgccaccatgcccagctaactttttttgtatttttagtagtatttttagtagagacagggtttcaccatggtggccaggctggtcttaaactcctggcctcaagtgatctgcacacctcagcctcccaaagtgctgggattacaggcataagccgcggtgcctggccatcagtcactgttaataacacctcgatagagctccttccagtcttcatgtgcctgacttaggtttgcttatataagtgggttcatatggcatattcagtttcgtttttcagctaaagtttacgttttttaaacactgcagaaattcacaacatagaggaaagtctccctctgtccttcggagagaatcattgtcaacggtttagtatgtattcctctggattttttaaaaacatttttattttgaaaatgtttaattttttattttttatttttggagatagagtgtcgctctgttgcccaggatggagtgcagtggcgtgatcatagcttactgcagacttgaactcctgggctcaagggatcctcccacctctgcacaacccctcccaaccccagccccctacggagtagctgggactacaggctaatttttaaacagttttttgtagagagagggacctcgttatgttgcccggctggtcttggattcctggcttcaagcaatcctcccacctcagcctctcaaagtgctgggatataggtatgagccactgcacccagcctcctccagatttaaaaaaaaagcgtatgcttataatatcatatatgacaccattgttattgcacaaaaattttttgcaatttgcttttttcaatttaataatctttaatagtcttgatcatctttccatatcagtatatgcaaatctccacatatttagtggctgcatagtataccattatattgatatacagtcatctatttttattttttaaatttatttttatttttattttttttagacagtctcactgtatcacccaggctggagtgcagtggtgtgatcttggctcaccgcaacctctgcctcccaggttcaagtgattctctggcttcagcctccagagtagctagtagctgggattacaggcgtgagccactgcactcagctgattatacagtgatctatttaactataatttatttaactattcccctattcatagacatctgggttgtttcctaatacatttctaggatagattcatagaaatgcaattgctgggtctagtggcatgaacacttacattgtagtaggaatttccaaattgccctccggagagatcatgtgtgacattaccaacagtgtggccatgggggacagtgggtgctggctcctgtcatctcagtaattgggttgcttttgcaacctagttttgcattacacattataattttgcattacacattatggttttgtgtgtgtgctacaaaaattaactcatcttgctgtaaacaatatttgtaatggctgtctgcaatttcacaaatgagattcatcgggattgtgctaattacaccctcatcttgattactaaggctggcttttcaggtttgagcaattttggccactgcaggatgaacatcagttcctctaaggcttcttctccatgttggattatttggggtttagattctcagaagtggaatcactgtgtacaaagggcttgatatttccatagctgttgagatgtatcttcaaataacttccccgtgatacacaggttcacattcactctgcgtgtctttgtctttgttgttcttgttttgttttttgagacagggtcctgctgtatcacccaaggcacagtcatagctcattgcagccctgaactcctgggctcaagtgatcttcccacctcagcctctgaagtagctggcactacagctgtgcagccatcatgcccagctcatactttttttaatttttaaaattttcatagagatggggtcttgctgtttaccaggttggtcttgaactcctggcctcaagtgatcctcccgccttggccttccaaagtgctgggattacaggcgtgagccactgtacctggcctgcacgtctttattgaacatctactatgttgggcattgttgtcatctctgaggcttgcaacagcaaagaagaccaagccctcaggaagatgacattttgctagcagagacagaaggtaaacccaaatacaatatttcagatgttacaaagaagactgaagcaggtaagggatgtagtgggtcagcttggagccagtatcttactttgctcctgacaactatcctaggaaaaaccagaggacagaaatcatattttcattttactcatgcggaaacaggtaaagaggctcaactgagtacacacagctcatgggggcaggaccagaactagaaatcgacccttcggagtctgagtccactgatctttctgcctcgttcctcagcgtctccatcaagggccggggctgctgactcctttcagcagtgccatctgtataccagcatggggccctatcttagtcccctgagtgttgctatcaaggaatgcctgtggctgagtgcttttttttttttttgcataaaggaatataaaactatttattaaccactgttcaccagtatttacgataaagtaaacaatatacagttggataacattctgattactacaaagttgttcttcctggcttttgctgaaccagtaaagcaaactgaagattgaggctacatgtaaggaatgagctggggtaaagaaaaaacatgcaggtcagtaggttagattacaaaaggttgttcacacatttatggcagcaggtcctaaactgccagcatctctaaccatctgattaggtttctatgagccaagtcttacatattccattcaacatgatcttttagtcaatgtagcaacagggatttcaacattttgttaaggaatggcccactagggaaatttttaaatattcatttaacttagttttgtttagctagttaaaacacactagcatttgtcttgttttctcatctggatgtggaaacctgctgtgatggcagtgataaaatttttcctttcaggaattttgcaaataaaccaattatagacgctttaaaattatccaatttaaattgtcctatttagaattacttatttcacttgaaatgtatggcttcaggaaaattttcaatttaccttgaagtgattatctcttatttagctcggaataatggcatctcagaaatatgggtttacctgtgattttttgtttgggtgaatgcttaaaaacaaaaaaaaatttatgtatgcattttatagatacacacacacaaaaaaacatgtaaaaaatctagaatggtccttaggcttatgggaacacaagttttgattgagtaatgactatggacatttcccccaacatttagaaaagctgttctttaatgaagaggaaataatatctttataaagacaagaggtttatttggctcatgattctgctggctggaagatgggacatttggcatgggcctcaggctggctacattcatagaaggtgaaagggagctcatgtgtgcagaagtcacagggcaagagtggaagcaagagagagggggaggtgccaggctttttttaacaaccagctgtccaggaactaaaagagtgagaactcactcacccccacctcccaggaagagcttaatctattcatgggggatccacccccgtgacccaaacacctcccactggggcctatgatgtagtttggatctgtgtccctgcccacatctcatgtcaaatcataatccccagtgttggaggaggggcctggggggaggtgattggatcatgggggtggacgtctcccttgctgttctcatgatagtgagttctcacgagatctggttgtttaagtgtgtgtagcacctccctctttgctctcttgttccttctccagccacgtaagacttccccttcgccttccatcatgattgtaagtttcctgaggcctccccagccatgcttcctgtacagccagtggaactgcaagtcaattaaacttcttttctgtataaattacccaatctgaggtagcctgtttaaaaatttttttttctggctgggcacggtggctcatacctgtaatcccagcactttgggaggccgaggtgggcagatcacgaggtcaggagatcgagaccatcctgtctaacatggtgaaaccccgtctctactaaaaatacgaaaaattagccgggcgtggtggtaggcacctgtagtcccagctactcgggaggctgaggcaggagaatgtgtgaacccaggaggcggaggttgcagcgggccaagattgcgccactgcactgggcaacagagcgagtctccgtcccaaaaaaaaatttttttgtttctttataatagagatagagttacaccatgttgcccaagctggttgccaactccttggctcaagcaatccacccacttcagcctcccaaagtgctgggattacaggcgtgagccactgcgcccggcctcaggtagttctttatagaaatgcgagaacagactaatttcaacatgagatttggaggagacagacatacaaaccacagcaggaccccttgccttttgccactcaagaacaactcatgctgtccattctaatgccagcatcccagtttcaggacaagaggcaggaatgccttgcttcagcctgcatctcttgttgtcagaggcacgccaagcatttttcaagtcgtgccctggaatgtcctagcaggtgacagctgcctcgaatgagcgtggacttgccgggagggcacagactgttcccgtgagtttctatcagcgatcgttcaactggagagactccagacgcttttgcagagatcaggctacatcagggcaatcttggtccccaggaacatttggcaatgcctggagacatatttggttattataattgagtgtgtgttggggaggggtgtggttgctactggcatctagtgggtagagaccagggacactgctaaacatcctactgtgcacagaacagctcccacaacagaaagtgagccagccaccatgtcaatcacactgaagttgaggaatcttggattctaaccacagaattatcaaattattgataatttttgagaggtaagagaggagaagatggagaaaggacaaaaggagagacaggtagtgattaggaggcagagttttggcaccaaacaactctggctcaaagggccatggtacagtgacttccttttctgtctcacctaactcatttttaattatttatttatgtttttttttttttttttgaaaaagagttttgctctcgttgcctaggctggagtgcaatggcgcgatcttggctcattgcaacctttgcctcccgggttcaagtgattctcctacctaagccttccaagtagctgagattacaggcatgcaccaccaggcccagctaatttttttttttttggacgagatttcaccatgttgatcaggctggtctcgaacacctgatctcaggtgatccacctgcctcagcttcccaaagtgctgggatgataggcgtgagccaccgcacctagccgtcatgttttaaataggaataatggcagtactatttgctgggattattatgcacatcaagcattaagcacagtgcctgggacctacacagtcaaatgcccagtaaatgctatctactattattatgttttttagagacagggtctagctctatcacccaggctggagttcagcagtgcaatcatagctcactgcagcttcgaacgccaggggtaaaaggatttgcctgcctcagccttccaagtagctaggactttaggcatatgcccctacactcagctaatttttaaattttttgtagagacagaatcttgccatgttggccaagatggtctagaactcctagcctcaagcgatcctcccatgtcagcctcccaaagcactgggattacaggcatgagccaccacccttggcctttactattattatcattagctgtgagaaagaagcagagaatggctgggtggggtggctcacacctgtaatcccagcactttgggaggccgaggtggaaggatcacttgaagtcaggagttcaagaccagcctggccaacgtggtgagaccctttctctactaaaaatataaaaattagccaggtgtggtggcacatgcctgtaatccccagttctcaggaggctgaagcaggagaatcgcttgaacccaggaggcagaggttgcagtgagtcaagatcatgccactgcactccagcctggccaacagagtgagactccttctcccaaaaaaaaaaaaaaaaaaaaaaaaaaaatggccggcgtggtggctcacacctgtaatcctagcagtttggaaggctgaggtgggcaggtcacaaggtcaagagatcaagaccatcctggccaacttggtgaaatcctgtctctactaaaaatacaaaaattagccgggcatggttggtagtgggcgcctgtaatcccagctactcaggaagctgaggcaggagaatacttgaacccaggaggcagagattgcggtgagctgagatcgtgccactgcactccagcctggcaacagagcgagactccgtctcaaaaaaaaaaaaaaaaaaaaaagcagcagagaaaaaaggaaagagaaaatgatgtggaagaagcactatttctgaggaatggagctaacaagtaaaacctttttaaaaataactttcagtgcttatactcttctttgtaaaagtttttatttttatttatttattttattttattttattttgagatggagtctggctctgtcacccaggctggaatgcagtggcacaatctcagctcactgcaatctctgcctcctgggctcaagccatcctccctcctcagcctccagagtagctgggactacagggaggcgccaccacacctggagaattttttgtatttttggtagagaaggggttttgccatgttgcccaggctggtctcaaactcctggactcaagcaatccacccacctcagcctcccaaagtgctgggattacaggcatgagccactatgcctggccaataaaagtttgtaaatggcaattttatctgattatagaatggatccctaatcattgtagaaattttggaaaatacaaacaagtacaaagaaggaagatgaaagtatgcagaaccttgacctacgtgtagcagaggccacttctactccgagggttctggtgtatttcacagcaatctttttcctccatgtaacctaagggtggcgggcatgccctgggggcctttgccctggccctttgtccacctccaaggctgcccttagcatgtcattgaatcctcccaaaagatccaagcccacaacccattgacaagcgaggtggagctctacagaactgctgacgggattcacgctgcaggactccatcaacgtccctatgagatggctctgttttcctcatgtctcatctcttctctctctctctctacctcctccacacaccttccgctaaaggagaccatcaggtcctaaatcaagcttgtccaaattaggcccaggatggcttttgaaggcagcccaacacaaatttgtaaacctttttaaaacatgagattttttttgtgtgtgattttttttttaagctcatcagctattgttactataagtgtattttatgtgtggtccaagacaattcttccaatgtggcccagggaagacaaaagattggacacccctgtcctgaattactcagctctgttcttcaacttacaaaccccagttggcaaaaccaaaagcttcatggtcctttgaacatccttccaagaaagaagcttgtcccccgaccccaagctgtccatcagggttaggtgtccattcacgtaactaaaaatcaagtctttttctggaatatggaaggatgggttctgccattaaggcaaacaagaagtcagcatttacggagcatttacatgtaaatgcactttctgtgcataaactcttctagaccgtcacagcagtccaggaagagaaacattgtttttagctctattttacagatgagtacatggaggttaagcaacacacccaaagctctgcactggtaagtggccttccagattcagccctagctcctgctcttgacaatttcaccgtgttgtctcctctccatgtggctccatgagttgcagcgggcatgactggttgtagaccttcccctcccgctttctcccagagctctgatttgtccaggaggcaacctgccctgccttgatggaagccagtcacagaatcccatttgctttggctagacacatacttttccaggctctcttgcaagtggaggtagctatgacatctactctgggccaatgaaatgtaagagaacaactttaagcaaccattaccatagtcacgtatgtgtcatagtgccatataggtgacatatgacatatatgtaacataatgacatatagtgacatatataaggaagccagtggagggtttagttaaatatcatttggctgcttgacttttagctatataagttttaagatcagctagaagtaagtggttaaaagcaagcaaggcaagttaagtttggtgggcttagagaaagcccttaagagaaactccgcttgggcaggcttctgggaaggataattagggccttcggttctcccctgtcctggtcctaagctcctacagccactcacgtgagaatggcgaaaccgaacgctaacctgatgaagcccaccaaacttaacttgccttgcttgcttttaaccacttacttctagctggtcttaaaacttatatagctaaaagtcaagcagccaaatgatatatacctaacccccccaccggcttccttacatatgtcactatatgtcattatggtacatatatgtcatatgtcacatatatgtcgctacgacacatatgtgactacggtaatggttgcttaaagttgtttttcaggactatgggggcagctcctgtccagttcgaacccgttgagatcaatgacccttcaactgaacctgtgcaaatgccggagaagtgaccttttgacgtcagagggcccaaaactccccgagatcatgctaatgctgccattttctaaacatgcaccctatgaagatccaggaagcttggctatgtatgtgcagattgccaatgacctcacttttccttgcctccaatcacctcttcccacactttagaccaccctgctcctttattccataaagatccctaaattccatcttcagggaggcaagtatgagaccttttctcctgcctccttgcttggctgcgttggtgtgaataaattcttttcttttgccaaatccatcataacagcgattggcttactacccatgggcagaaggggacaggttcgctatctagggcagaggggaggaaaggaaacagccagacccttgatagcatcctggggccaccccactgaccctcgggccacctgcatctggactgcttatcaagtcaaaaaaaatttttttttttgagacggagtctagctctgttgcccaggctggagtgcagtggcatgatctcggctcactgcaacctccgcctcacaggttgaagccattctctgcctcagcttcccgagtagctgggattacaggcatccaccaccaagcctggctaatttttgtatttttaggagagatggagtttcaccatcttggccaggctggtcttgaactccttacctcgtgatccacctgcctcagcctccgaaagtgttgggattacaggtgtgagccactgtgtccagcctcaagtaaatattaaatgtccttatgacttaagtagtgtgaacaactgacttggtttgcctggggctgtcccagtttctgcactgcagtttccagatccttggaaacctctcagtcccaggcaaacagagacagctggtcacccaagatttaagacactagtcgtcggacgctgtgttacttgcagctgaagacattttcacagatacatatgtgtggataggtgcatttttaatgtgtattggatcaagacatacagctgtcctgctcattgcaagcatgacatcatgatgattttccaatgccattaaatcatattgttcaaaagacatgtgaatagttcatgcaaagtgctttaaaagcatagctggaagttcgaataagccatgctttagaagcatggctggaactttgaataagccacattagtccaggtctctgtaccattagggctgaacctggaaatcaaactctgctgctgccggctcgttccagagagagatgttatcttcaagaacctgattaatgttcggaaggaaaagaaagccaacccgtgtcattcagcatcttggtctttcacgctgggacgataggggaaagcgggtcatttttatcagcgttgggtgcggagaggtgatcaggccctgctggaataatagagctgctgctttacaaaatgtttgtgaaaacgacatgaaatggaggcatcagcagcttgagttgcagcctaatggaaacccagcagagaccacgacaaaggcagaggtaggttttcagaggcaaggattgacttttaaaaatagtctttattgtctccttttaaaaataagttacagaggctgcaggtatcttaagacaggtgagaaaaagatgtcatgtctgggccgggcgcggtggctcacgcctgtaatcccagcactttgggaggccgaggagggcggatcacgaggtcaagaaatcgagaccagcctggccaacatggtgaaaccctgtctctactaaaaatacaaaaattagctgggcgtggtggcacgtgcttgtagtcctagctactcaggaggctgaggcaggagaatcacttgaacctgggaggtggaggttgcagtgagccgagattgcaccactgcactccagcctggcaacagagcgagactccgtctcaataaataaataaataaataaaaataaataaataagatgaggggtttagatgagccctcgagccccattctgcaagcacagagaggatacaacccgctttagacacagccagatctcaatgcagatctcagtacccccattgactggctatgacctactttgctgctctcagcctcagtgctgtcactgttgaaaagggattacacctttgtcttggggttgtatgagaatcaaacaggcttgtgtgtgtggtgcaggcagcccacggttttgcacaggcagtgtgggtgtgtaggaacagccacttccatccactcctccaccctaggtaaaaagtcagctcacagagactctcctggactatctcagccaacatttctgtgcaaaatgtgtatctcactatcacatgctattttttttttttttgagatggagtttcgctcttgtcgtccaggctgtagtgcaatggcgggatcttggctcactgcaacctcacctcccaggttcaggcgattctcctgcctcagcctcccaagtagctgagataacaggcacttgccaccatgcccagcaaatttttgtattttggtagagaggggatttcactatgttggccaggctggtctcgaactcctgacctcaggtgatccacccgcctcagcttcccaaagtgctgggattacaggcatgagccaccgcgcctggccagcatgtgctattacaatttcctcaaatcaaatggttccaagatgataaacatgtgcattggttcagctttcgtaggattcatgagcttaaacgctatccctgggtaaggataagtgttgataagtgtccagggagcccctggcctcagcaatttctcagcatcttgctggggaccaagggaccggagaggtgcctgccagtgtacataggaagggaatgccctcatgttgcaccctggaaggccaatatgtctgttttctctctgtggccattttaatggactgtggatttacatccacctgtcacactggcctttcctttgattgcagtcagacactcgttcccaaacaaatgtcaccttcttcaagacccttgttcccactctgttcccaaatgtcaacttcctcaagcgcagtttattcttctctcttccaagggctttctagactgccttagttttcatttttcttacaataacaactactaatactgctcttttctgtatgtatgatataaaaaaattatggccaggcacagtggctcatgcctgtaatcccagtactttgaggctgagatgggaggatcgatagagtccaggagttcgagattagcctaggcaacatagcgagactctgtctctacacaataaaaaaattagctatgcctggtggtgtgtacctgtggttccagctaccagagaggctgaggtaggaggatcacttcagcccaggaggttgagctcctgggtgagccatgatcacaccactgtactccaacctgggaggcaaggattgacttttgaaaatagtcaattttcttgacgtgggtttccagctgtctgccttgacagagtgagaccctgtctcaaaacaaacaaacaccagtattgcttagttacctttgttttagacctaaaagaatacttgctcctggccgggcacggtggctcaagtctgtaatcccagcactttgggaggccgaggcgggcggatcacaaggtcaggagatcgagaccatcctggctaacacggtgaaaccctgtctctactgaaaatacaaaaaatcagccgggcgtggtggcgggcacctgtagtcccagctacttgggaggctgaggcaggagaatggcgtgaacctgggaggtggagcttgcagtgcgctgagatcatgccactgcactgcagcatgggcgacagagcgagacaccatctaaaaaaaaaaagaaaaaaaaaagaatacttggtccttttttttttcttttttagaggcagggtcttactatattgcccaggctggacttgaactcctgggcttaagggatcctcctgcttcagcctcccaagtagctgggaacacaggcatataccaccacacccagcttggtctatttaaaaaattatacaaatattacataaatatggtctcactataaaaacatcaaacaatacagaagtataattgctagtacttattgaatgctttcatatgattggtgtcaggctctggattaagcattttacacaaatcatctcagtgaactcttgcagcaactctatgaggtaaggactattattattatctcttagacaggataaagaacttgttcaacgtcacagagtaagtggtaggaacttgaactcgggcagtctgatctgagcccatgctctcgactgggactgtgaaagctccagccagtgactggagttcaaggaagacagagatcaggatagtctgggagaaggctgctcaaatcgagatgcaacttacaggggagggcacaacttggaggggtcaggaaaagattccaggcactcagagagaagggggagctgagacaaatattaggaatgggtgtggtatgccagggtaggtgacaatgaagagtctgcccaattaggacatatcagggacatatgtgtctgcgttgtaaagaaccttaacatgggagccatcttaggttctagagtgagagcatggcatggagatgtgtctatgaaacccagtttggaagacatggtgatcagtatttccacaccaaggagagagtgcactctccctttgaccttctgtctaagacgatccaaggaattcctggaagatgcgtttgctcctcaatctttagctggggttggcaaactatagcccacagtcaaaatctggcccactgcctgttttggtacaactcacgaactaagaatagtttaattttcatttttaaatacttggggaaaatcaaaatcataacattttctgataaatgaaaattatatgaaattcaaagttcagcatctgtgaataacatgctattggaacgaagtcatgtccattcatttcagcattgtctgtggctgtttttcccgacagtggcagaggtgagtaatcacgacagagactgtacactctgtagagcctaaggtgtttagtacttggccctttacagaaatattttgctgaacttacaggagtgtaatcatagctcactgcagccttgacctcctggctagagcaatcctcctgcctcagccttccaagtagttgggactacaggcgcatgccaccacgccttggtaattttaaaaaaacgttttgggccaggcacggtggctcatgcctgtagtcacagcacttcgggaggccgaggcaggtggatcaattcaggtcacgagttcaagaccagcctagccaacatggcgaaactccatctctactaaaaatacaaaaactagccgggcatggtggtgcatgcctgtgatcccagttactcgggaagccgaggcaggagaattgcttgaacctgggagatggaggtttcagtgagctgagatcgtaccactgaactccagcctgggcaacagagtgagactccatctcaaaaaaaatgtctggtagagatgggggtctcactatgttgctcaggctggtctcaaactcctgggctgaagccattctcctgccttggcctcccaaagtactgagataacaggggtgagccactgtgcctggctctaaagaaatttctgcagctagaagagctctcaccttacatgaatgaagaaatcaatgcccagagaggtgaatgctgttcaccaattcactgactcatccagaaaacagttcttgagcgcctactacgtgtcagccctcctgatctattttcactttcaagagacattgagacataggccagctaccaaggccatgtggcgagacagcagggctcttcccaccccactgcttcgactgagaccagagcttgttttcttctctgggctctggcagggaactgggccgtgcccagtgcatgcaaggttggccaacagatttcctgcacctgctcactgatgctacctggcagtttctgggaccgcacttagccctctgcacatccttcactcctttgaaggagacagtaagtgttgtgagttcatttcttcttcttcttcttctttttttttttgagatggagtctcgttctgtcgcccaggccggagtgcagtggtgcaatctcagctcactgcaacctctgcctcccaggttcaagcaatcctcgtgcctcagcctcctgagtagctgggattacaggggcacaccaccataccctgctaatttttgtattttcagtagagacgggtttcaccatgttgacgaggctggtcttgaactcctgacctcaagtgatccacccacctcggcctcccaaagtgctgggattacaggtgtgagccaccgcgtccacttgttatttttgattttttttcccccagactcttaccagtgcctagaatgagacacatagtccttcccttggagggcccagcgagctgtgaagtggatagaagactggcccttggtgtccctaaccctacccctaaggcctttggctaagctggcccagaataattaaagatgtgaacagagattaagctccaggtgggcacagcagctcctgcctgttatcccagaactaagggaggccgaggcaggaggatcgcttgagtgcaggagttcaagagagctgctggttttaaatgtggcacttcctacactcattttctcttgtgctgtctctctcctgccgccacgtaagacgtgcttgctttcccttcgccgtctgccatgactgcaagtttcctgaggcctccccagccatgcagaactgtgagtcaattaaacttctttcctttataaatgacccagtctcgggtagtatctttacagcagtgtcagaacagactggtacacagcccatgtgcatccctgtgtaaagcctggccccaaggagttctcttgaactcctgcactcaagcctttgcccaactcctccctcagctcagaaatctttgtctcaaactaagtgctctgcagcttcactaatcccttctccttctggaatcttcctgatgccctcagctacatcaggtcctcttccttcctgcagccatagcccccttgttatcccattgacatctaggcattccagaaccatctaggcatttgtgtttctgcctcaacagactgcacctcctttaagggactttgcctttttccttcatggttctagcacaccaccccgtccctgatacattgcagtaaatacacaaggaaggaaggaaggctggcaggcatggagggtacacacagtactgcattttgttgaaacaaggcctaaagactgcaggtgcaggtggaaaaatttcaagtctcatgatagacaccacgagggcaatcgcatctatcaaaggcggtgagtcagccctggagaaatccaattaaacatccgtcattcgagtgatactgctttgcattctgctatcaataccgtttctattctgagctggctcagcatctgggctctcttgtgccttccactctcagtcacctgctgcgagttcctgccactgtgtggcgtcctctcccccaaatccaccctctccactcccaagtccatccctcctctcaagctgatgccaacaaaagctgatttgtatccagcccaatctcattgaatcctcatcatctgtagggtggtattcttattctccactttacagaactctcagagaggttaagtaaatcgcccgagatcagacagcttgcaagatttgaaagaagacagtctaactccagagccctgacaattgccactacaacagactgcctacgcatgtcacccagatataccaggctgtcatcttctgttcccatacccccttactttatcccgttctttcagtcaggagccttctaaaatgctttcaggccgggcgcggtggctcatgcctgtaatcccagcactttgggaggctgaggcaggcagatcacttgagctcaggagtttgagatcagcctgggcaatacggtgaaaccccgtctctacttaaaaaaaaaaaaaaaaattagccaggcatggtggtgggcacctgtagtcccagcaacttgcggggctgaggtgggaggatcgcttgaacctgggaggcagaggttgcagtgagctgagattgtgccactgcactctggcctgggtgacagagtgagactttcaccagtggcagttccaaggagtgggctttcttagggatggcagggaatggtttcagtcccacctcgtaatttccattagccttcaaaccacctcaacatttaaaaagtgcttttgggccgggcgcggtggctcacacctgtaatcccagcacttcgggaggccgaggcggggtggatcacgaggtcaggagatagagaccatcctggctaacacagtgaaaccctgtctctactaaaaaacacaaaaaatggtggtaggtgcttgtagtcccagctactcgggaagctgaggcaggagcatggcgtgaacccgggaggtggagcttgcagtgagccgagatggcaccactgcactccagcctgggcgacagagcaagactgcatctcaaaaaaaaaaacgtgcttttgaaatgggaaatatcaggtaggatagaagcaataagagaaaatgaaataaagaaatgggaaatagacatttttcccaattttgtggaaagtgtaagaaaaaaacttgatagaaactatgcaattttaattaatttgtacgacacaaatctcactaaaaaccatggactccctactgcgaaggcagctctaaggtaagtcccctgattgtttcatgtgaccaactggctggccctaagcccctcctgtttaggaatttttttttttttttttagacaatgtctcactctgtcgccaggatggagtgcagtggcgtgatctcagctcactgcaacctccgcctcctgggttcaaggaattctcctgcctcagcctcctgagtagctgggactacaggcgcccgccaccacgcccagctaatatttgtatttttagtagagacagggtttcaccacgttggccaggatggactccatctcttgacctagtgatccgcctgcctctgcctcccaaagtgctgggattacaggcgtgagccaccgcacccggccctgtttaagaattttaaagcaatcactccattttttttttttttttttttgagatagaatcttgcttgctctgttgcccaggctggaatgcagtggtgtgatcttgatctgggcttactgcaacctccacctcctgggttcaagcaattcctctggctcagcctcccaagtagctgggattacaggcaccagccaccatgctcagctaatttttgtatttttagtagagttggggttttaccagtttggccaggctggtctcaaactcctgacctcaggtgatctgcccacctcggcctccctaagtgctgggattacaggcatgaaccaccacatccggccgcagtcattcctttcagctgagcttctaaggactgaaggaaaaaactcttaagaacacaatctgcaggccccggggaagcctcccctgccctcttcccacccattcctgcttagcccatggactgggccactaggaccactgtctcagcttagccctgctcctgccaaagcacagagcacacttctctgaagccatcacctatctaccatcaccactggcaattcccatcagagtcattgcaccagcagaagcagataagcttttgataataagtaaattaatgtttaagtcaacttcatgtttattcagcatgctagtgattagtggtctcctttgtaggcaagcgagaccctggggcttgataaaccacaaagaaaacgcaagtaatctctgttggatgccccaaagtagggcaggctaggactagaatgagtgatgtgctggggaatgtttaactggctggaagcaggggagggaggtagaagccttgctgtgaatcatttgccaatttccacggtgtaaatactcccactgctgcagattttgagctacccacagttgaacaactggttctccagattcctaaaaatttaacatcactggctagaatcaacaagtgggcagatttaggggtgcttcttcaacactctaaagtattcattcaacgtttacttagaagagaagctgagtattatttggggaaaaggttacctgtggcgatgatgatgacaatgattttggctaccatttactcggaattcaccacgcacagggcgggtgcagtggcttacacctgtaatcccagcactttgaaaggccaagaccagcagatcacttgagatcaggggttcaagaccagcctggccaacctggtgaaatcccgtctctactaaaaatacaaaaattagccaggcatggtggtgcacagctgtaatcccagctactcgggaggctgaggcaggagaatcacttgaacttgggaggcagaagttgcagtgaaccaagatcatgccactgcgctccagcccgggcgacaaacagaatttaccatgcaccttttacaccctaagtgctttatacactaagaagtgcttcataggcactaaatgctttacacagatcatctcaatcctgataaccactgtttgaggtgggcactacgtggttgtctcttttatacaggaagatcccacagctcagagaggttaagtggctccatcggaatcacacagctagtcaatggtggagctgggacactgacctgtggatcctgattcggacacccacattatctcaatgaagaacatctccttcattgtgtggcaggtcaggtctcactaacgcaggcctccatgacagctatttcagcagggactgtgtggttaagttaaacattaaaagctgaaagtggctgggcaggcagtgactcatgcctgtaatcccagcactttgggagcccaaggcggatgcatcaccttgttcaggagttcaagaccagcctggccaacatggtgaaaccccgtctcacctaaaaatacaaaaaaaattagctgggcgtggtggcaggcacctgtaatcctagctactttgggaggctgcagcaggagaatcgcttgaacctgggaggcggaggttgcagtgagccgagatcctgccattgcactccagcctgggcgacaagagcaaaactctgtcactaaaaaaaaaaaaaagaagaagaaaaaaacaaagctgaaggagcctactgggcatggtggctcatgcctgtacaatcccagcactttagaaggcagaggcgggtgaatcacctgatgtcaggagtttaagaccagcctggccaacatagtgaaatcatgtctctacaaaaaatacaaaaattagctgggcatggtggcgcatgcctgtaatcccagctactcggaagctgaggcaggagaatcgcttgaacctaggaggcagaggttgtagtgagcagagatcgcaccactgcactccagcctgggcgacagagcgagactctgtctcaaaaaaaaaaaaaaaaagctaaaagagccagtgcccttatacaaaggctggaatgtaacagaaatcctccaacagttttgctcaggcctttcctgggccttgaaacatgacgagataacgaggcaattcttaacaggacacgtttaggattaaacaagttttattgggggtgtgaagaaactccccaggcctccacaaacaagtttattgggagtgtgaaggaagtccccaaacctccatgatttagcaggagacaagataagggtaatcaccccagcaactggacccatttagattaagtaaatttactgaggcttcagaggaaggtcttcaggactcagaccttagttagactagaagaagctgattatttaggtctttaggtgaacgcacacttacacgtggacatatagtttagaaggtatgtaagctctgggaaactttgtaattttgagttggtctggtggtattttccaggctttttccctgtaactggtaacagaaatagaaactccctcctttcccagtttatttgcatctcgttattgggtcactagaataagcagcccaaccctcagtttgatccaggaacaattgttccaagcaatttaattctgataccagttcagcataatgctcttggaaaaaaatcaaaatcctgcagatagcaggactcactttgcttagaacgacggggtttatgtgtatgtgtttttgtttgttgtttgtttgtttgtgacagggaaacagggtcttgctctgtcatgtaggctggagtgcagttgcttgatcatggctcaccacagcctcaatctcccaggctcaagacatcctcctgcctcagcctcctgagtggctggaaatacaggcgtgccctagcatgcttggctaatttttatattttttatagagagggggttccaccatgttgcccagtctggtctcaaacttctggcctcaaagcaatcctcccatctcggcttcccaaattgttgggattacaggcgtgagccctgtgcctggcccccaccctcttctttgacctctgtcaaagaagaccttctttggccaccattcctggccatggaaggctgtttacagactacctattgttacttacacatggtcttgggtggggttgtgtctccctcctgtaatggaaaaaagttggaatttttggctgctcaacctccaaaccctagttttagggaaagcattcactgtgtcagtcattattagagaagttcaacaagggagcacccccacttcctcagactcagccaatcagaagctcatgtccaagactttgaccacagagcaaatgacagagataaaaggatggagggattagacttgtgctgtccagcaatggcggcttcctggccagattggtcctgtggccagtctctggggctttcttgatccatactcatttccaagcctgtccttccgactcctgagcccccatccccactcatagccttctacaatcccattttttggttgagtcaggcagagttgatttctgttgcttgtggccaacaaccctaaccaaaagaagcgtcagagtgttcccaccaaccacaccgggtcttctctctaagggaagtctggatggggacaattttctccatcatatatcactttagtgagtctgtactgtcttctatcgattggtactgggctagcttgcacctaatcagctgtgggcagatatcagtaagagggtgttagaaagcacttattagaaaatttggggccaggtgtggtggctcacacctgtaatcctagcactttgggaggccgaggcaggtggatcacttgaggtcaggagttcgagaccagcctggccaacatggtgaaaccccgtctctactaaaaatacaaaagttagtcaggcgtggtggcgggtgcctataatcccagctactcgggaggctgaggcgggagaattgcttgaacccggggggcagaggttgcagtgagccgagattgcaccactgcactccagcctgggtgatagagcgagactccgtctcaaaaaaaaagaaaaagaaaagaaaagaaaatttgggcttgtgttaggtgctttgggggacagtttaaaggaagtgagcatttactctggattggatgttgtcaggaagtggaggtaattctctgatagagtgtcttcctaattctttcctttaaagggagaagaacagagtaagactgaaactgtgattgatggagaactagcagtcactcatatgagctaggaaatggggctattgggtgatttttgtggctgggacaatgttcatgtctttatctgccttcaggagtagtgttattttgtcttgatctatcacggtctcaggatggccttgtctgatgccggcaatctgcaaaattgtttacattcaacaggagaacactttggccaagctgtgagtgtcaagccagctcccggctgccaggggcagcttttctctttctcacagtgtaggaagtaatttatatacttcttttctgcccataagtaattactaaatctgcaactatagggaccagtcctacccattttagtcttccctgcggggcccaccatgatgctttgcatactgaacgtgctctgggaatgtgcccagtgaactaaattatgggcacagagaactctctgggacttggcattattaagatcatgctgaagtatattttcaaaatttaaaatgtgactcatacaaatgtggaatgaacacttgtcaaaaaatttatttaacccattaatgagggaaccagtaaaatggtaaagctcgctccaagggcatttaaaaagtggactcatcagcatctttaatgaaaaccttagcataagattgctaaattcgagagaaatctggttaacatgctataagggcaataaaaccataacctttaatgtcgtcttttttctactggacagaaatctacaagttaacgtgtaatttcactatgtcagtgctctaatcaaataataaataacaaagtcagatacatgtactctctccaagataattaatcatccgtgggcaggtcattaagcagtgcctcagtatgacatggaaaagacattcttccttatttccaatttttagttaattttcatttaagaatcataacaaaagactcttttgtggcttcttaggaacatattcaactgaaatttttgttttaattgtgttttagagacagggtcttgctctgtggtccaggctggcatgcagtggtataatcatagctcactgcagccttgacctctcaggtttaagcaatcttcccacctcagcctcctgagtagctgggattatgggtacacactaccatgcccagctcatttcaaaattttttgtagagaggagttcttgtgatgttgcccaggctggtctcaaacccctaggctcaaggagtcctcctgcttcgacctcccaaagtgctgggattataggattgagccactgtgcccagcctgaaatttttctaatgcccacctcacacctggcaattccccaggtatcagcagcagcagtagcatcctgctgatacggacaggcggcagaaggacagggtcccaggtgagggctccaccctcaagcctggacctgcagccctaaatgagaacaggcattcctgttttcacacccaaatgttgccttttccaaaaccgctctggaccaccctgcccccatcctatgcccttaagaaccccaaaccccaggctccacaatcagaatagcaccagagtggcgtggcagagaaggagagaagagaagaagtgtctgaacatcgagaggagtttggctggggacagtcagagaggagatcatctgaggatggctgaactccaggggaagattaccttcccactccatcccctttccagctccccttccactgagagccacttccactacttaataaaaaatttgtattcaccatccttcaagtccatgtgacctgattcttcctggacaccagacaagaacccaggtaccaagagggcagggtgtaaaaggctatcaccctgaatctccactgaactggttaacacttagtcatctgcgtacagcaactgctaaaagagtattaattgtaacacatccctagacgctgccatgggaccagagcccaaaagcactcaccccagccccaatctgctcacctgcatgctccccctcctgcaaggggtttgatgcagtggcagccaagtaagcgagccacacccctgtcacaagtcctgcaaaggggacaggggagctcccccatttcactgctaacatttactgaacagttattatgtggttaggtattgtaatatcttttttatgtatcttatctcatctgctcctgaccaaaaaaaaaaaaaaaaaaaaaaaatccctaggaggtaattcattaagccactagtgtggttaataaaatatctatttggtcttcatccctggttcccagcacagagctcctaaagcccctggagtttcctgagcgataggactgtcttttgttatccatagcaatccccattgtactacatctgagtgtatgctaatgagggcactcaggctgagttccctagagagatggcttcaggttggggcctcgtcaccagaagagcaaatgtgtgataaagacaggggagaggggtgggcagggcacggtggctcacgcctgtaatcacagcactttgggaggtccaggccggcagatcacgaggtcaggagttcgagaccagcctggccaatatggtgaaacccccgtctctactaaaaatacaaaaattagctgggtgtgatggcacgtgcctgtagtccaagctacttgggaggctgaggcaggataattgcttgaacctgggaggcggaggttgcagtgagccgcaatcatgccactgcactccagcctaggctatagagtgagactccgtctcaaaaaaaaaaaaaaaaagacaggtggtcgggggcactgccggatgcagaggctcatgcctgtaatcccagctactcaggtggctgagccaggaggatcacttgagctcaggagtttgagaccagcctgcacaacatagcaagactccatctctaccaaaaaaaaaaaaaaaaaaaatttaggccgggtatggtggctcaagcctgtaatcccagcactttgggaggccgaggcgggcggatcatgaggtcaggagatcgagaccatcctggctaacatggtgaaaccccacctctaccaaaaatacaaaaaaattagccaggcatggtggcaggcgcctgtaggcccagctactcgggaggctgaggcaggagaatggcatgaacctgggaggcggagcttgcagtgagccaagatcgcgccactgcactccagcctgggtgacagagcaagactctgtctcaaaaaaaaaaaaaaaaaaaattaaaaattagccaggcatgttggcacccacctgtgtagtctcagctacttgtgaggctgaagcaggaggctcactcctaggaggtcaaggctgtagtgagctatgatctcaccactgcactccagcctgggtgacagagtgagaccctgtctcaaaaaaaaaaaaaaaaaaaaaacaattcggcgggcaacttccagtcccactcgctgacctgccaggaagaggaggaggctggcgactgaattataaaagctcttgaacagtgagatccagggagcctctaggttggtggacacactggtgtgctgggagggcagtgcacccagagagggcatcatggaagctctgcacggctccctctccacaccttgcccaatgcatctctcttccatttggctattcctgagttctgtcctttgtaataaaccagtaaacataagtgaagggctttcctgagctctgtgagtcattccagcaaactatcaaacccgaggaggtggtcgtgggaacccccaagtttgtaattggccaggcagaagggtgggtggctccggacttgcgactggcatctgagataggggcagtctggtgggatggggtcttttaacttgcaggacctgatgctaactccaggacatagtgtgatagctgaattgaattgcttgggcacccagttggcatccaagaatcagagacttagtgtagaaaaatggcacgtatttggtatcagaaaaaacacatttggtgtcagaagtggcgtcagaaaacaccacacagagtaacagagaagtcgagcaatttgctcaagaccacacagccggtaagcatctccgctgggacacagaccctggcgcaggcaaagtctgtgactgtaactgctacgtgtgctgcctcttgctgcgcctgacctcctcacaccagccaccaggtgcaacatccttatcgccttgcaggcaagaaggaaaagtgtggctcagggtagcaaagccagtgtttcctgaacatcagtcacttgcacgttaccatggcaacagttgctatgcctcaagccctctctattattattattatttgagacagggtctcactctgtcacccaggctggagtgcagtggcacaatctcagctcactgcaacctccacctctcaggttcaagtgattctcatgcttcagcctcctgagtagcttggattataggtgcatgccaccgagagccgctaatttttgtatttttagtagagacggggttttgccatgttagacaggctggtcttgaactcctggcctcaagtgatctccccacctcagcctcccaaagtgctgggattacaggcgtgttctcttttattgtctatttaatacttttctttatgttgattctcttttttacatcaccataaatgcaaacctaatattgttcctaaaagacatgaaaattatatatatttttttcagcagggtctcactctgtcgtccaagttggagtgcagtggcgtgatatcagctcactgcagcctgggttccagcaatcctcccgcctcagcctcctgggtagctgggggtactacaggtgcactccagcacactgggctaattttttgtaaagacggagtttcgtcatgttgcccaggctggactcaaactcctaggctcaagtgatcctccactttggccttccaaaatgctaggattacaagcatgagccactaggccttgcctgaaaataaattctttttctttttctttttttttttttgagacggaatcttgctctgtcaccaggctggagtgcagtggtacgatctcggctcactgcaacctccacctcccgggttcaagagattctcctgcctcagccttccaagtagctgggactacaggtgtgcaccaccacgcccagctaatttttgtatttttagtaaaggctgggtttccaccatgttggctaggctggtcttgatctcttgacctcatgatcctcccacctaggcctcccaaagtgctgagattataggcatgagctaccatgcctggccgaaaaaaaattcttaattaatgttttcctaaatgctgcctaaaatcatcccagagcgtacccaactttgggaaaaactggaccaactaagtctgataaagcaggggttcccaacccctgagccaccaccagtacaggtccttggcctgttaggagccaggccgcacagcaggaggtgagtggcgggtgagtgagtgaagcttcatctgcatttacggccactccccatgctcacagtaccggctgagctccccctcctgtcagatcagcggctgcattagattctcataggagtgcaaaccctattgtgaactgtgcatgtgagggatctaggttgcacgctccttataggaatctaatgcctgatgatctgccactctctcccatcgcccacagatgggaccatcttgttgcaggaaaacaagctcagggctcccactgattccacattatggtgagttgtataattatttcattatagattacaaagtaataatgatagaaataaagtgcacagtaaatgtaatgcacttgaatcatctcaaaaccatgcccccaccccatccctggtccatggaaaaattgtcttccatgaaaccagtccttggtgccaaagaggttggggatcgctgctataaagtcaaacagccaagatatcaacccaggctcctgcctccaagtctagggctgttttagctacaacatgggccccttcaccacattgtgtttctggttaactgtgtcgggcagcaagtggagaggaactggaaatttctcaacttggctctaaatgagaccaaagagaaaaaccaaatagtgatggcagacaacagatggtgagagggctcactcctccaggcggttaatgatgccctgggcaagctttccgaatttaatcaccagagcgattctggactatgcttcagtccagaatactctgattgttctaggatccgctggaattttcctctggaataactcaaggtcagttctaacaggtctaagcagcagcatgagcattgaagacatggaacagtagcaaacagtcaccatcttcaagggggaatgagagcactgacttccaatctaagagccttttttttttttctttgagacagagtcttgctctgtcacccaggctggagtgcactggcacatctcggctcactgcaatctccgcctctcaggttcaagtgatcctggtgcctcagcctcccaagtagctgggattacaggtgcacaccaccatgcccagttaatttttgtatttttagtaagagatggtgtttcaccatgttggccaggctggtttggaactcctgacctaagtgatccacccaccttgggctcccaaagggctgggattccaggcatgagccaacgcatccggcccatctaagggctttttaatgacctggtatagctcaccaaactccacgtggggaagcctcctatcgactcaagatgtcagtttattcaggcatttcccaaagtgttgctttcaaaggtaaattaaacttcattatctaaatgagcagttttcgtcttgggtcaaactatagctccaaaatgctttcataggtggcagacatttaagaattttcagccacgcacggtggctcatgcctgtaatcccatcattttgggagactgaggcaggagaatcacttgaggccaggagtttgataacagcctgggcaacacagcaagaccccatctctacaaaaaaattaaaaaattggccaggcatggtggcatgtgcctatagtccccactactcaaggggctgaggcaggaagatcactggagcccaggagttcaaggctgcagtaagccatgattcatcactgcactccagcctgggcaacagagtgaaagcccgtctcttaaaaatacatatatatttctcggccgggcatggtggctcatgcctgtaatcccagcactttgggaggccgaggtgggtggatcatttgaggacaggagttcgagaccagcctggccaacatggtgaaaccccgcctctactaaaaatacaaaaattagccaggcatggtggcgggcacctgtaatccccgctactggggaggctgaggcaggagaatcgcttgaacttgggagacaaggttgcagtgagccaagattgtgccactgcactccagcctgggcaacagagcgagatgctgtctcaaaaaaaaaaaaaattaagaataagaaaaatctatcttctgctctgctcttggccagctcacttgatttctttaaaaaaataaaaataaaaggagaccctgtgttggtttttagaagtccaaaacaggaacaaatggaaagcaatagtcattgaatgatgacaaattctgtttggttggacactgtcagaaagcctgtgcttataattttcttgataaatatagccccaggttcaatcaaaggcataatcaacggacttcaataacggatgtgatgatgaagacaacagatggcatcggaattatctgacgccacgggagaccacaaacacacatttcattatgattctgatcacgatcctaggctacaggggagagagagaggctcccactgctgtgccaaggagtcaaactaacatagggcagattttgtactttttattaacatctgaagcaagttttcgtcaagaaaggattaagaagatgagtcatctataagcagctgatggacactagggttcttctatttcagccagcgaagaggtgaggggatgtctgtgccgtgggaggtgagggggcatcagcctacctgcttctaagactctcaatgaccaggctatgccttggaacaactagacaagactctggctgtaagaccaggccccagcattttctttaaagttctccatgtgattgcaataggcagtcaaggctgagacgcggaagcatggggggatgttggcctggtgcaagatggacacattgcctccaacttctggctacttctgtaaaggctgttgagggatattagtcagtgctcaatcggggaagcagggtcactacgtgctctggggcaagggatgcgttataggaattagaccttctacaattgtccagggagctggggagatggcggtctgggaagggtggagaggatgagagaagtcaccgacagctgatatgagagtcagatgcgtccagctgttaagatggagtggcagaggggaaacaggtagaggggtccctagggggctgctgcctcgtctgccaagcatccagaggcgggggggctgctgttggtcagcaggcccagcggtcaggaagacaagctgcaagggacacaggggagggtgaggacaagctggaacctctgtggcccctctgtcagatcacctccttgtctcatctggacagccttcaaagagtaaacactgatgtcaccttccttccacttcccaaatctcccgcaccatcctcttctgcctacttttaacccacaaccctacagggaaaaggatatggtttggctctgtgtccccaccaaaatctcactgcaaattgtaatccccacgtgtcgagggagggaagtgattggatcatggcggcagtttcctccatgctgttctcgtgataaagggtgagttctcatgagatctgagggctttataagtgtctggcatttcccctgctggctcttattccctcctgctgccttgtgaagaaggtgcctgcttccccttctgccatgattgtaagtttcctgaggcctccccagccatgcgaaactgtgagtcaattaaacctctctattttataaattactcaatctttggtattttttttttccagtgtgaaaatggactaatacaaaatgggatatgggaaataaagttctcggtatagctaagctttcttttttcttttctttcctttttttttttttttgagatggagtcttgctctgtcgccaggctggagtactgtggcacgatctcagctcactgcaacctccgccttctgggttcaagtgattctcctgcctcagcctcctgagcagctgggtctacagggacacaccactgtagtcacctaatttttttttgtatttttagtagagatggggtttcaccatgttggccaggatggtctccatctcttgacctcatgatccacccaccttggcctctcaaagtgctgggattacaggcgtgagccaccgcacctggccctctttcttctttttgagacagagtctcactctgttgcccagactggagtgcagtggcacaagcatagctcactccagccttagactcctgggctcaagcaatcctcccacctcagcctctagaatagctgaagctacaggcatgcaccactatgcccagctaattatttagtttttttgtagagatggggtcttgctatgttgcccaagctggtcttgaacttctaggctcaagcgatcctcccacctaagcctctcaaagtgcagggattacaggtgtgagccactgcattcagcctaaatttttaatagaatattgcagcacagactagaaggaacagaaatccactcaagctcacttgagaaaaatatagtttagtaaaggtgtaagaaaatgaagggaaatgctagcatcttgacagatggtacccatatgtatcttggggagataatggtttttgcttggaattatggcttgacaaacacctggggtggtacttgcaagagctcagcataaattggtgccgtggcttcttagaagagggcaaagctgctgtggataagacaggagaagtaagtgtcttccttggaatggagggagctgagataaaggagaagagaaaaagaggtgatgaaactggaccccgtgtgtggaaaaggccaagaaaaaggaaaccaccccactgccttatggcacagggtggtgaaaaagatcttgttaaccaggaatgtcaaatgtggatttctagttctcctagttatggccatatggataccacgatgccctttactggaacattgactttttttttaagacagagtctcactctcttgcccaggctggagtgtagtggcacaatctcggctcactgcaacgtcttcctcccgggttcaagggattctccagcctcagcctccctaatagctgggattacaggcatgtacctccacacccagctaatttctgtatttcttagtagagacagggtttcgccttggcctcccaaagtgctaggattacagacgtgagccaccgcgcctggccttttctttttttttttttttttttttttttttttgcaattaaaaaaaaaatcaaggtctttgcagggctgtggctggggctagtcctctggggctggagggacagttacatggtgagccaggagacgattgtcactggtcatggtttttaagctgtctgctgtgaagagatcaatgacaccctttttgtgatcctcattgtattgctcctcaaatgacctgtgggagtaggatagggcattgttttattctgttgttatggaaaccagtgaagcatctgagtttcatattcagttggatggaggtacaggactcaaggaaccaagcctaggagcagagaagacttgaggatggaagcccctggaaatgtacagacattgtacagctggattttggatttccctaggcggtggcaacacggggtgggaggtatttctccaagggtctggagaaaggatgcgcagggttgaacaaggtgcaacatcttatggactacccagttcatctggactgcaatgggaatgtcatggctgagttccttctctgctttcaaaggacactgtctctcttgttattcttgaggcagacgctctgtcctctttcccttcaaagactggctttctctgcttatgcatagacttcggtttgccactccctcatcatccacctgggctaatctctctgcatcccaggagaaagactctgattggcccagactgagcaaatttggaccaatcagagaggagtgaggagaggctcaagcccccctacacctgaggctgctacttggtcccagctactcagaaggctgacgcaggaggattgtttgaacctgggaggcagaggttgcagtgaaccaagattgaaccactgcactccagcctgggcaacacaatagactctatctcaggaaaaaaaaaaaaaaagaaagaaacgaacttcctcttccacgtaatatccttcagatattttgagacaaatcttaggtgccccttgagacttctctcgtcgtttcaacaaccttgacatggaaaagatcatcattccaccctctaatctcccccttctcttgtgtctcctcttccaaacaaagaaaccagtgtctacacttatgcctgtatctatccatttccaaactcaatttcttcctggtggtaaaggaaagtaacatttaatgagcacttacgtggtagcaggcactggactgagcacttaatatgcttgatctcttttactcctcatgaccaccctgcgagatactggatgcatggctatttaacagatgaggccaccgaggctcagagaaggtaagatatttgtgcaagattgcacagcctataaatggcagaggtagaatgtaaatctaggtgtaatttaatccggagcaagtaaacacacttaccaggcacgaggtctatttatcagaaagcaaccccatccaagaccaggatatctagtaatgaaaaaacagggatctggccaggcgcggtggctcacgcctgtaatcccaacactttgggaggccgaggcgggcagatcacgaggtcaggagattgagaccatcctggctaacacagtgaaaccctgtctctactgaaaatacaaaaaattagccgggcatggtggcaggtgcctatagtcccagctacttgggaggctgaggcaggcgaatggcgtgaacctgggaggcagagcttgcagtgagccgagatcgtgccactgcactccagcctgggcgacagagcgagactccgtctcaaaaaaaaaaaaaaaaaaagaaaaagaaaaaaaaaaggccgggcatagtggctcaagcctgtaatcccagcactttgggaggccgaggcaggcgaatcacgaggtcaggagttcaagaccagcccggccaatatggtgaaacccggtctctactaaaaatacaaattagctgggagcagtggcgggtgcctgtaatcccagctactagggaggctgaggcaggagaatcgcttgaacccaggaggcagaggttgcagtgagccaagatcaagccactgcattccagcccaggtgacagagtgagactttgtctcaaaaaaaaacaaaaaaaacaaaaaaacaaaacagggatcctaccacgtttggcagaacccaaccaggaatgtcttggattgatctaatataacttgagatccccgaggagtttaggggactgaggacagacacagtagactggaattccaggagacaacaagatctaagtaactgatggctcaatgaatagcagccaattacataacatgaaatatgtaagtcaggatattgccttaagggggtgctcgggaatctggttgtgtagacccaaaacaccaaggcagctctgctaagtcacttgcagttttattccctcccatttctctttgggcatcctgtcctagaactgtcaagaaagggttggtattttatttgaaggaaaatgtgggaaggaggctcagccaagcattatcctattcaattcagaccatcacgtgatagggacaagcccttctcaatctctgctgccactcacatcagcagctttccagaaataagcaaagggaatggaaaaacccttaatcgccaggccacggtacatgcaatttactggtatctattgccctgtctttctaagaagcttcttttttgggagatttcaaaaaaatgatgagaacccggcacaggatgaagctatgagggtgccccatgtagtgtgtcatcttcccctttccccagcctcaccagggccgtctctgtcattgttgctgccacactgtggctcctgctctgggcttggcccttatatgaattgctgtggtcactcaatatggtagactgaagaatggtccctgaagatatccatgtcctaatgaacctatgaatctgttaccttacacggcaaaagggattttgggccaggcatggtggctcatgcttctaatcctaggactttaggaggcctaggcgggaggatcacttgaacctaggagttcaagaccagcctgggcaaggtgatgagatcccaactgtattagtccattctcatgctgctatgaagaaatacccgagaaggagtaacttgtaaagaaaagaggtttaaggctgggcgtgatggctcacacctgtaatcccaacactttgggaggctgaggtgggcggatcacgaggtcaggagtttgagaccagcctggccaacacagtgaaaccccgtctctactaaaaatacaaaaaaaaattagctgggcatggcagcgggtgcctgtaatcccagttacttgggaggctgaggcgaataattgcttgaacccgggaggtggtggttgtagtgagccaagattgagccactgcaatccagcccagtgacagtgcgagactccgtctcaaaaaaaaaaaaaaaaaaaaagaaagaagaaaagaggtttaattgactcacagttccacatagcttggaaggcctcaggaaacttacaatcatggcagaaggttcctcttcaccaggcggcaggagagagaatgaatgccagcaggggaaatgccagatgcttataaaaccatcagatctcatgagaactcactatcatgataacagcatggcgcaaccacccacatgattgaattaccttccaccgggtccctctcatgacatatggggattatgggattacaattcaggataagatttgggtggggacacagccgaactatgtcaccatctctacaaaattcaaaaattagctatgtgtggtggcacgtgcctgtggtcccagcttcttgggaggctgaggcagtaagattgtttgagcccaggaattaaaggaagcaatgagctatgaccgtgtcactgcactccagcctggacaacagagcaagacttcgtctctgaaaaatatatatttttaaaaaggaaatttgcagatgtgattaaattaaggggtcctgagatggggagatcatcctgggttatccaggtgggccctcaatgtcatcacaagtgcccctacccatttatgcctgaggttgcaattttttgaatttgagaaatcagacctggtgatagccttgagaagtagcatataaataactcccacatgcttagtgttccaataatggaatgctaggcatacatttaagagaaaaacagagggatttgacacagaagagcaaaggcgacaggatgacctcaatcgagagggactggactatgccatgctgctggcttcggagatggaggagggaaacacaagccaagaaatgcaaagagtacggttctagaagctggaatgaatgaggaagaggcttctcctctagagcctccagaaagcacggctctgccaacacctgatttcagctcagtgaaatcgatttcagacttccagcctccagaactgtaagataaaagaaatgtgtgttgttttaacacatttgcagctgtttgttacagtagccacaggaaaataacgcacttagctgcattatcactctgttccttcctatgaatggacccactgttcaccctaaccatcagagagccaggcagttctcaccacccagacctgccacatggaagggaacccttgagattatgtgaccgtgggagaagcaggaagatgagccctcattaattcattcaatcaatcttcactcagagtgcctacgctgagtttggctgtgtgctgggtaccgtcaacatttttgggagtgaaaatagctcagcctctgtcctcatggaggtcagcatctaggaggagagtcagatattgaacatacactcacaccaatgaacacaaatttacaaaaggcttctaaggaaaggattgcagggatggtaatgggacagggactggggaagtgctgggaaggtgtccctccagaaatgccctagatctcagtcctcgaggggacagagtttatcaggtgccttagtccatttgggctgccattctccctttcttagcctaggtggcttataaacaacaaacaccgccgggcgcggtgctcacgcctgtaatcccagcacgttgggaggccgaggcaggcggatcacgaggtcaggagatcaagaccatcctggctaacacggtgaaaccctgtctctaccaataaatacaaaaaagttagccgggcgtggtggtgggcgcctgtagtcccagctactcgggaggctgaggcaggagaatggcgtgaacctgggaggcagagcttgcagtgagccaagatcgcaccactgcactccagcctgggcgacagagctagactccgtcaaacaaacaaacaaacaaacaaacaaacacttatttttcatggtaaaagaggctggaaagtccaagatcaaggtgtcagcagattcagtgtctggtgaggacctcttcctcatagatagtgagttctcactgtgtcctcacacagtgaaagggagaaacaagctaccctgggcctcttttacatgggcacgaatcccatccatgaggatctgccctcatgacctaatcacctcctgaaagccccacctcttgatattattacattgggaattagatgtcgacatatgtatttaggggtgatacaaacattcagatcatagcaccagggaaggagaggggggtgggaggagagggatccaggcagagggaacatcacaaacaaaaaggcccccacggcaggaggggacctggtgtgtgtatcggggggtggggaggtggagactaaaaggaggcccaagggagtggtgtgtgtgtgtaagggagggagctgggggtgaggaatggatgaagaaaagaagttggagaagaggtgtgagcagatccagcaagatctcatgggctttatcatgctaacaaattctggaaggtgtttgctatggtgtaaatgtttatgactcttcaaaattcatgttgaaacttaatttccaatgcaatagtattaaggggtgagggccattaggaggtgggatcagtgcactaacaaaagtgctcgagagagcaagttcagtcctttttgcccttctgtccattctgcttgtgagaagacggtgcccttcctctctggagatcacagaagcaaggcgccatcttggaagcagagaatgagcccttctaagtatggaatctgctggcatcttcatcttggacttcccagccagactccagaactgtgagaattaaatttctatttataaattacccagtctaaggaattttgttacagcaacaggaacggactaagacagtgtttaaatctgagagttataatcagattcacatggtgagaaaatccctctggctgcaggacagagatgggcatgtgaacctgggtggtggccatggagatggagaaagatggacagctgagcattattttaggaggtaaaacaaacaccagttgatgatgaactgaatatatgaggtggagggttgggaggggtcaagaatgatgtctaattttggaatttgagatttccatggatagatggtgatgcttgaccatttgctgagctagggctggtgggtattgggactagatggggggatcatgagtttgacttggacagattgagttacaggtatctttgagacatttaagtggagatatcagatactgtaccttcccctgcctgtctttctcagcattttccccttagaaatgtgtgtccaaaaagaaaaataccgtgtgattccacttcttttttttttattttattttttgagacggattctcactctgtagcctgagctagagtgcagtggcacaacctcagctcactgcaacctctgcctccaggtatcaagtgattttcatccctcagcctcctgagtagctgggactacaggtgtgcgccaccacgcctggctaatttttggtattttagtagagacagagtttcaccatgttgcccagggtggtctcgaactcctgagctcaggcgatccacccaccttggcctcccaaagtgctgggattacaggcgtgagccacagcgcctggcctgattcctgttttatgaagtatgtagagtcatcaaaatcagagacagaaagcagaatgctggttaccaggagccaggggaaagggaaaatggggagtgagtgttgaatggtacagagtttcagtttgggaagatgaaaaaaattctggggagggatggtgatggttacacacagtatgaatgttcttaatgacatagaactgtactcttagaaatggtttcagatagtaaatattatatatattttgccacaatttaaaaaatagaagtgtgtgtgcaaactacatataagtgtgcataaaatgttttatttttatagtaaaatttatataaaatatactataataataataaaatataataaaatatgatttattatattttattattatttactattatttcatacttcatagaattattattatattatttttatggaataataaagcagttattttcccaacatcctacttaagtaaaaatctgtgtgtgacttttagacggccccgtgtgccccattccctcatatttttctcattccctcagaggtaggcactatcacaaacttgtggtaatgctttttatttttatcatttaccacccatatatgaagcccggaacaattatattttttagtttttttttttttttttttttgagatgcagtctcgctctgttgcccaggctggagtgcagtggcgggatctcagctcactgcaacctccacctcctgggttcaagcgattctcctgcctcagcctcccgactagctgggactacaggcatacaccaccacacccagctaatttttgtatttttagtagaaacggggtttcgccgtgttagccaggatggtctcaatctcctgaacttgtgatccacccacctcagcctcccaaagtgctgggattagaggcgtgagcaccacgcccggcctatattttttacttttatacactttatataaacctgttgctcaacatcttgtttttgagatgctttcatgttcatacctgttgctcattcatttttcactgctgtatagtattctgtggtacagctagaccacaaacgaggcagttatgaacattctggaacatgcctcctgatgctcatgtgtagtttctctagggcagtgctggtgaatagaatgttctacaacaatagaaatgtcctatacaaatgtatgctttccaatagggtagccactagccattatttactaatgagtgcttgaaatatggctcaggctaccgagagactgaattttacatgctatttaattttaattaatttaaactgaaatagccacatgaagctactggctaaccaggggtagacccaggagcaaaactgcaggttataatcacctgttcatctttactaggtaacaatgaactgttttccaaagagataaggccaatttccctatattttcattttatccaacttgctaggtctttgctaacctgataaactatccaaatgaaaatttctgagaataaaaagggctctatcagtcagggttctccagagaaacagaaccaatactactgaagagatttattttatttgttttttctttattcttttcttttttcttttttttttttctgagatgggatctcactctgttgcccaggctggagtgcactggcataatcttggctcactgcaacctccacctcccaagttcaagcgattctcctgcctcgactttccgagtagctgggactgaaagcacacgccaccacagccggctaatttttgtatttttagtagaggcagggattcaccacattggccaggctggtctcaaaactcctgacctcaaatgatctgcccaccttggcctcccaaagtgctggaattacaggcgtgaaccactgcacctggcctggaaaaagatttatgataaggaattggctcatgggattttggaggccaagaagtcccaagatctataggtggcagctggagacccaggagagctgacggtgttaagttccagtccaaaggctggcaggctcaagacccaagaagagctgatgtttcagtttgcgttcaaaggccggaaaagacccatgtcccagcccaagcaatcaggcagcaggagttccctcctactcaccctttctgttgtagtcaggccttcaactgattggacggggcccacccacctctacattagggagggcagtctgctttactcagtttaccaattcaaatgttaatttcatccaccaatgctcttgcagacacatacatcgaagaatctttggccaaacatctgggaaccctgtggcccactcaagttgatgcataaaattgataatcaccagggtcttacatggtaatctccctcccaacccaatggagtctaggtggttcagaggtggtcctctgagcagaatgtaatacagttctaggaagacggaacttctagagagtattttccttctcgaaacttgttctgaccatgaaaggcaactcgtagcagcaagagcttgtcaagtacagaacatttatttgatttatttattttctttgacacagagtctcattctgtcacccaggctggaatgcagtggcacaatcttggctcatggaaacctctgcctcccaggttaaagcaactcttgtgcctcaagcctctcgagtagctgggatttcaggtgcacaccaccatgcctagctaatttttttgtatttttagtagagatggggttttgccatgttggccaggctggtctggaactcctgatttcaggtgatccacctgcctcagcctcccaaagtgctgggattacaggtatgagccactgcgcccagactaacatgtatttctccattcaatcaacacagattcccaccttcctccccacctcccagtacatttagaaattcaggaggagggtccttccattcagaagtctagcttagaaattctccctcctctctcctccctttagtctctccgtttcttcttccttcctttccctcccctacaccccaacttcttgtatattttgtccaagacaaactgcttcttagatcttctgcaattaagggcatctcttcccatccgatatgtacagtggccccggcaatggtgacctgttcctggaagatgctatttaaaaccctgtgtgcaactaaagtgacgcagagctcctgaatgtggctgaaatgtgtcaagttacataaacgcacatgcttcattttgcccttggcttgaagctcttcctaacagacttcagaattatcagctcattaaaggggaaaaaatgcaggtttataaaaaaatcttaaataatcatcataataaaatcaaggccccagggtagagttgcacttaatggttgagagccactctcaagagagttggcacctcccaagaggatctcaaggaaaccacagtgaatcccatcttctcttggggagaggaatattttctgggaattctctggagacaaccataagcagccctgatgccctactctcccacgaagcacaatgttaacaatgaaaggaaagaagggaattttgaattgcttactacctaggaagggccacccaatttcatacctgtgtctgttttcatcccttgctatgatgctgcagggagatatcactgtcccccttgtactgatggggaagccgaggctgaaacaggacaaagtatttgctccaggccacacagttggtaagaagtagaattcaaagctagttgagagaccccacagcttgatgactgagaccatggactctgtgatatgcaagagaggtgataggaagggaagggcatggtcgctttaaatgctacagaaggaaggaagggaagtgctgggtagaggagggtgtggtccctggtaagggctccacccccacgcctgtgcccacagtcctaggtgaggacaggcatttttgttttcctgcccaaatgttgcatttcccaagaccaccctggcctgccatgcccccatcctgtatctataaaaaccccaagaccctagcaggtgacacacaagctgctggacgtcaagagctgcagatcggcaaagaagacacaagcgtctggatgtcaagaagacgtcaagaggaacacgctggcagaagagcacatgacagatgctggcaggccatctactggcggaacaaagtggagtttggcctgggcagtcggaggagtgcccaggctgctgggcggcctgactccagggggaaaccttcccactccatccccttctggcttcccccatctgctgagagctacctccactcaataaaaccttgctctcattctccaagtccaggtgtgatccgattcttctggtgcaccaaggcaagaacccaggatacagaaagccctctgtccttgggacaacgtagagggtctaattgagctagttaacacaagccgcctatagatagcaaaactaaaagagcaccatgtaacacacacacactgaagcttcaggagttgtaaacatccacccctagacactgccgtgggatcagatcccgacaactggcccatctctatggtcccctagaggtttgagcagcggggcactgaagaagcgagccactccgacatcacacaccctgcgagggggacaagggaacttttcccatttcatctggacttagaatgctatttcatggaaactgtacaaccatgggcaagagacttgacctctcagtgcctcagtttcctcatctataaaataaaggctatgtgatattttctgcctggatggtgatagtgaggattatatgaatcaaaacaataaaacactagaaaactagccagcatagaaaatgttttaaaagaactgctatctacaatgcacacactttccgtgtgtgtgtgtgtgtgtgtgtggttttcaacacaatgcatgcactattaccccattttgaatctctgccaggttcccagggcctgtcctctttaccacacttggtacctcttaataaaacgaagttactggatttcaagcccaggctctggaaatattggaactcaaaggctgtgctcttgaaatatgtccttcgcacgcctaccttccctgcctgctgcagttctgtctctggctgattaaaacctgcttttgcccagagcaagctgagtggcagggcatgctatccctttttatgaaaatccagcaagcgggtgtaaaaggaagataaccacacccctgccccatgtggaggccaaagatacttaattatctgaaacccagataaacagcaggagcgggttggtagactagatgtggaaaagctgaagcgagccagaggggctgcaagaagaattattaaaaactaatgatgtgattcagtgctggaaggaaggcgagaaaatgagtctgaggttgttgacagcctctgagagttcttgcctgcagtaagatgggggcaggatgggtagggagatggggtagcagtgggaggtactaggaggtgggtggaacatagggtcaagaagtgagaaaacacaggcgtttcaagcattatctgccagatgtttgctgcctgttttccggaggcagttttgtgttactgccctgttccagtaaagttgataaaattgccaagcctcaagaaagagatctctaaatgccattttgcacattggaaaccaggggtcaagcaaagggaagtcagcaagggaacacacactggaaattcagagtgaggagcacactcagagttcacacctgcctgctgggagctcacttatggctggtctgtgaacttgacctcctgggcctgattcagggcaagtgggtgtcctgggttggggtggttcctgatgcatctttctgttagtaagcatttgatgtgggttatgtgagcatgtgtgtaaagggcttagcacaagcctaggtccacaataaggggtctgtaaatgccaactgttgtgggccttaagagttattacgggaaccgggttctttttctacagcacattcccagcagactgacttcacaaactttgactgtctgcattggagctcatcattttggtctctgaaataaacagtttatgtgcagagaaatggtgatactgaaacaccaggggtttggtctaggtcctgctgctcgccgcatagaaagcccatcactgacaagatgagtattgccaaggaagattttaattgcgtgctgcagccaaggagatggagctcagtctcaaatccatctccctgaccaactaaaactaggagtttacatagcagggaagaaatgtaacaatgtataagaaaacaggaactcgggaggagcaaggaagcaatcatgaagaaaacaggaactcgggaggagcaaggaagcaatcatgatgaatgaggggtctggtatctcatctctggatgtggtaatctggtgagtttcagttctttgatattttttgagaggcctgggggtcccttcctgaggaaataactcagataagacaaatgagggcttcaagctttaagatcagaaaggtcaacttctgtatttatccaaaagagtatctatgggccgggtgcagtggctcatgcctgtaatcccagcactttgggaggccaaggcgggaggatcacgaggtcaggagatcgagaccatcctggctaacacggtgaaaccccgtctctactaaaaaatacaaaaaaaagttagccaggcgtggtggcgggcgcctgtagtcccagctactcgggaggctgaggcaggagaatggcgtgaacccgggaggtggagcttgtagtgagtccagatcgtgccccactgcactccagcctgggtggcagatcgagactcttgtctcaaaaaaaaaaaaaaaaaaaaagaacatctatgatgggactattgggtcagtttcaatggtacagaaaagtccaaagcctgacttagtaaaatctgtccaagttccaccacacacaattcaacattgcagaacaagacaagaccaagtgtgggactgggggcatctaatcgggggtttgtccttgcgttgtaaaagagtaaggcaaagagaaaaggggtcctggcattgagaataaagataacagaacagcttaaggttaagggctctgccccacgagacagacaccttgggttcaaatcctggtactactttatcctagctggtgacctcgaacaagtcactttgcctctccgacctcaatttcctcattcataaaataaaagagatagaacttactctattggggttcttgcgaggactcaagaagctaaaattaaggggtgaatgcatgcaggggacgtagcactcagggtggcatatcagtgcccgcgggaaacagcaactctgtgtgctccctcatgtgtccaaggtcacagaccaaggacgtcagagagccaggatgatgacctctgatcccacatctcccgagttctcaccattccctgggagtagggaaatctccctcctcttcttcctcactgtcgtggcaggaaaagaggaagaacaggcaggggctgtggatcttgggggaaaggacaagttaaatcagctgagaaaaaggaagcccatgaaataatctaaatgtgagggtgccagagctttggggctggggcaggcagtcccccccggactcatgcttaaaagagtcaatgcaggctgggtgcagtggctcacacctgtaatcccaaggaggccaaggagggcagatcacttgaggccaggagttcaagaccagcctggccaacatggtgaaaccttgtctctactaaaaatacaaaaattagctgggcatggtggtgggcacctgtagtctcagctacttggaaggccgaggcacaagaatcgcttgaacccaggagacggaggttgcagtgagccgagatcgcaccactgcactccagcctgggcgacagagcgagactctgtcacaagaaataaaaataaaagagttaatgctgcgagaagcattggaagtgagacacattctcaaccatgaaataggggctgactcacatggtctctgcagcagctgatgggcattaaggtgattacttcgcagcaggtgtgacaaaacaaatctcaccgcggctattacactacggccaccgggagtctttcagcccagggctgtcacattcctgtcacttaaagcttcctcgcctgagcctgaaaatgatcagtagggtctgaaatttttttctctcctactctgtgccaagagtgtctcacgtgtgtgtgtgtgtgtgtgtgtgtgtgtgtgtgtaagaggattgttggggtaaggatggagtgagaaagaataatttattgcacatttgacaaatattcatgacactcagtgccaggcattgttccaaatgctgggaagacgttgtgaggaaattggataaggtctctgccctcatggagtttataaacttgaaggaattatcttggtagtttatactcaaagcttccttccttcctccttttctttcctcccttccctcccttcccctgtccgcctctcccctccctctccccctcccttctctcccactcccttccctccttccctgattcacttaataaacattctggagtcagactgcatcctagcttggctacttattagctaatgcagcatcaggcaaattttgtaacctcccattacttcccatccaaaatggagataagaacaggacacactcacaggataagccccacagcttcgggaaaaaccatctctgaggaacagccaagaaagtgaattcaagcagggccttggctcaaagcctgttggcctggagggctgaggatgatggatgaggactttgtgcagatctgagcatactgtgtcctttgtcctggttgccttagtgtccaccgtctatctctgagattgatgaggcaggtgcaccactgggcaagctacacaccatacaaggctgagcctggttggggagcgtcatcaccatccaatactgtctgtaggactccattccagcaagacatctgggggcctggaagggggtccctcccctggaaaatgtcacagaatccctgatctatgtcctaacaacactcaggtccttctgtatcctttagataatttgatttatcctagggtctactgttgacatttgtccctaagtggtcagattcatgggctagatgaggacattcaatgagatcacaagtcaagagcttactgcagagctgcctcttaagaaatgctagttattcttgtccttaagcctgggctaagtgacaggcatgtgcacatccatacacacacacatatccatacatccatacccacatccacacacgcacacatccacacccacacacacatccacacatgcacacacatccacacgcacacatacacacccacatccacacacacacccacacaggcacacacacatcctcacacacacatacacacacacagatccacacacacacatccacacacccacacacatccacacacacacatccactatacacatatacacacacatccagacacccacatacgaacacccccacacacatccacacatccacatccacacacatccacacacatccacacaaatatccacacacacgcgcacacagtaaaggtcagtaagtgcacagtggtaaccattgttcctgcagcagcaccattaggtaaataaaaataaatatatatttttaaaatttttaatttgtatttgtatttttaaattttttgtatttttgtagttttttttttaaacaaagggatcttgatcttgattacttaaaagcaagactcatgttctctgtcttccttttattttattattattttgggatagtttctctctgttgcccagactggagtgaaatggtataatctcagctcgctgtagcctccgcctcccaggttcaaatgattcttgtgcctcagcctcccaagtagctgggattataggcgcacgccaccacacgtggctaaattttttgtatttttactagagacgggtttttgccctgttggccaggctggtctcaaactcctggcctcaagtgatctacctacctccgcctctcaaagtgctaggattatagatgtgagccaccacacctggcctctctgtcttccttttaaaacacagggaggaaaggattgtttctgaatgctcacgtatcattttagcttatttccagacaaaagggaagatatttcttagccatgaagtggaaatgttctagaaccttcctcagagatgtctgtgaaaaggaattatgcatgggaagcatttagctcacggtcttgcacatgcaaagggctggataaatgacagctgtgaatactgcagttcattttatgtggcgagagggaaggtcatataacgtcccagtgagagtatgggctttcaggagttcgaggctgcagtgagctatgacggcctcactgcattccaccctggacgacagagcaagaccctttatctaaataagtaactaaaaatttataaagaagaggtgttttaaaagcagaaagagctgagtctgaaccctaactccccatttactagctgggaggccttgggcaggctgtttcatttcttcaagcctcagtctcctcatctgcaaaatgggatgatcacagactcagcctcttggtgttgtgaaaaatcagtgaaagaataggggaggggcctagcctgcctaaaagatttgatgttcctgctgcttccagtggagggtgggtgggtgggtgagctgacaggcagcgcagggaattttccagccaggttgcctcttaacctctggtttggtttggttttgcttgtaacctttcactgtttgtcggcaaaagcccaatttttaaaaaaactttttcattttaatttgatgtttttatattttttgtatttttaatttttttcttttagcgacaggctctcactgtgtctcccaggttggagtgcaatggtatgatcatagttcactgcagtcttgaacccctgggctaaaccgatccccccacctcatcctcctgagtagctgggacaaaggcacacacagccacacacagctaattttattttttgtagagacagggtctggctacattgccctgtctggtcttgaactcctgggctcaagcgatcatcccgcctcagcctcccaaagtgctgtgattacaggtgtgagccactgcacctggccttaatttgtgctttttagagacagtgcctctctctgtcacccaagatggagtgtggtgatgcgatcatagctcactgcagccttgaactccaggactcaagcagtcctcccacctcagcctcctgagtagctgggaccacaggtgtgcaccaccacacactcagagcccaactttttaaatgagagtttgtcttgaaagactacctgcaactcttcaggaatgctgtgctctgtagataatgaacgttcaacccatgtgactctgatgttgctagagaccccatcttgttatttttccccattttagaaatgagggaactgaaattcagagagtccaagtaacctgcccaagctgacaggcttaaaaaaaactcaggcctatctgagagcagagtgtgcgctcgtgaaagacaccagcacagggtacagcctctgcattcccttccctctttcttccccgtgggtgatacagaaagaacaaaggttttggagtcagattggcctgaattcaattccaacttcagggtcttgcttaaaacaggagatgacaatatccacttccctgggtggtggtgagaatcaaatgaggcttttaaaaacgtgcataatgcctttatctcagtgcctggcacacagtagacgatcaacaaatattaggttttcctctctcctccacacacttctttccttggccacatccccaaaacactcacatgaacctgagctcagactcccggcggaccaagacttcccggagacgctgaatttttgccatctccagctcaatctcctctggcatcatggttgtctccgccatggagatgatgtccagctgatctgtgcaggagacaggaaatacaaccatcaggaccccaaggctgcaccatgggacagaccctgacatggttccagggcacagccttgctctgcgaccatcatacaccttgaggacagacttcagcctgtgccgcaaatgtgtattcgtgagcacaccctttgggaaccagaaaatgtgttttccaaagtaatttacttcgtttgctttgttttgttttgtttttagacggagtctggctctgtcgcccaggctggagtgcggtgaagcgatctcggctcactgcaagctccatctcccaggttcacgccattctcctgcctcagcctcccgagtagctgggactacaggtgcccgacacctcgcctggctaatttgttgtatattttttagtagagacggggtttaccatgttagccaggatggtctcgatctcctgaccttgtgatctacccgcctcggcctcccaaagtgctgggattacaggcgtgagcactgcacccggccttgtttttgttttttgagacacagtcctgctctgttgcccaggctgcaatgcagtggtgtgatctcaatctcagctcactgcaacctctgcctctgaggttcaggcgattctcccacctcagccttataagtagctgggattacaagtgcacaccaccaggcccggctaatttttgtatttttagtagtgatggggtttcaccatgttggccaggctgacgtcaagtgatccgcccgcctcaacctcccaaagtgctgggattacagtcgtgaggccaccacgcctggctgggaactttgttatgatggctagtggaggctcacaagtgggctcacaaaagcctgattaaggccttgtcagctcctgcctggtcccagattctaagcctctgctccccctgaccacgaccactttgccctgtggtctaagcctctaagaccagccgactctaggcagaagaaagttttatcataattatcttatagtaatactactaccaagtagtgttaagtattttttcatttgttttggagactaggcctcactctgtcatccaagctggggtgcagtggtgcaatcatagctcactgccgcctcgaaccctgggctcaagggacccttccgcctcagtctcccaagtagctggaactacaggcccacctaggtaactttttaatttttatttttttgtagagatgggggtgtcactatgttgccaaggttggtctcaaactcctggcctcaggcgatcctcccaacttggcctcctgaagtgctgggattacaagcgtgagcatacatacggatatataaatatgtgtgtgtatatacatatatgaatatatgtggttttttatatatataatatgtgtaatatacacagacacacttttttttcttttttgagacggagtctcgccctgttgcccaggctggagtgcagtggcacgatcttggctcaatgcaaccttcacctcccgggttcgagtgattctcctgcgtcagtctcccaagtagctgggataacaagtttatgccacgacacccggctaatttttgtatttttcgttgagatggggtttcaccatgttggccaggctgatcttgaactcctgacctcatgacccacccgcctcagcctcccaaagtgctaggattataggcatgagccaccgcgcctgggcagacacactttataaagactgaaaaagtccactaaaatgttagcagttaaaatgttaatatatatgcgtgtgaatgtatatttatactattatatgcatatacatatatccactgtgatgtaggtcttatttttctaatataaagttaggacctcactatttcgttatgtgttcttttcacctagcaacatgccttgagcgctcctgcctgtccttggatggtcttcctcggcagcagcatggaaggcggggcggttttctatttgtggctgtatcacgaagcacttaagcaatccacagacatgtaggttgtttcctattttttccccactgtaatcatgaggaaaaaaatgtaagaattattttcaccgtaagaatgttccagtgaagaacgttctcaaagtgaaaacttcgcacacatctacagggttccttcgggctatgtttctagggtgaatggctgagatataagtgatgtgctattcaaggcctttgatcggtagtgggggagactcggggcaggagatgtttttggcgtaccctgagacaccatcacatcatctgtatctgctaattccttccacacccgcccccaagatggagcccaccccacacctcagttctacaagggcgtctgtctttttccttatactcaaggaataatgaaagttggtataccttatacccatgatttggaaagttgttctctttttcctttttctcttttttttttttgagacggagtatccctctgttgcccaggctggagtgcagtggcacaatatcggctcactgcaacctccgcctcccggattcaagcagttctcctgcctcagcctcctgagtagcttgggttacaggctcgtgccaccatgcccagctaatttttgtatttttagtagagttggggtttcaccatgttggccaggctggtcttgaactcctgacctcaagtgatcagcctgccttggcctcccataatgctgggattacaggtgtgagccaccacaccaggtcttcttttttctttttgtagagatgaggtctcgctatgtggcccagactggtctggaacttctggcctcaagcaatcctcctgcctcagcctcccaaaatgctgggattacttacaggtgtgagtcactgtgcccagagaaagttgtcctgtttctacctgtccaactgccttctatgtcctggggccctggcccttgcacacgtgcacagggtttagggcgctgtgatttgcaggcttccctgaagtcagtccctacctgcttggatctctagatagaacagcgccctcttctaggagtccacctgatgcatttgtccacctgtgggactctcccggccctgagttgttcagcagacgttggattctcagtaaattggagttcctttccattacctaccccgtgatgtgtccgttccatgtgccaaaattatctgcttcccctccaccaatcaaaacaccttattttgctaaagagacagaaagaaggtaattctctggagttgattctcacattgaaatgaatggcctctcttcattctctctgagacaattccccctttttttttttttttttttttttttttgagagcaagtcttgctctgttgcccaggctggagcgtggtgatgcaatctctgctcattgcaacctctgcctcccaggctccagcaattctcctgcctcagcctcccaagtatgtggatctacaggcgcatgtcaccacgcctggctaattttttgtatttttagtagagacagggtttcgccattttggccaggctggttttgaactcctgacctcaggtaatctgccagccttggcttcccaaagtgctgggattacaggcgcgagccaccgtgcctggcctgacaactcccagttttcaagagaaacagtaacaaaggcaatggaaaaggccaagcaattatatggggagaggaaaatatttgacctgtcagtcatcagcctattgaagattttctcctctttgagttcagcatctcagagcaatgtgtgcttcttttatattttcagggagcaacaatacttcatgaaatagataagtgcagaacataaatagtgcagaatctgctattgggttggagagggggtcactgaacaactgtataagtgggaggaagagagtggaggtgggtgaatgggaaaaacatgaaattggagagattcacaatcacctcctccttgccttctaaagatggcgggtcccgaagattatctggccacctggccgagcctctgccagggaagggtgaaaagggagacacagtggagggagaggagggagtgtcaaagagaagcaggaaggagagaggtcagaggagccacctcaggctgtggcttggggagagggagcgatgtctgtttgcagaggatttgtaggaaatgtctcatgtgatgtgctgcctaaagatctcctggggccatctggttatgcttcaaggcccctggaatccaatttcgggtcctactactgtccctgacaccatgctgtggtggctcctgggattgaagcagtgaggacaggcttgagaaaggagggaaggagggaggaataggatcgaaatattaatattggctgggcacggtggctcacgcctgtaatcccagcactttgagaggccgaagcgggcggatcacctgaggtcaggagttcgagaccagtgtgaccaacacggtgaaatccagtctctactaaaaatacaaaacttagcctggcatgctggcaggtgcctgtaatcccagctgcttgggagactgaggcacgagaaccacatgaacctgggaggcagaggctgcagtgagccgagatcataccactacactacagcctgagggacagagtgagactacgtctaaaaaaaaaaagataattaatactgagtgctactgtgtgctgtgatgctaccaagctagaagaccagccttaccagatcagatggcctgggtttgagttccagttctgcccctccctggctgtgtggccttggggagttggttaacctctcagcagctctgtttctcctctgtaagggagcccaccacccaaaacagatgtgagggatgaattaccccggcacgtcacgtttaatatatgcttgcaattgccctcgttatgaccgccgcacctgctctgcccatcacctcttttaatcctcgccataagccagcaagttcagtaggttctcattttcgcaaagaaacaaaggctcagcgctggcaagggaaagagctgagtccaggtctggcttcaaattcatgctttttgaccctcacagctgcctctggtccaggcagctgttctaagtccgacaccccccattcattcctatctcagagtcaagcgtggtgccataacaattcatggccagtggggaggcttaaaacaaaaggaatttaatctcttggagttcgggaagccagaagtcggaaaccaaggtgttggcagggtcacgcgctctccagaggctctagggatggatcttttcttggcccttgcagcccccgctggctccttggtttgtagtattaggttggtgcaaaagtaattacggtttttgccactggatgtaatagcatcacttcaacctctgcctctgttttcacaggttcttcctccgggtggctctgtgtgtcttcttttctgtctcattagatttagggcccaccctaatccaatgtgagctcatctggatcctgatctgaattacccctgcaaagaccttatttccaaataaggtcacattctgatgttttaagatgcacatgaacttcaggaggccacaaacccacaagaatgaatggccacagccttgcaagcttcctgacaacaatgtcactctctccaggggcttgagatcctgcacacagagcacagccttggctggaagcagcaggggtcccagcgggagtcaccagggggtgagggaagtgcatgggggaagtggggtctggcaaaaaacagctaggcgggggcagtgtcagaaatcctcatttgacactagtcatcagccgcaagacctcgaatgagtccctttatgtctttgcgtcactttcctcctctgtacaagaattcaatagttacctgtgctggaggctttctgtgtattatctcatttaatctctattttactgagatgactctgaggcttagagaaggaaagtgacttgttcaacatcacacagccagatcattgcagagatagtattcaaacccagcttgtgctctctctctccccccccaccccccttccactccacaaccacgtgaccttaaccacgtaatccagcctcctggtgagggctgaatgcatttgtgcctgcgaaagtgcgtagttaaccaccccacgatatgagtatccttgtttttctcatcacagttcagatgggcaacctgatttccatgggacagatgctgaaaacggcaacacaccctggggcgaggcgtgggacgaagagaattaatcacatcccaggaactggcattttacctccatccccgggggaggatggaggcggtggtgccaggctccaggtgcttagcttggatttggggcaaagaatggaacaaagacctatgttgaaaagtcttgctcaaggatgtttttcttccccaagagaaaggaacgaagcctaaagcttgaatcagatacaaatcgttagaatcctttcttgccatgagctgtctctgcatcaggcactgtgttgggctcattgtaaacctcatcttttttttttttttttttttttggtggggcagggtctcgctctgtcttccaggctggattgcagtggcatgatcttggctcactgcagcctcaacctcccgggctcaagcaatcctctcacttcagcctcccgagtagctgaaattacaggttcactccaccacacccagtgactttttttgtactatttgtagagatggggttttgccatgttgcccaggctggtctcccaactcctgagctcaagtgatctgcccatctcagcctcccaaagcgctgggattacaggaatgaatctcatctcatttagtctgcacaataccttaggccaggggttgatatcctatggccaggggaccaagcgcagccccatgcttgatgttgtaagtagagttgttctggaacactgatcacgctcattcatttacatgtcatttatggctgcttttgcattgcaaaaactgagtagttgccacagagactccctggcccacgaagcctcaaatattcactacctggctctttatagaaaaagttggccaaccccttccctgggtggtatactgtaatctctccagtttaaaagttaggaaagccaggtttatccagtaacgataataactaacatttatcgagcatttatcacatgccagcacctgtgcattaccttatctgattctcaaaacagccctgggtggtcagtgctgttatcccatttcatagatggggaagtcgaggctcaggaaagggagtaagtgatggaggtgagatttaaaacaagatctctcttactccaaagctcttgttgtaatcaaccatattcatgtaagaactacctccctacgtaagtaccatcatcatcataacaaaactgagtagactgtattgctttagacacagagggagtagttattcccagacatcagtgggcaaggtgaatatctagggaggttgtttaagaaacaattccctgcctccacctccaaggattaggataaacctgggttggggtgttgtgtccagggaccttaatgaaggaggtcttcagatcagagtgaaaaatgctgatacaggacctgaataaatgagtatcacacacagtcagtttctttccagtctgaacttgtgtgatagaaattagcctgctagactgttcctttcttgatcacattttccaactagaaggcaggcatccgacagctgccaaggaatgtctccacgaggaggacaaatcacgggaagaaacgggaggagcatttcaagctggctagagacaacaagtctctcacgcacacttccaagcaagagcttgcttgctgtgtggagacagcaaagcatgaaggcacagacgtccccagggctccaactgccactgctgtcattgagcttccaggagctgagtcacttctgggggaagaggcagctaaatccatcttcccatccccaaatgccaccccagggagatgcatgcttcctgagcggtggcaccagcaaacaagagctgagcacccgggcagccctggtatgcaccagcaggtttaatcactgatctcaaaacaaaacaaaaagtaaggctacccagggacaggagtggtggaggtgatagaggatgagggctggtgatctaaaaacttctagtttaaatacaagcttggagggttaaactgctggggaccagagagatacctttcctagcccatcttttccaatcaggggtcatggtaggaatttaagctcagggtgccctgcacaacctctgcctttacttctgctttataactttacgtgcctagtactggccccagagcttgctcattttgggtgtttaccggagccatgatctagctcatatcaacctctctttctagattaataaaatgaggcttagagaggtcataagtgattggtcaaactcactcactcaattgttgcagcaacatcaagggttctgtctagatcctgctactcgctgcacagaaagccaatcactgaggcaatgagtattgccagagaaggctttaattgggtgctgcagctgaggagatggaaagagactcaaatccatctcctcaacccactaaaattagaggtagcaaggaagaaacgcaaccatgtgttacattgtgatacatccctattctttttttttttttctgggaaattattaggaaggggtaaggaagagaatctggtcaacaggatgcaggtggttggttaggcaatcgtgatggttgaggagtctggcatctcattgtccacatatagtgatctggtaaatttcaattccttaatactatctggaaggccgagaggtcagtttcttgagaaaggaactcaggtaaaatgaatgtaactttctaaaattttaagattaggagggggctgggcacagtggctcacgcctgtaatcccagcactttgggaggctgaggcaggtggatcacaaggtcagatagagaccatcttggctaacacggtgaaaccctgtctctactaaaaatacaaaaaattagccgggcgtggtggcgggcacctgtagtcccagctacttgggaggctgaggcaggagaatggtgtgaacctgggaggcggagcttgtagtgagcagagatcgcaccgcggcactccagcctgggtgacagagcaagactccgtctcaaaaaaaaaagaaaaaagaaaaacaaaagattaggaaggtaaatttttgtgtttattcaaacaaaacaaaacaccgtaaacatcagttctaaggggcaattggggcagtgctataatgagtggtagaaatgaaactcaaacccagatctatctgatcccaatgcccatgctctaaggtcaaaagagctacaaaacagtgtttccaaaactctcaacactgcatagaatttaccccagctacatattctgtactctgtcatataccactcagtatgtcatgacattcacttttttttttttttttttgagacggcgtctcgctctgtcacccaggctggagtgcagtggcgtgatcttggctcactgcaagctctgcctcctgaattcacgccattctcctgcctcagcctcccaagtagctgggactacaggcgcccaccaccacaccagcctaattttttgtacttttagtagagacgggtttcaccacgttagccagggtggtctcgatctcctgacctcatgacccacccacctcggcctcccaaagtgctgggattacaggcgtgagccactgcgcttggccgacattgactttttttactcaaactccctaacggaaatgtcccatgacatccacagacaataaatgactcttacttggcataattagaaaatagccatgaaaataaacctgaggaaacaaagcaatactgttaaattcttgctaaatactatagcctgcttaaggttcagaatgaagcttgaattttctttcttaacaaggtgaatcagcaagtactaggggcattaaagacaaagctagcaccaaattgtggctttctcctttaggtaatcaaaaaggttgataattggggagaaaatgcgtagctttcctgaagggaaattcattgctgtttgatggtacaagcatgaaagtaccactgggggtacctatcccatcccctgttgtagaatagaattccagtcctttgcgttggaaaggtcttaaacgacgttttggtcagcctcatacctgtgttggataggatgtaaaatgacttggcaagatgtggttcccagggtccctcaacaaacggttctcattcaaacttcagtgagaactcaagctagaaggacaattctcagccatgggttaagtcctactcaaagaggaatcagccattttgagcgattatttcaacccagctcatataacaaaggcaattaaatgaagggctgggggtgggggtgctattcatttcagtcattggaatatacttgggtcacagccgctgcatttagggaaggacatgagggactcaggtagggggagtcagtgttgggggagaatcaactttcacctaatatgtccttttctcttgtttgggtttttaaatatactttttttttttaatacttttatatttctagaaaatgtggctggatgtggtggctcatgtctgtaatcccggagctttggaaggctgagggaagaggatcacttgaagccatgagtttaagaccagcctgggcaacagagcaagaccccatctctacaaaaataaaatgtaaacattagccagatgtggtggcacacagctgtggtcccagctacttgggaggctgaggtgggaggatcgcttgggtccaggagtttgagggcttcagtgatctatgatggtgccactgcactccagcctaggtgacagagtgagacactatctttaataaaaaaaaaaaaaaaatttaagaagagttgcaaagagcataaagaattcccctctactcctcattaaatttccactattgttaacattaccaagaagttgacattggtgcattgttattaactatattcattgaaattttagcaatttaccaatggtcagatgttacatttgcaaaacagatttaaaattaagaagagagaaaagaaaaggggttggcgtgtgcaggcaccatggggagccaggccagcccttgaagagggcaagagaggggagtggttctgggcatgggcttttgggtttcagagtccagctctcacgcttgagccatgcatcagtgactctgggcacctcagtttcttcatctgcaacactggggaacaagcatacccatctcacaggtgattcatgtaagtgacaagcatacagaaagttctctgtaacatatgtttgctcttatatacatttaataactatgcattgagaacctgcttcgtggcagaccctgctctaagcaatggggaaggagcaatgagcaaaacagacaaaaatctctgcccttgtggacctgagcttctagcaagaggcttacactgttgtggagaacagttgctctaataatctgcaggggtcattggcttaagacagacgtcgcttcaagccctggctctatcactaattgtgcgacctgggcaaattacttgatctccctaagtctcagtttcctcttctgtaaaatgggactaataactcctgcctcatgaagttgctgctgtagggatgaaatgggatgatatacttgtccctcagtatccgtgtgggattggttccaggcctccctttggacaccaaaatccttggatgttggccgggcgcggtggctcatgcctgtaatcccagcactttgggaggccgaggtggatggatcacgaggtcaggagatcgagaccatcctggataacacggtgaaacgccgtctctactacaaatacaaatacaaaaaaaaaaaaaaaaatagccgggcgtggtggcaggcgcctgtagtcccagctactcaggaggctgaggcagaagaatggcgtgaacccgggaggcggagtttgcagtgagccgagatcgcgccactgcactccagcctgggcaacagagcgagactccgtctcaaaaaaaaaaaaatccttggatgttcaagacccggatataacagggtgaaatatttgcatagaagccccacacatcctcctgtagactttaagtcatctctagattacttataatccctaataggatgcctacacatcacttcatttacacagattcagcataatactcaaagttttgcttcttggtaatttgtggatttttttcctgaatattttccatccataattggttgaatctaaggatgcggaacccacagatacagaggaccaactgtatacaacatgtgcttggtgtagtgcctagacatcacaaagagtggtcagtagcattattcctgccatcacagtgcctttccctgaaagaagccagactaacactggggagaaaataaaattggagccaccatcaaatttgaagaacacagactcatggtcatggggaccatctcttggcccctctaggtgagaccacagccccgcagctccaacagacccatgcctgccctgagaagagaatctagagggggccccctccagccttttgtcaagaagccagttgctgctattgacccaaaagagagtcttgaatcccaagggaatagatctgcgccccatgaccagggagccaatatctgaatgcatttcaaaggctcctggtggcactctagacttcgttgtcatcaatcattcatgtaggaaagaagctcattccaacccccaagcatcctattacgggatgcaccaagtgcctcgccttcttgctataacgtgaatgtaatgggaagccgcccgttgcttttaatgagtcaccgtttcccaaagagatgaagtcactgcttttaacccagaagctcctggctgctcgatttctcccagcctgcctcgtggagaggatgccactgggcccccaagagcgatcatacctttctttgcactccgccgtcccatacatcccgtctctgtgaggtcgccccacatggaagaatttgcggctgaggaaactgacaggcttcagatcctggctatgattgttattctccagtggcacctcaagcacatttttttaacttctgcgagtttctgtttccccagccacatctgacgtgtcaaaggacacaaaagtaattcaggaggacgcaccaacagcacgtgaagacgcaggcattggcgtcaagcagacatgagtagatggtccggcatctttctaacggccgacctcggcaaatgccctaacctctttgagactcagtttccttatctgtaaatcgggggtcataaaagagagaatgtatagatcagtgcggtccaattgaaatagaacactagccacatatgtaattttgaacattccaggaaccacattctaaaaaataaaaaaggctgggtgtggaggcacatgcctgtaatcccagcactttgagaggccaagggtggtgggcatatcacttaaggtcaggagctcaagaccagcctggccaacatggtgaaaccccatctctactaaaaatataaaaattagccgtggcagagcacggtggctcactcacgcctgtaatcctagcattttgggagtccgaggcggtggatcacctgaggtcaggagttcaagaccagcctggccaacatggcgaaagcccgtcttcctaaaaatacaaaaattagccaggtgtggtggtgtgtgcctgtaatcccagctattcaggacgctgaggcaggagaattgcttgaactggggaggcggaggctgcagtgagccgagatcgtgccactgcactccagcctgggcaacagagggagactctgtctcaacaagaacaacaagaacaacaaacaaaaaaaattaactgggcatggtggcaggtgactataatcgtagctactcagaaggttgaggcaggagaatcgcttgaacctgggaggcggaggttgcagtgagccaagatcgagtcactgcactccagcctgggtgacagaacggactccatctcaaaaaaaaaaaaaaaaaaaaaaagtaaaaagagctgggtgcggaggcacatgcctgtagtctcagctactctggaggctgaggcagggggatcacttgagcccaggagtttaagtccaacctaggcaacatagcaacgagaccctgtctcttaaaaataaaaaaaaagataaaaagaaatgggcgagattaatttcactaacatattttatttaatccaatagatctaaaggattatcagttcaaaatgtaatcaatatattaaagatacgaatgagatgttttatatcctttttggagggagtatggaagtcttaagtccagtatgtatattttaccctttaaatagatctcaattcaggccaggcacggtggctcacgcctgtaatcccagcactttgggaggccgaggcaggtggatcacttgaggtcaggagatcgacaccagcctggacaacatggtgaaaccccatctctactaaaaatacagaaaatagccacgtctggtggcacgtgcctgtcatcccagctacttgggaggctgaggcacaaggatcacgtgaacctgggggatggaggttgcagtgagcccagactgcgccactgcactacagtttgggtgacagagtgagactccgtctcaaaactaaataaaggaagaacagatctcaatttggaatggccacatttcaagtgctcccaagtcccaagtcattgttcaccatcctgggaccctccattcatctccttctttcttttctccctgataccttccccttcctcaaagattctgtctccctgaggtgtttctccatttcaggactcttctgcttccctcttaactgctctcatgaaaggacttctgatggaccctctcgtcccacctccagcccctggcagcctatgggtggccctgcctttggtcagggcctcagcacgttcaacctgggtggagccacaggtcacacgagaccctccccttcagcagggactgtgaggaaacccttagaaggagtgtgtgcggtgcaggccccacaggtcggctgccccctaaatcctaataggactggctcagctgtgacccagaatcccctgcagaatgaatgcctgacttcagctctctcaggcagtgtagtctgttgggagccaggaaggtggggagaaggacacaggtatctctgtggaggggactccacagcagcatctgagcaaaggcaccagaaaactggagatgggcagtgataagttgcaaagagccaacagaattcccctctacccccctcactcaatttccactatttgttaactttaccaagaaactgacattggcacattgctattaactatattgattgaatatattgattgtgtgataaggggcagctgggattttccagtaccctcatccctttgtttccttactccctaccccgactccttatctggagctggaaggtctttgatgagctgaagaaagacacgggttattaaataataatgctgcgacatcttcccgcaagaggcggtcagtgttggcaagagaaaagctcgtcttccaaatgctctgaacaacctgaatgatgagctggaagaaatgtccagggcctcagaaatcaaacaccatccctctaggaaggaactgggaggaaggaaagggaggcagagagaaggtgtccacagatgcccttcccaggtggactcaaggagaagctgtggtccttcccctctcgtgaaccacaagattatgcagaactggctgattgtaggaatttctttctggaaacatgctcttcctctgtgacctcatagaagtccaagatctaagaggtccaagtacaaagaaatgacaaagggagcagaggagagcatttgatgctgttgactttttttttttgttttttatttttatttttttagatggagtctcattctgtctcccaggctggagtgcagtggtgtgatctcggctcactgcaacctccacctcccgggttcaagtgattctcctgcctcagcctcccaagtagctgggattacaggtgcctgccacttcgcctgactaacttttgtatttttggtagagacagagtttcaccatgttggccaggctgggcccttgacttttgcagtgaaataggaaataagggatgaaggtgaagaggtgagattgaggagtagaggagaaactaagatagcccatttggggaggaatcctgggaggacccaacacttgagacaaagagtttctttcacaagaaagacaaattccagcctaatcctctggaagtgtaatctgagaacatctgaagactcattctgagtgcaggagccaaggctagagcaagagcttcatctcactgctgctccatagcctgtgagtgctttgacatttggagttggacgcttctttgtgctgggggctgtgctaaacactgtaggctgtgcagcagcatccctggcctctgcccactggctgccagtagcatcctctccccaacccaaaatgtcctcagacactggcaagtatcccctgggggacaaaatcaccctttgttgaaaaccacgggtttagactcagagtctttctccttctttcctttctctcttttccttcctttttctttctttcctcctttcttccttccttagttccatcttcccttccttccttcctctttcttcctttctctttcttttttccttccttcctttctcccttcccttcccttcccatttccttttgcccctttcctttcttttttcctttctttcctttcctctttttatctgaaacaaggtctcactctattaccaagtctggagttcagtggtgtgatcatacctcactgcatcctcaagcttctgggctcaagcaatcctcccacttcagcctcctgaataggtgggactacaggtgtgcaccatcacgtccttttaattttgtagagacggagtctcaccatgtcacccaggctgatcttaaaccggcctcaagcgatcctcccatctcagacccccaagctgatgggattacaagcatgagccactgcacacagcctaaacccagagtttttttattgtgctcccagggcacaggtatgagacttacctaggtgtgattaaaaaaaaaaaatccatctacctgggcttctcctggacctactgaatcaaaatctccctggaggagacccagcaagctgcccttcaagcaggtgattcttcattaaacactctatgcctcagtttcctgaaatgggaaggataatgataacatctatctcaagggttggtatggaggttaagtgaggggattcacacattgagcacagtgtgctgaatgttagctattatcactcacattaaaggtggagaagcactggtttggagagatatgcattgagtgctcttgaagagagggaagaacaggaacccgggggcaggagagtgaacgctgctgtgataaccactctgctcaaatgccagccaagtactgtggctaatgatgagggggcacaatggggattatcccgccatcctagggctttcctccctgcagatcatcattgttcctgttgacttcatgctccagctgcctccccagctaaaacaaatactaacaactgatgatacaaggcaagaggggtgacagtggaaaaaaatgccaatctgtgtctcagttacaaataaacacaaacttagtggcttaaaacaacacacatttattatagttctggaggacagaggcccaacggacgtgaaaatcagggtgttgaaaccaacacaagtagtcccatagacagtttttttctttcttgataaacatagaaattgacctttctggtcttaactcttgaaacttaaagtttgttttatctgagttccttcctcaggagggaattccttgcctctcaaataagtatcaaagaactgaaactcaccagattacagcatccagacaatgagatgccagacccctcattcatcgggattgcttccttgcccgtcccaagttcctgttttgttacacattgttacatctcttccctgctgtataaacccttgattttagttggtcagggagatggatgtgagactgagttactggctccttggctgcaacacctgagtaaagcctccttccttagcaataattgttgtctcagtgtcggccttctgtgcagtgagcagcaggacctagacgaatcccctggtgttttggtaacagtgtcagcaggattgcctgtccttcttggggctctaaggaagaatgagtttccttgccttttctagcttctacattccttggccacctacattccttggcttatggccccttgcttcatgttcaaagccagcaatggtgaatggtgaaaggctggctctgcccctgcctggctctgcccctgcctggctttgtgcccctggacaagttatttaaattctctgagtttccactttaaaaaatttcccttgtgggcctggcacagtggctcatgcctgtaatcccagcactttgggaggccgaggcgggcagatcacgaggtcaggagatcaagaccatcctggctaacatggtgaaaccccgtctctactaaaaataaaaaaaattagccgggcgtggtggcgggcgcctgtagtcccagctactcgggaggctgaggcaggagaatggcgtgaacccgggaggcggagcttgtagtgagccaagatcgcaccactgcactccaggctgggtgacagagcaagactgtctcaaaaaaaaaaaaaaatttcccttgtaaagtgggtctattaatccttagcttgtaatatttgttcatttcataatagctagttgtgtggctggtaagtgagttatgtaactttcccaatcctcagtcttcattacctgttaactggggataataatagagggtacccttggatgcagtgaggattgaatgacagatcgtatataaggctcttaatgtggtgcctggtacatcataaggacagtgaggacttggtgaatgtcagttatcacaatcactgtctctatcctcaccataatcactatcactatcataatcatcaccactatcaccattatctttaccatcaccatcaccactatcactatcaccaccatcactgtcattatcaccatcactagcacatcactgtcatcgtcaccattatcactatcaccattatcaccatcattactatccccaccatcaccatcaccatcatcacgatcactgtcatcatcaccatcaccaccatcattaccacccctttcatcatcaccatcaccactatcaccaccaccaccaccatcaacatcactatcatcatcattgccaccaccaccatcaccaccatcaacaaaagaaaaagcagccaaactcagaattccacatcagctggaactagggttggggaagcacagaggacattagcccatgggaattctttgccccaacttcacctccctcccagaactcccttggctgggaatatcccacctcatacaccatcccattctgtgccctcttggaagatgagaagcaccaaaggtcttgtgtcccacctgcaatgtccacaaatactaatattaggcttagagaagagaaatgagaagagtgatattaagataataaaagtaggccaggcgcggtggctcacgcctgtaatcccagcacttcgggaggccgaggtgggcagatcacgaggtcaggagattgaaaccatcctggctaacatggtgaaaccccacctctactaaaaaatacaaaaaattagccaggcgtggtggcagatgcctgtagtcccagctacttgggaggctgaggcaggagaatggtgtgaacccgggaggcggagcttgtagtgagccaagatcatgccactgcactccagcctgggtgacagagcgagactctgtctcaaaaaacaaaaaacaaaaaacttagctgggcatggtggtgcacgcctacagtcccagctacttgggaggctgaggcaggagaatcgcttgaacccaggaggtggagatcacgccactgcactccagcctggcaacaggcaacagagcgaaactccgtctcaaacaacaacaataataataataataataaaagtaaattaggccgggcgtgatggctcacacctgtaatcccagcactttggaaggccgaggtaggcggatcacttgaggtcaggagttcgagaccagcttggccaacgtggtgaaaccccacctttactaaaaatacaaaaattagccaggggtggtggcgcatgctgtaatcccagctactctggaggctgaggcacaagaatcacttaaacccgggaggcagagattgcagtgagctgagatcgagccactgcactccagcctgggcaacagagcaagactccttctcaaaaaaaaaaaaaaaaaaaaaaaagataaaaaaaaggaaatttaccaacatttcttgagccttttaaaacttttttaaggctccaataagatcattaagtcctttctggaataaggagaggtagtaataaacaaattctttgttgctttcaaatcagtttatgcgttactcaagaaaagcagttaaaataactttacattaaatttcatttgatcaaccactttattcaaacaccttggcccagaatgactttggttattccaaaaagcaaactccgtctaaggcaaagttttatcacattaaggatattcacaagactttgccacagattgggactgcagttcccaggtgggacttccagaaagattgcatttgaattacgtgtgtgttatttccagggtgagactttgaaagagatgacacaagagttccggcaaattatttaacaaattgtaatgtcattttacattactcagtgtcctctccccaacacttcaaagtgaccttcaatgaatcaccaaaccatgctgtcatatttcttccaatgacaagcagaagggctccgattgctttctaaggccctttgggaccatatgagagaataaagtatatacttcctaattcaaagcaaatcattagggctgtggaattaaaattgtggaaattgataaacctataataacaacaattgcccggttaaaattgcataaacaacaaatctttttcggcacttctgtaggttcattctgttactcaaggtccatttgttctgaaatatcccccatccctgcaatctcagaatgagttcatgaaaacagacaattataaatctatcctgagctatgattcatgcatcttaaccgactccctaattcttccaatttacaaaccaattcagaagtcagtcaagggcccaggtcacgcaaggatggttagaggagcagatggagctgcttaaaaccatgtgcttggcggggttaaaatgatgagaatccagaggaaaataaattgggcctgtctaaagtaatatttcagtttttaaaaactgcttagcctgaaaatcatgtgcctcatttaattccctgcaggctggaaatttgacaggagagataaattgcaccaggaacattattttcattcagaaaggtaagcccaagaaatagggtgggatatatcctcatctgaatgagggtggtctgcggaggggggacgcagggaagagcagccaggggaaaaacaggatgtgtgcaggcgtgaacggctccagttcaatgtgaagtcagagggagagtcagatcatggcagaagaaggaaggaagcaaatctggaagcattcatgtcggactgaaaatccacaccagaagggagatgtggctctaaacagggatctcaagcacaaaggcaaagcatcagtactggaaatccttaggggatttaaaaaaagattaaaatgcatactctgttcagatttccttgtttttccgccaatgttctttttccattccaggatcccatcgaggacagtgcatgacattcagtccttgtgtcttcttagactcttctacactgtgacagtttctcaggtgcagtagcatgatctcagctcactgcaacctccgcctcctgggttcaagcgattctcctgcctcagcctcccgagtagggggcagtacaggcatgcaccaccacgcctggctaattttgtatttttagtggagacggggtttctccatgttggtcaggctggtcttgaactcctgaactcaggtgatctgcccacctcagcctcccaaagtgctgggattacaggcatgagcccagcctgcccttgacagttttaaggggtactgcacaggtattttgtagtggaataccctttaattttgagtttttctgatggtgagacaagttgtgagtttggagagaagactgcagaggtaagtcaccattctcatcactttcttcttttttttctttttttttgagatggaatctcatattgtcactcaggctggagtgcagtggcatgatctcagctcactgcaacctccgcctcctgggttcaagcgattctcctgccttagcctcccgagtagctgggactacaggtgtgtgccaccatgcctggctagtttttgtatttttagtagagacaaggtttcgccatgttggtgaagctggtctcaaacccctgacctcaggtaatccacccgcctcagcctcccaaagtgctgggaatacaggtgtgagccatggtgcccggccaccattctcatcacttcacatccgtggtacatcccatcaagatgagttggcactgttgatgctgaccttgagcccctggctgagggagtgtctgccaggtttctccattgtaaagtttctcctttcacttcctctttggaaggaagtcactatacacagcccacacttatagggtagggagttatgagtgcttccttgagagtggagtatggtgttatttttataattaaagaaaaagatgcctgcaatggaagatgaagaggatcacctgctggtggagcaaaaatccagaacctcgtgtgtgtctcagctagaactggtggtttgggaagggtcgactgcccagcagtgcagcgggagatgcaaaacctgagggttcaagtccaaaggttgacctggctttaaaagccaatgatgtcaaaaaaacaaaaccaaaaacactgagcacaaaagctaggcaatggtgcagccagttgggatacttttcataggcactgatttttactctctctggaattcctttcaaagacacagggtctgctggtggatggtcgctcctctgcagggactggggcacatggcatggcctcctatgtcatttgggggctctttgtttattcaacatgcccgccacacaccaggcaatattctaggagctaggcatgcagaaatgaaacatccatcctcctgatgaagacagacagcaagccaaaagataaacaaacaacatcatttaggtggacagggctaggaagagagtaaaatgccattacgggggtagacagtgattgatcccggggactcctccagatagcggggtcacagaagacctctatgagaaagtggcatttgagctgccactgaatgaccagcagaagctggcctgggaagacggagggggaagaatgcttcagatagaggatccacgagtgcagaagctgtgagaggtgacaacacagtgagatcctgtctctaaaagaaagagaaaaggcagatgtgggtggagcaaaatgaggaagggaaggggtgttccaagatggagagacaggaagtggccccatgatgcccggcctataggccacactgaaaagtttggattttagtcctagtggtcaacctattgatggtatttcaattttaattttaaaaaatacaatcaggctgggcgtggtggcaggtaatcccagctacttgggaggctgaggcagtgagccaagatctcaccattgcactccagactgggcaacaagagggaaactctgtctgaaaaaaagaaagaaagaaaaaaaaaagtcactgtgtttcccatgagagtgtgatctactaagggagcaagtatagaaataggaagacctgctactgcctcaaagaattgttaaaggatcgaacgcctactaatgtgtgcaaagcctgggacatagcaggaatgcagtaaatgcaataaaagaaaatagctgcagtaagtgctatcagtaaatgcactactggactgggcgtggtggctcacgcctgtaatcccaacactttgggaggccgaggcgggaagattacttgagctcaggagttcgagaccagcctgggcaatatatcaagacctcatctctacaaaaaatacaaaaaccaaaatagccgggcatggtgggtgtgcctctggtcccagctactcgggaggctgaggtgggaggattgctcaagcccagaaggcggtggaggttacagtgagctgagatcatgccactgcaccacagcctgggtgacagagcaagaccctgtctcaaataaataaataaaaataaaaaataagaataaaaatcaataaatacactactgcacttatgcagatgaacttcacttcttccgacttagccacacacaactttccagcatcacagatctttgcagagggtgggacagccgggaaggtgctgttcgcacagaattggctgaatgaccaggtgtttgatggatgaatcccaggtagccagggcgtctctgggcacacgcacccaggatcacacctggacaagaaagtggggtctaaagtagcagtccgaggctgggtgcagtggctcatgcctgtaatcccaaaactatgggaggttgaggcaggagggttgcttgagaccaagagttgaagatcagcctgggcaacatagcaagaccccatctctacaaaattttgaaaaattagctaggtgtggtggcatatgccagtggtcccagctactcagaaggttgaggtaggaggatcacttgagcctaggagttaaaggctgcagtgggccatgatcacgccactgcactctattttgagtgacagagatcctgtctccaaaaaatacatatgccagtgcaggcctggtatgtgtcctgagagttccctgcctggcatctcttgaagtgggcaccagtaaccagaagctgaagtcctggtttggcaaaggatggaggaaaaagatattggatctggagggctgggtgcaggtggcttacacctgtaatcccagcacttggggaggccgaggtgggcagatcatgtggtcaggagatcgagaggatcctggctcatacggtgaaactccgtctctacaaaaaatacaaaaaattagccggatgagggcgggcgcctgtagtcccagctactcggaaggctgaggcaggagaatggcgtgaacccgggaggcgtagcttgcagccagccgagatcgagccactgcactgcagcctgggcgacagagcaagactccatctcaaaaaaaaagatattggatctggaatggatcgctgaaaataaaagaaaactggggtgaaaaagaagtgtacatgggataaactggaggtaatgagttatgtttgggggaagatagaaaaagttagactctgtggcgtgggaggagcagagtaaatgtcaacagtcccctcgagcctggaaaactccaccatgagtcatggaggacccacgtcagaaaatagctattttgagcccagctagaaagtttggctctgtctgcttttcctgagagtggtgagtggttgacccaggctgtaagctcttcaggtcattgcttccccaaacaaaatttcaatcaagcgagtgccatgaccctgcacagaagtccagaactaaacctcgatgtgggactgggcttgccaaaccagaaggtctgttctaagagaaagaagctggaacctgcgaggggaattttgccaatgggaggaacagcaatttctccaaaaagagggggtaggaccagcaatttcccgttcctggaaggtcccctatacattttgttcagagcatttagattctaaatgtcacagtgtgatgtcctcatgtgcaatggacatttgttgatttgcctcccagtatccattcacctttcttaggtaataggacctgtttcctttggggaaccaactggcaccaccgctcccaggacttgcaaatttaatggggcttaccctacccaggtgtggcctaaggtgctcactgtgttcccttcccgttcagattcagatagatataggatcagatacacaccagaagtagtcagacccagaactttgctgtgaacccccctgggggaaaagaaaccctgaatcctaagaacaaagccctcatggaggggataaaagctgagggataaacagatagactttggactcctgcctcaaccacccctagagtgtagaaaccccggttagtacattcctttttttttttttttttttttgcatatgcagtttgggttgagttttctgttgcacaaaaccaagaaagtcacacaaatactatatatctttgttttttttttttttgagacggagtctcgctctgttgcccaggctggagtgcagtggcgcgatctcggttcacgccattctcctgcctcagcctccggggtacctgggaccacagacacccaccaccacgcccagctaatttttgtattttttttttttttttagtagagatggggtttcactgtgttagccaggacggtcttgctctcctgacctcgtgatccacccgcctcggcctcccaaagtgctgggattacagatgtgggccaccgcgcccagccccacaaatactatgtatcttttaagagaaacgcatgatgagaagcagcagggggtcaacatgcatctggggtgttagaacccaagaggcagtagacagtcatcttgtacctcccctgcctgctgtcagaatgctaatgcactgtctcctaaagcagggtatgaaaaatatggccccaaggccatctccagcccatcacttctttttgtgcagcctgtgagacaagaatggcttttacatttgtgaatatttggacggggggcaaggggtcagcgtggaatcaaatgaaaactgcaaaaaattcagatttcagcatctataaataaagctttattagaacacatccatgcccatttgtttaggtactgttgatgactgcttttgtgttacagcagggctgagtagctgggacagagaccatactgtcagaagcgtttgaaccagaacaacaccatcttgaataggggctgggtaaaatgaggcggagacctattgggctgcattcccaggaggttaggcattctaagtcacaggatgagctaggaggacggcacaagatacaggtcacaaagacctgaccgataaaacaggttgcggtaaagaagctggccaaaagccaccaaaaccaagagggcaacgcacatgatctctggtcatcctcactactcattccacactaattataatgcattaccatgctaaaagacccgcccaccagcgccaggactgtttacaaatgccatggcaatgtcagttaccttatatagtcttaaaagtggaggaaccctcagctgtgggaattgcccacctctttcccagaaaactcatgaataattcgccccttgtttagcatataatttagaaaaaactgttaagcattatgagttgagcagtccaagctgctgttctggctgtggagtagccattcttttatttctttactttcttaataacttaagaaacttaataaataaacttgctttcattttactctatggattcgccttgagttctttcttgcacaatatctaagaatcctctcttggggtctggatcgggacccctttcctttaacaatatggccctcaaagacaaaaatatttaccatgagtcctttaagcaaaggttcacagactcctgccctaaaagatactgtaattctaagacatccaggaaagagacattctgtaacttgtcttttataaactaagatattaaaggctttaaatttcaatcttatgctggcaaacttgataaaacaattggtttttcctgctaggtaagatggcaagaattgctattattttatataaggctgtttagaagaaacccttactaaagcttttaaggttataaatcaaaagtaccgtctagaattcaaataatatgaattcaaattatagaattcaagggcaatagcaatgatatattcaatcttagtaatggttattcagccctattttcccattatcatagaaattcccttttaaacatcttctatattttgaataatctgaaaaacaatctgtcataatgaaatgaactttacagtaataataatagctatttgttaaatctttactatttgccaggcagagttctgagcattttacttacattaacacatttaatggctccaaccatgctgtcaggtaagtaatattattatacccattttgtagatgacaaaacgaaggcacagagacaggttaagtaatttgcctaagatcacacagcaaatattggggccaggattcaaaccccagtaatctagacccagaaactgaactatgctaggggttagaccatctcagatttatttaaaagaggtggaaatgacaataatatttcactatagtttagaatttaattgatatcactgtgtaacatacacctttttttccctcagaagtatttctggaccactaacacgatcatgttgatacaatggaactcacatcccctctccatatttgattggatcaggtgtcaacatctggcccaagctggaccaataggctccttccctgagcttttggtgctgagattaagattccagtctcaacctgacttctgtcactctcccatgagatagaagaatagaggagacatggagaaaaacagtcaagaggtagaggtggtgggagggacctccttgattcacaatggactctatccccttcctgaattccagtggaaccatggccctgtgttctgtgagacaccctagaatccttcaacaatatccacttttggctgaacccagtgggttttggtcacctagaaccaaaagaatcctcaaacgtaacccgattaagagcaaaacaacctggctttttttttttttttttgagatggagtcttgctctgttgcccaggctggagtatagtggcacgatctcggctcactgcagtctctgcctcccaagttccagcgattgtgccaccacacctggctaatttttgtatttttagtagagacaaggtttcaccatgttggccagcctggtcttgaactcctgacctcaggtgatccacccacctcagtctcccaaagtgctaggattacaggcatgagccactacacctggccaacctgccattttatatattctctgagtcatcagcatgggcctctcaaatgatggacttgctggatttctgtttatttcctttgctgtgcactaagtaggtcagctcccaagaatgactagtttggagatggagggactagtggaatatgcttagaatggtgcctaagccaagctgggaaccaacaaattggttttgggctctactttagtttttcttgttgttgtttgtttgctttttttttttggcctgggggggaaaaaacccacaaatgtctttccccagtttcctccagtaacacagatggaaatagtagtttatacttgggatggtgctcggggaaatagtgtctcagaaccaattactgaaatgaccagaatggatataaaatgtggctgcataatttcctaagtcccatttctcagggtaaaaatggttcagaccatccaaatgcttctccgaagaaattacacaagcgagatggaaaaagaaagtattggtttctcagcgctggtaataattaggacttgaatgagtggtgataaacccatttacagacaggaagtgtgaaggcctgaatggccaggagatttgctaagtgatgacaagatcaagatcaggcctctggcctctgagcccagctccctaagcctagtgaactttgaatgacacctgattttttgccccatccagcacccattttctgaatgcaatttggaggaatgaacatacgacccagaacctggccaatcagaatattctaccgccacctcttcccctctcccccaccatggtaatcagttcagccatgggcaaattatccaagttgaggcaataatactcagtcccatgacttccattgaaacttctaatgaaacgatctctctctgttgggattgctacctgatggctaatgtaagcttagagccactgggattgccatatggaaagcatctgcctgagagtgaagccaacacaagtagatgcagaaaaactgagtcctactgatggcatttgatcccttggatccagccacgctggatatgggatatgggaaaccttgaagtacagtgactactgtggataaggggtcaatgggtaagtggtttccttgtgggatgatgaaaatgtttggcatctagaggtgatggttgcacaagactgtgaatgtacataaagccactgaagggtacactttaaaatgatgaatgctatgttatgtgaatttcgccttctttttttaaaaaaggggaaagaggccaggtgcggtggctcacgcctgtaatctcagcactttgggaggccaaggtgggcagattacctgaggtcaggagctcgagaccagcctggccaatatggtgaaaccctgtctctactaaaaatacaaaaattagccgggtgtggcggtgtgtgcctgtagtcccagctatttgggaggctaaggcaggagaatcgcttgaacccaggaggcgaagtttgcagtgagttgagattgcaccactgcactcctgcctgggcagcagagcgagactctttctcaaaaaaaaaaaagaggttgggggaagagcataattttaaccacgcagatatcagagatttcacaaaaggagtgtcactgaagctagatatggtggtcaagaggcaggagaagggggagatgctttctaggcctaataacaaggtgctaagcccttttgatgtggtctgaacatctgttccctccaaatctcatgttaaaatttgatccccagtgttggaagtggggcctgttgagaggtgtttggatgatgggagcagatccctcgtgaatggcttcatgccatgtttgcaggattgagtgagttctcacccttaattcccaagagatctggctgttaaagaagctggcatcttcctcttttctcttcctctctcttgacatgtgatgtctgttccccttcaccttccacagtgattgtaagattcttgggcccctcaccagaatcagatgctggcaccatgtttcttgtataacctgcagaactatgagccaaataaacctcttttatttataaattacccaacctccggtattcctttacagcaacatgaaatggactaagatacctctacctacagtaattacatcgttaatcctcacagcaacccttgaggtagtaaatattactttagccttgttttataggtaagtatgcaagggccagaaaggggacataacttgcccaagtttacatagttgtagatcagcagagagctgggactcaaacatagatttttctggccaggcacggtggctcatgcctgtaatcctagcactttgggaggccgaggcgagtggatcacctgaggtcaagagttcgagaccagcctggccaacatggggaaacctcatctctaataaaactacaaaaattggccaggtatggtggtggacatctataaccccagctacttgagaggctgaggcaggagaatcacttgaacccaggaggcagaggttgcagtgagctgagatcatgccattgcactccagcctgggcttcagagagaaactctgtctcaaaaataaataaataaataaaaataggtttttacaactctcaaccactccgttcaagtgcctcctagtagagggaagagcatagaaacacagaacatttctttagaagaatgtatcattccatgttcttcctagaggaataatcggagtttagcccactaagataactcacaacagcaacctttataacagtggaaaaattggaaacatacaatgtttggccatatggactagttaagttattgaagaatatgtgatgatttgggactaggatcataatttagagctgagtgaaaaaggcaggatatgggaaagtaaaatagttggatattagctacacaggaaaaatattaaaaggttactagaaaaacacgcatcaggatgttggttgactttggcgggtagaattgtgggtgatttttttctatgtgttttacgcgcgtgtgtgtgtgtatagactcagtttccatatctgtaaaatgggtataataacagatctcccccactgaatggtcagaaacactaagtgagacaacgcatgtaaagctt

SEQ ID NO: 285 - DNA, 149480 bp, Homo sapiens; identical to SEQ ID NO: 284

SEQ ID NO: 286 - DNA, 412 bp, Homo sapiens
  misc_feature (1)..(412): n=a,t,g or c
tataacttaaaatcgtttattttaaaggaaactttaaataaccaatggaaatgaaaaaccagccccacttgccatgaacagccccaactgttcggatttcattcgggcaggcggggtccacaagaggctctcttggcttaaagggagcccagcttggncangatcaggtgttaaggacacgtgagcaccaaattgagcctttctcagtgatgaggtcaaaaaatgaaagcgcgcaggaagggttctccccaggggaattctggggtgtcccaangtcatccggggccccgcacgcttcgggccatgctgttctggtctccagccctcatggccgtggcaattggacagcgtcaacttcctcactcagtgtgttcgcatcctgaccttgaggtnggggtgagggggacattga

SEQ ID NO: 287 - DNA, 263 bp, Homo sapiens
  misc_feature (1)..(263): n=a,t,g or c
gtttccaattgcagatttatttccacacacacaaaaaaaatctatgttgaagttacaggattgccatgaatgccacacacctttcagactaagcagaaagcccacaagaaaagcacaaaatgaatgcactcagctgcccctgtcccccccaccctgggtgactggggaaggacaggcagagcatcctaacaggggagctgagtctttgggaggataggaaaagcccaggggtcagggnaaaccacacagaccntacanggggg

SEQ ID NO: 288 - DNA, 437 bp, Homo sapiens
ttttttttttattttcataacttgcttctgttgattttttttttttgtaaaactttcccaagacattttcagacttaaaaataaagtcagtgttacaggtgctggtcagccttcttacttgtacctcaaacactgggataaaggaggcggtccagggcaatgcagtgatgtctgtcaagacattccccctcccctaaactcagtagcagttgaggatgacatttcaggctagagagacccaaaatacctctgttccacctgagagcaaggtggaagttgcatcagctactgccccaagtgagcttcatcttctgattgtgggctttggaggaacgagagaactggctcttgggcactgtggaggggtacagctttgccactcaaatataccttattgtgggcattcagggagccagggtccagagctgcagggctgc

SEQ ID NO: 289 - DNA, 352 bp, Homo sapiens
aatgatttgtatattttattttgactttacatgcggtgttaaaaacccaaagtacatattatttacacatccacaatacaagtttacaaggtatctattcatgttaaagtactctataaaacagtatagagacacttcacttcgagggttactttttatgccgtaccattaaaaaagatacaatctgcgtttacctttgcacaaatggataaagcatttaaaaattaaattaacaggatagagactagatttaatgttagaaatttcaacataaatactgattgaactcacattacaaactacaaggaagcacaatgttacaaaatgttatctggggtcacatagagttact

SEQ ID NO: 290 - DNA, 445 bp, Homo sapiens
gaacgttaatatttttatttcttttgtaatgaagagtacaaatggttgggagcaggacatcacaggaggaggaaagatagcgccatctctgcagaagaactcctgagccacacacagaaggaaagttgatccccagggcagcctttcccaccaaaaaaatcaggcccaatccaggagagtttgccagtagctccccagggttccagggtgtctgccagccttcctaggaatcgtgggcaggcttctaggtgccagtgactcaaactccttttcccacttcccagttcaacctggtcactctcatccccacaagttcccaatctgaatcccattctctgaccattctctgcttccttgtttttaatctcatttgagagtgatcctcacgggttcccctggcccctgcactcattttccttactgggtatgctaacgttcctcgtgc

SEQ ID NO: 291 - DNA, 425 bp, Homo sapiens
aatatgccacaatttttattgcaacgtggccatttttgtgagggtggggagtttgatctcaaaacaatgttccatttaaggctcttttatacagaaattgccatcatgactgatattcaaaatatctttagtgttgcaggactcacatggtaaacataaaactcctacacttattcagtagtgtacactcaatggaaaacaaaaaggcattaataacagctatttcttttaagaagatatgcaggtaacaggaatgaacactgaggtactaggataagttgatgacacagttaacaaaacttaattggcattccttttaggatattaaacttattacaaaaagtgcttttaatgcatagtgttatatccgtgctgccatatcactaaaataggcttgccaaggcagggtgaggtgtatgaatgcg

SEQ ID NO: 292 - DNA, 566 bp, Homo sapiens
  misc_feature (1)..(566): n=a,t,g or c
tcctctccgcgaactngcaccaactttatttgcaaaaagaggctccaagcgcacggagaggatgggggctgcaaggtccccaccctcctcccggcctcccgcggctcctgccctcctccaggccccccacggcccccgccccgcnagctacacgatcccgaactnggcacnctntanggcagctgatcgcggcagctntgctcgaaccacttgccgttggcgcgcctgacaggaccgcgcagttctcggtcttgccgccatcgggttgcgcggtgatctcagtctcccagttcttgtaggcgatgcgggcgccggtcatgtccacccaggtgccctcggncgccatgtcgttgaggcccagccagatctcggcctcgttgcccacgctctggcgcaggtactcatacagggcgtcgttctccgagccagtctgaggggtgctcagggtgccccgcgcgagatgcagttctcgctgggctcgtggaangtcttcgtctgggtgaaggcagaaagcattttatgtgnactttgggtcccnttnagggaanacgtttgaagggctgctg

SEQ ID NO: 293 - DNA, 461 bp, Homo sapiens
  misc_feature (1)..(461): n=a,t,g or c
caaataagtaaaacattatcaatgtttccgttttaaattaccatgtattaacaatattaactttaatatatttttcactttttcctaatttgtacctttatagttgactattgcagtttttaatattttcacaaaaaaatgtaaaggtcacagaataataatttcccttcactgatgattaacattgctttgcagagtctcagcagcatggtcatttttatggctccacattaccatgcaaagaaggactgcctgcattttgaaatacatattaaatagctgtggcatactgctgaaatacacattaaatagctgtggcatactgctgaaatacacattaaatnagctgtggcatactgctgaaatacacattaaatagctgtggcatactgctgaaatacacattaaatagctgtggcatactgctgaaatacacattaaatagctgtggcatactgctn

SEQ ID NO: 294 - DNA, 406 bp, Homo sapiens
cactaggaaacaaaggatattttattccttttttctgttgttgttgaggatagatcacgatacagagaacagcaatgggtcacagcgcacggtttggttggtttccgcgggaacacagaggacaggaggggcgggatctgggttgagttcccactctcgttatgaccttcaacctctcactgttcccaagggctgcacggagcctgctgagtctccaacccacctcgctcaccgctctgaccaccgacagcacgagaaacggatgcgggagttgcctctgctgcccatctaaggggacgtaggcagagaagcaaaggcctctgctctccctccatccatcccggtgtgctggccccaacggaacaggagtccttcaactattgcctgccagagacccaattgcagg

SEQ ID NO: 295 - DNA, 5180 bp, Homo sapiens
accgggagcgcgcgctctgatccgaggagaccccgcgctcccgcagccatgggcaccgggggccggcggggggcggcggccgcgccgctgctggtggcggtggccgcgctgctactgggcgccgcgggccacctgtaccccggagaggtgtgtcccggcatggatatccggaacaacctcactaggttgcatgagctggagaattgctctgtcatcgaaggacacttgcagatactcttgatgttcaaaacgaggcccgaagatttccgagacctcagtttccccaaactcatcatgatcactgattacttgctgctcttccgggtctatgggctcgagagcctgaaggacctgttccccaacctcacggtcatccggggatcacgactgttctttaactacgcgctggtcatcttcgagatggttcacctcaaggaactcggcctctacaacctgatgaacatcacccggggttctgtccgcatcgagaagaacaatgagctctgttacttggccactatcgactggtcccgtatcctggattccgtggaggataattacatcgtgttgaacaaagatgacaacgaggagtgtggagacatctgtccgggtaccgcgaagggcaagaccaactgccccgccaccgtcatcaacgggcagtttgtcgaacgatgttggactcatagtcactgccagaaagtttgcccgaccatctgtaagtcacacggctgcaccgccgaaggcctctgttgccacagcgagtgcctgggcaactgttctcagcccgacgaccccaccaagtgcgtggcctgccgcaacttctacctggacggcaggtgtgtggagacctgcccgcccccgtactaccacttccaggactggcgctgtgtgaacttcagcttctgccaggacctgcaccacaaatgcaagaactcgcggaggcagggctgccaccagtacgtcattcacaacaacaagtgcatccctgagtgtccctccgggtacacgatgaattccagcaacttgctgtgcaccccatgcctgggtccctgtcccaaggtgtgccacctcctagaaggcgagaagaccatcgactcggtgacgtctgcccaggagctccgaggatgcaccgtcatcaacgggagtctgatcatcaacattcgaggaggcaacaatctggcagctgagctagaagccaacctcggcctcattgaagaaatttcagggtatctaaaaatccgccgatcctacgctctggtgtcactttccttcttccggaagttacgtctgattcgaggagagaccttggaaattgggaactactccttctatgccttggacaaccagaacctaaggcagctctgggactggagcaaacacaacctcaccatcactcaggggaaactcttcttccactataaccccaaactctgcttgtcagaaatccacaagatggaagaagtttcaggaaccaaggggcgccaggagagaaacgacattgccctgaagaccaatggggaccaggcatcctgtgaaaatgagttacttaaattttcttacattcggacatcttttgacaagatcttgctgagatgggagccgtactggccccccgacttccgagacctcttggggttcatgctgttctacaaagaggccccttatcagaatgtgacggagttcgacgggcaggatgcatgtggttccaacagttggacggtggtagacattgacccacccctgaggtccaacgaccccaaatcacagaaccacccagggtggctgatgcggggtctcaagccctggacccagtatgccatctttgtgaagaccctggtcaccttttcggatgaacgccggacctatggggccaagagtgacatcatttatgtccagacagatgccaccaacccctctgtgcccctggatccaatctcagtgtctaactcatcatcccagattattctgaagtggaaaccaccctccgaccccaatggcaacatcacccactacctggttttctgggagaggcaggcggaagacagtgagctgttcgagctggattattgcctcaaagggctgaagctgccctcgaggacctggtctccaccattcgagtctgaagattctcagaagcacaaccagagtgagtatgaggattcggccggcgaatgctgctcctgtccaaagacagactctcagatcctgaaggagctggaggagtcctcgtttaggaagacgtttgaggattacctgcacaacgtggttttcgtccccaggccatctcggaaacgcaggtcccttggcgatgttgggaatgtgacggtggccgtgcccacggtggcagctttccccaacacttcctcgaccagcgtgcccacgagtccggaggagcacaggccttttgagaaggtggtgaacaaggagtcgctggtcatctccggcttgcgacacttcacgggctatcgcatcgagctgcaggcttgcaaccaggacacccctgaggaacggtgcagtgtggcagcctacgtcagtgcgaggaccatgcctgaagccaaggctgatgacattgttggccctgtgacgcatgaaatctttgagaacaacgtcgtccacttgatgtggcaggagccgaaggagcccaatggtctgatcgtgctgtatgaagtgagttatcggcgatatggtgatgaggagctgcatctctgcgtctcccgcaagcacttcgctctggaacggggctgcaggctgcgtgggctgtcaccggggaactacagcgtgcgaatccgggccacctcccttgcgggcaacggctcttggacggaacccacctatttctacgtgacagactatttagacgtcccgtcaaatattgcaaaaattatcatcggccccctcatctttgtctttctcttcagtgttgtgattggaagtatttatctattcctgagaaagaggcagccagatgggccgctgggaccgctttacgcttcttcaaaccctgagtatctcagtgccagtgatgtgtttccatgctctgtgtacgtgccggacgagtgggaggtgtctcgagagaagatcaccctccttcgagagctggggcagggctccttcggcatggtgtatgagggcaatgccagggacatcatcaagggtgaggcagagacccgcgtggcggtgaagacggtcaacgagtcagccagtctccgagagcggattgagttcctcaatgaggcctcggtcatgaagggcttcacctgccatcacgtggtgcgcctcctgggagtggtgtccaagggccagcccacgctggtggtgatggagctgatggctcacggagacctgaagagctacctccgttctctgcggccagaggctgagaataatcctggccgccctccccctacccttcaagagatgattcagatggcggcagagattgctgacgggatggcctacctgaacgccaagaagtttgtgcatcgggacctggcagcgagaaactgcatggtcgcccatgattttactgtcaaaattggagactttggaatgaccagagacatctatgaaacggattactaccggaaagggggcaagggtctgctccctgtacggtggatggcaccggagtccctgaaggatggggtcttcaccacttcttctgacatgtggtcctttggcgtggtcctttgggaaatcaccagcttggcagaacagccttaccaaggcctgtctaatgaacaggtgttgaaatttgtcatggatggagggtatctggatcaacccgacaactgtccagagagagtcactgacctcatgcgcatgtgctggcaattcaaccccaacatgaggccaaccttcctggagattgtcaacctgctcaaggacgacctgcaccccagctttccagaggtgtcgttcttccacagcgaggagaacaaggctcccgagagtgaggagctggagatggagtttgaggacatggagaatgtgcccctggaccgttcctcgcactgtcagagggaggaggcggggggccgggatggagggtcctcgctgggtttcaagcggagctacgaggaacacatcccttacacacacatgaacggaggcaagaaaaacgggcggattctgaccttgcctcggtccaatccttcctaacagtgcctaccgtggcgggggcgggcaggggttcccattttcgctttcctctggtttgaaagcctctggaaaactcaggattctcacgactctaccatgtccaatggagttcagagatcgttcctatacatttctgttcatcttaaggtggactcgtttggttaccaatttaactagtcctgcagaggatttaactgtgaacctggagggcaaggggtttccacagttgctgctcctttggggcaacgacggtttcaaaccaggattttgtgttttttcgttccccccacccgcccccagcagatggaaagaaagcacctgtttttacaaattctttttttttttttttttttttgctggtgtctgagcttcagtataaaagacaaaacttcctgtttgtggaacaaaagttcgaaagaaaaaacaaaacaaaaacacccagccctgttccaggagaatttcaagttttacaggttgagcttcaagatggtttttttggttttttttttttctctcatccaggctgaaggattttttttttctttacaaaatgagttcctcaaattgaccaatagctgctgctttcatattttggataagggtctgtggtcccggcgtgtgctcacgtgtgtatgcacgtgtgtgtgtccattagacacggctgacgtgtgtgcaaagtatccatgcggagttgatgctttgggaattggctcatgaaggttcttctcaagggtgcgagctcatccccctctctccttccttcttattgactgggagactgtgctctcgacagattcttcttgtgtcagaagtctagcctcaggtttctaccctcccttcacattggtggccaagggaggagcatttcatttggagtgattatgaatcttttcaagaccaaaccaagctaggacattaaaaaaaaaaaaaagaaaaagaaagaaaaaacaaaatggaaaaaggaaaaaaaaaaagaactgagatgacagagttttgagaatatatttgtaccatattta

SEQ ID NO: 296 - DNA, 2532 bp, Homo sapiens
agtgcactcaagcagagaagaaatccacaaagactcaccagtctgctggtgggcagagaagacagaaacgacatgagcacagcaggaaaagtaatcaaatgcaaagcagctgtgctatgggaggtaaagaaacccttttccattgaggatgtggaggttgcacctcctaaggcttatgaagttcgcattaagatggtggctgtaggaatctgtcgcacagatgaccacgtggttagtggcaacctggtgaccccccttcctgtgattttaggccatgaggcagccggcatcgtggagagtgttggagaaggggtgactacagtcaaaccaggtgataaagtcatcccgctctttactcctcagtgtggaaaatgcagagtttgtaaaaacccggagagcaactactgcttgaaaaatgatctaggcaatcctcgggggaccctgcaggatggcaccaggaggttcacctgcagggggaagcccattcaccacttccttggcaccagcaccttctcccagtacacggtggtggatgagaatgcagtggccaaaattgatgcagcctcgcccctggagaaagtctgcctcattggctgtggattctcgactggttatgggtctgcagttaacgttgccaaggtcaccccaggctctacctgtgctgtgtttggcctgggaggggtcggcctatctgctgttatgggctgtaaagcagctggagcagccagaatcattgcggtggacatcaacaaggacaaatttgcaaaggccaaagagttgggtgccactgaatgcatcaaccctcaagactacaagaaacccatccaggaagtgctaaaggaaatgactgatggaggtgtggatttttcgtttgaagtcatcggtcggcttgacaccatgatggcttccctgttatgttgtcatgaggcatgtggcacaagcgtcatcgtaggggtacctcctgcttcccagaacctctcaataaaccctatgctgctactgactggacgcacctggaagggggctgtttatggtggctttaagagtaaagaaggtatcccaaaacttgtggctgattttatggctaagaagttttcactggatgcgttaataacccatgttttaccttttgaaaaaataaatgaaggatttgacctgcttcactctgggaaaagtatccgtaccgtcctgacgttttgaggcaatagagatgccttcccctgtagcagtcttcagcctcctctaccctacgagatctggagcaacagctaggaaatatcattaattcagctcttcagagatgttatcaataaattacacatgggggctttccaaagaaatggaaattgatgggaaattatttttcaggaaaatttaaaattcaagtcagaagtaaataaagtgttgaacatcagctggggaattgaagccaacaaaccttccttcttaaccattctactgtgtcacctttgccattgaggaaaaatattcctgtgacttcttgcatttttggtatcttcataatctttagtcatcgaatcccagtggaggggacccttttacttgccctgaacatacacatgctgggccattgtgattgaagtcttctaactctgtctcagttttcactgtcgacattttcctttttctaataaaaatgtaccaaatccctggggtaaaagctagggtaaggtaaaggatagactcacatttacaagtagtgaaggtccaagagttctaaatacaggaaatttcttaggaactcaaataaaatgcccacattttactacagtaaatggcagtgtttttatgacttttatactatttctttatggtcgatatacaattgattttttaaaataatagcagatttcttgcttcatatgacaaagcctcaattactaattgtaaaaactgaactattcccagaatcatgttcaaaaaatctgtaattttgctgatgaaagtgcttcattgactaaacagtattagtttgtggctataaatgattatttaggatgatgactgaaaatgtgtataagtaattaaaagtaatatggtggctttaagtgtagagatgggatggcaaatgctgtgaatgcagaatgtaaaattggtaactaagaaatggcacaaacaccttaagcaatatattttcctagtagatatatatatacacatacatatatacacatatacaaatgtatatttttgcaaaattgttttcaatctagaacttttctattaactaccatgtcttaaaatcaagtctataatcctagcattagtttaatattttgaatatgtaaagacctgtgttaatgctttgttaatgcttttcccactctcatttgttaatgctttcccactctcaggggaaggatttgcattttgagctttatctctaaatgtgacatgcaaagattattcctggtaaaggaggtagctgtctccaaaaatgctattgttgcaatatctacattctatttcatattatgaaagaccttagacataaagtaaaatagtttatca

SEQ ID NO: 297 - DNA, 2299 bp, Homo sapiens
cgaacccccacagctggagggcgaggccagctgtacccggccccagtgccctttcgcggccacaagcggccgtcctcctggtccggtgctccggcgcctgatctaggttcatggagccggggctgtggctccttttcgggctcacagtgacctccgccgcaggattcgtgccttgctcccagtctggggatgctggcaggcgcggcgtgtcccaggcccccactgcagccagatctgagggggactgtgaagagactgtggctggccctggcgaggagactgtggctggccctggcgaggggactgtggccccgacagcactgcagggtccaagccctggaagccctgggcaggagcaggcggccgagggggcccctgagcaccaccgatccaggcgctgcacgtgcttcacctacaaggacaaggagtgtgtctactattgccacctggacatcatttggatcaacactcccgaacagacggtgccctatggactgtccaactacagaggaagcttccggggcaagaggtctgcggggccacttccagggaatctgcagctctcacatcggccacacttgcgctgcgcttgtgtggggagatatgacaaggcctgcctgcacttttgcacccaaactctggacgtcagcagacaggttgaagtcaaggaccaacaaagcaagcaggctttagacctccaccatccaaagctcatgcccggcagtggactcgccctcgctccatctacctgcccccgctgcctctttcaggaaggagccccttaggaggacaggcctgcagcatcctggtctcgggaggcttctgtcattgctcacacacagttcagatttccacctctttatagacaagaagtgaatttgcctggggcagaacacccacccaaagagtccccacttaacaataccccccccccacggcaagaatgcccaaatccgaatgaccccagttttcctaatgagtaaaatgatcccagatgtgccccagagcatgacgcctgcagctccggtttcatgcaggaaattggttttggagagttttggcaagttggaaagccacttactggcttttgacatgacttctcttggagaataagtggactccaagctaactctttgcaaatgtaaacacatgtccatcttgtaataaatgcaaaatgcccgtgcagcagaagcatgcgactttcatatccttgcctagaataggctgcatggtgtatgtcagtgagggccacgaggcgtcggctttagacacagatcatagctctacaggagtttatgaatttgaagcttatgggattttggcagagaaattttcagctgtgcttgatacccaccaaaagaatgtatctcgaaagaatgaaggaagaagaaaaaaggatccttgatgtttgtgacaagaaaatgagaaagttagtatctgcaatacagagcttgttcctgttcagtgactgaccctctgtattctgtatagacaccaggccgatacacagtggagttcccaggccttgtttgcaggaagccgactgtaaagacagccccagctcaaggctattaggttgaatatttgctttcatgagtaaatgtggatctttggggaatggcttcaaaataagtcacgaacacaaattctttgtaaattatgtaaattcctgtttatataaattggcaacaacttataccgtctgacagttcaaaatctctttcagctgcgctcttcccaccgagccgagcttactgtgagtgtggagatgttatcccaccatgtaaagtcgcctgcgcaggggagggctgcccatctccccaacccagtcacagagagataggaaacggcatttgagtgggtgtccagggccccgtagagagacatttaagatggtgtatgacagagcattggccttgaccaaatgttaaatcctctgtgtgtatttcataagttattacaggtataaaagtgatgacctatcatgaggaaatgaaagtggctgatttgctggtaggattttgtacagtttagagaagcgattatttattgtgaaactgttctccactccaactcctttatgtggatctgttcaaagtagtcactgtatatacgtatagagaggtagataggtaggtagattttaaattgcattctgaatacaaactcatactccttagagcttgaattacatttttaaaatgcatatgtgctgtttggcaccgtggcaagatggtatcagagagaaacccatcaattgctcaaatactcagaaagtactgtcaaaagcctaataaaa

SEQ ID NO: 298 - DNA, 3881 bp, Homo sapiens
gctgaagtgttcgaccagcaggaggttttctcctcagcccactcgctgcatccagatcagctcaccccgcgccctttcctgcccaccaggactctgatagcccctggcagccacagcccattttgccaagatgtctagagtagccaaatatcgccggcagtgagtgaagaccccgacatcgacagcctgctgggaccctgtctcccgaggagatggaggagctggagaaggagctggacgtggtggacccagacgggagtgttcccgtggggctgcggcagagaaaccagacggagaaacagtccacgggtgtgtacaaccgggaggccatgctcaacttctgtgaaaaggagaccaagaaacttatgcagagggagatgtccatggatgaaagcaagcaagtggagaccaagacagatgccaagaatggacaggaaaggggcagagatgccagcaaaaaagccctgggccccagacggaactcagatctggggaaggagccaaagaggggtggtttaaagaaaagcttctctagagacagagatgaagctggtggcaagagtggcgagaagcccaaggaggagaagatcatccggggcattgacaagggccgggtcagggctgcagtggataagaaggaggcagggaaggatgggagaggagaggagagggcagtggccaccaagaaggaagaggagaagaaagggggtgacaggaacacaggcttgagcagggacaaggataaaaagagagaggagatgaaggaggtggccaagaaagaggatgatgagaaggtaaaaggggagcgtaggaacacagacaccagaaaagagggtgagaagatgaaaagagcaggtgggaacacagacatgaaaaaggaggatgagaaggtaaaaagaggaactgggaacacagacaccaaaaaggacgatgaaaaagtcaagaagaatgaacccttacatgaaaaggaagccaaggatgacagcaagaccaaaacacccgagaaacagacgcccagtggccccaccaagccctctgaaggaccggccaaggtggaggaggaggcagctcccagcatatttgatgagcctctggagagagtgaagaacaatgaccccgagatgactgaggtgaacgtcaacaactcagactgcatcacaaatgagatcttggtccggtttactgaggctctggagttcaacactgtggttaagctgttcgccttggccaacacgcgagccgatgaccacgtggcctttgccattgccatcatgctcaaggccaacaagaccatcaccagcctcaacctggactccaaccacatcacaggcaaaggcatcctggccatcttccgggccctcctccagaacaacacgctgaccgagctccgcttccacaaccagcgacacatctgtggaggcaagacggagatggagatcgccaagctgctgaaggagaatacctccctgctcaagctgggctaccattttgagctggccgggccccgaatgactgtcaccaatctgctcagccgcaacatggacaagcagagacaaaagcggctgcaggagcaaaggcaggcacaggaagccaagggagagaagaaggatctgctggaggtacccaaggccggggccgtggctaagggctccccaaaaccttcacctcaaccatctccaaagccctctccaaagaactcacccaaaaaagggggtgctccagctgccccaccaccccctccccctcccttggctccaccccttatcatggagaacctgaagaattcactctcaccagctacccagaggaagatgggagacaaagtcctccctgcccaggagaagaactcccgtgaccagctattggctgccatccgctccagcaacctcaagcagctcaagaaggtggaagtgcccaaactgcttcagtaggaccaggctgccaggcaccatctgccaatgccatgactgctcaggcctcacctcccagggctacacagaccctgcccaccccatccctggctgacctgctgtggatgtccctattctgccatgggagcgtccaggcctgggtcacgctcaaggaaggatgccttatctcttctcactttccttttcttgtctctgaggctctccaaattttgctttagtacatggagctcaggtttctggacaagaagagtccttttagcacatcactgagaagatggcactgtccagggcccatgtagctggcaagctgcaaaaggcctgtgatccaggaaagatgtcccacagggaccacatccaccccagccccactgccctccagggccaggattcaggcctctgaggagcccacggggcaaagctgctgggccagtggcactctgtgtgggaaaatggcagaaagatggagaggcatgggggcccaaaggggagcgtggggaggggctgaggataccccaaagtccaggctaattagaggatgtggcaggggcagtggcctggatgcacagtgcctgatgggagtaggctccagacaggaggagtgggacagacagcagctggacttgaaggtttgatgccaaagcagacattttcctcacacccacctgctgctgtatgaatagctgtgtatctgtttttccataagattttgataatatatacaaacctttagctgtgaatggctgtgccccacctgttgtcctgaactgtgagtcctgatcctaaccctgggctccctggaggactctagaagctcaggttccctgccacactatttgagttggccaagaaataaattcacatcctcagaaagtgcagcatggaggaaaatctgaactctaagcagaagactctccactgacctggttgtccaggtctagaaggccaggcctctactaggtctgctcctgaaccagtcctgctgcctggagtcagtagccagagttgttctcaggggtgctggggcagagtggagcccagggtgctgggatggctatattaggcatgttcagggatgctcattccatgactctgcctaaccatgggctcagggccaggtcctcacagcagtcacaggcccaggaaggcggcaggcagagaagtggagtgactatttggagaatagcacccatatctgtgtgccctagggctcagaggggcctcatcttccccagccctccccacctgctcaccaattccacttcctgccccaactgcaggaatgctgacaatgctgccatgcccaccatcgggtgtaggtgaaaggcatctttctgaatttcattctcttgaaggtgctgccaccccttggcactgtggaactgccaccttgggtctgtgtcacttgtaggtttctctgcctccaggttgcctcaacagcaggaggcacagcagtttcaccatctttgaggtgagggtggggtgccccagctaggaagcaagatcgctgtgctaggtctgaccaaaaccagagggcagtctagtcctgggggtaaagccctcagatcccagggtacactcttctccattccctccacccacttgcctgtcaccccagtcacctaagcaatcactgggcccagaggagaggagacagacacacactggctcctggacctaaagggtatgagctggagctaaggccagctagagcttccactgtcagccctcactgtcagccccactgcacccccctgtgcctgctgggcactgggcactagctagatgctttaggttgcttcagctgatccttcaactctgtgaggtggataccaatattctattttgcagatagaatttggcccagagaggttaactaatatatccatgatcacacagctaataaaagtcagagctcaggaaaaaaaaaaaaaaaaaaaaaaaaaaaaaaaa

SEQ ID NO: 299 - DNA, 3547 bp, Homo sapiens
gcactcgcccggctcgcccgctttcgcacccagttcacgcgccacagctatgtgtccccgagccgcgcgggcgcccgcgacgctactcctcgccctgggcgcggtgctgtggcctgcggctggcgcctgggagcttacgattttgcacaccaacgacgtgcacagccggctggagcagaccagcgaggactccagcaagtgcgtcaacgccagccgctgcatgggtggcgtggctcggctcttcaccaaggttcagcagatccgccgcgccgaacccaacgtgctgctgctggacgccggcgaccagtaccagggcactatctggttcaccgtgtacaagggcgccgaggtggcgcacttcatgaacgccctgcgctacgatgccatggcactgggaaatcatgaatttgataatggtgtggaaggactgatcgagccactcctcaaagaggccaaatttccaattctgagtgcaaacattaaagcaaaggggccactagcatctcaaatatcaggactttatttgccatataaagttcttcctgttggtgatgaagttgtgggaatcgttggatacacttccaaagaaaccccttttctctcaaatccagggacaaatttagtgtttgaagatgaaatcactgcattacaacctgaagtagataagttaaaaactctaaatgtgaacaaaattattgcactgggacattcgggttttgaaatggataaactcatcgctcagaaagtgaggggtgtggacgtcgtggtgggaggacactccaacacatttctttacacaggcaatccaccttccaaagaggtgcctgctgggaagtacccattcatagtcacttctgatgatgggcggaaggttcctgtagtccaggcctatgcttttggcaaatacctaggctatctgaagatcgagtttgatgaaagaggaaacgtcatctcttcccatggaaatcccattcttctaaacagcagcattcctgaagatccaagcataaaagcagacattaacaaatggaggataaaattggataattattctacccaggaattagggaaaacaattgtctatctggatggctcctctcaatcatgccgctttagagaatgcaacatgggcaacctgatttgtgatgcaatgattaacaacaacctgagacacacggatgaaatgttctggaaccacgtatccatgtgcattttaaatggaggtggtatccggtcgcccattgatgaacgcaacaatggcacaattacctgggagaacctggctgctgtattgccctttggaggcacatttgacctagtccagttaaaaggttccaccctgaagaaggcctttgagcatagcgtgcaccgctacggccagtccactggagagttcctgcaggtgggcggaatccatgtggtgtatgatctttcccgaaaacctggagacagagtagtcaaattagatgttctttgcaccaagtgtcgagtgcccagttatgaccctctcaaaatggacgaggtatataaggtgatcctcccaaacttcctggccaatggtggagatgggttccagatgataaaagatgaattattaagacatgactctggtgaccaagatatcaacgtggtttctacatatatctccaaaatgaaagtaatttatccagcagttgaaggtcggatcaagttttccacaggaagtcactgccatggaagcttttctttaatatttctttcactttgggcagtgatctttgttttataccaatagccaaaaattctccttgcctttaatgtgtgaaactgcattttttcaagtgagattcaaatctgccttttaggacctggctttgtgacagcaaaaaccatctttacaggctcctagaagctgaaggttagagcattataaaatgaagagacagacatgattactcagggtcagcaacctagtgagttagaaaaaaaattaacatagggccctataaggagaaagccaactatgttaagtttacgtgtccaaattttaatgaaattttactaacaattttaaaccatatttttcttcttcatatccatttctaatccatcaaacagcttatgtttacataaaattttatcattcacaaggaagttttaagcacactgtctcatttgatatccacaacttatttttggtaggaaagagagatgtttttcccacctgtcagatgaaaaaactgaagctcaaaaagggttgacttgaccatacagctaatgctgacagatccaagacctagacctaggtcttttgaactcaagtccagcattctcaactatatcaagttactgttcagaatacttaatatctcctctcttcataattatcaatagccccaagctcatggatgacaaatctctgctttatttcttgtctctattttttcactttatagctcctgttataatagcaagtttaatggtataaacacaggataccatcctctcttgcaacacccatgtgcctttgatgagtcaggtagcaagctgtagtagataatgagaaaggccagaggctgcaaagacagtcaaaggacacgagagaaaggaaggggaagaacaggactccaggactgttttatattatagaaaagcaagagctaaagagcatttacacatgttaaacagatacttgttaagcatagtgcctgacacacggcattagctgttattttatgagattccatcagctctgcctctgtcctctttcttctaacatgaaggtatcatgagaagagaaccttctaacataagctgtaattctaaacctgcacttgtccctctccagcaagaggctagcactgaattcattctactcatactacacacccagttatggaatgtccagagttctcgaagaaaataaatgactttaggaagaggtatacattttttaagtcgctctgcctccaaatctgaacagtcactgtaaatcattcttaagcccagatatgagaacttctgctggaaagtgggaccctctgagtgggtggtcagaaaatacccatgctgatgaaatgacctatgcccaaagaacaaatacttaacgtgggagtggaaccacatgagcctgctcagctctgcataagtaattcaagaaatgggaggcttcaccttaaaaacagtgtgcaaatggcagctagaggttttgataggaagtatgtttgtttcttagtgtttacaaatattaagtactcttgatacaaaatatacttttaaacttcataacctttttataaaagttgttgcagcaaaataatagcctcggttctatgcatatatggattgctataaaaaatgtcaataagattgtacaaggaaaattagagaaagtcacatttagggtttattttttacacttggccagtaaaatagggtaaatcctattagaaattttttaaagaactttttttaagtttcctaaatctgtgtgtgtattgtgaagtggtataagaaatgactttgaaccactttgcaattgtagattcccaacaataaaattgaagat

SEQ ID NO: 300 - DNA, 1426 bp, Homo sapiens
cggagcgggagcggtgcaggctgaggtctccgagcggctcgccatggctggcccgcagcagcagcccccttacctgcacctggccgagctgacggcgtcccagttcctggaaatatggaagcactttgacgcagacggaaatgggtatattgaaggtaaagagctagaaaactttttccaagagctggagaaggcaaggaaaggctctggcatgatgtcaaagagtgacaactttggagaaaagatgaaggagttcatgcagaagtatgataaaaactcagatgggaaaatcgagatggcagagctggcgcagatcctgccaaccgaagagaacttccttctgtgcttcaggcagcacgtgggctccagcgccgagtttatggaggcttggcggaagtacgacacagacaggagtggctacatcgaagccaatgagctcaagggattcctgtcagacctgctgaagaaggcgaaccggccgtacgatgagcccaagctccaggaatacacccaaaccatactacggatgtttgacttgaacggggatggcaaattgggcctctcagagatgtcccgactcctgcctgtccaggaaaacttcctgcttaaatttcagggcatgaagctgacctcagaggagtttaacgcgatcttcacattttacgacaaggatagaagcggctacattgacgagcatgagctggatgcccttttgaaggatctgtacgagaaaaacaaaaaggaaatcaatattcaacagctcaccaactacagaaagagcgtcatgtccttggcagaggcagggaagctctaccgcaaggacctggagattgtgctctgcagcgagccccccatgtaaagtggggacgggggctgcttctccacctcccccaaaccctgcttctgctgccctgatgcgtctacccagactcagagaccgtgagcgccccgcccccacccctacagcctgcacacacctgcctgcagagcaggaaacgagagatagaggatgggcagctggggggctgtcctgagccccctgcacccacccctgcccaggcagtctttgctcagtggatcacacacatggaaggtgatgggggcatgggtggagggtccctaattctcttcgctgtgatgcatgagctccctcgctgtatgatttaggcttctatgtccaacagagtggactcttccctctcgctcccctctgccggtcccccatgccaccacccaccccaaacttccaggttccatccaccaccttgccaatggtgtagctgtcctctcagaactcctgtgtgtggaaggcacccgccctttccttgccttctttactcggcgtgctccttttctctttgggtttcttgtttaccaaagaagagtttacagacaataaaatggaaaggtcctgctgtggaaactt

SEQ ID NO: 301 - DNA, 4505 bp, Homo sapiens
gaattccggagggagggtccccaacgctgggcttgcttgggggcagcccctcagcacagccggggaccgggaatgtggaggcgggaattccttctggcagaatgctggagcctttgccctgttgggacgctgcgaaagatctgaaagaacctcagtgccctcctggggacagggtgggtgtgcagcctgggaactccagggtttggcagggcaccatggagaaagccggtttggcttggacgcgtggcacaggggtgcaatcagaggggacttgggaaagccagcggcaggacagtgatgccctcccaagtccggagctgctaccccaagatcaggacaagcctttcctgaggaaggcctgcagccccagcaacatacctgctgtcatcattacagacatgggcacccaggaggatggggccttggaggagacgcagggaagccctcggggcaacctgcccctgaggaaactgtcctcttcctcggcctcctccacgggcttctcctcatcctacgaagactcagaggaggacatctccagtgaccctgagcgcaccctggaccccaactcagctttcctgcataccctggaccagcagaaacctagagtgagcaaatcatggaggaagataaaaaacatggtgcactggtctcccttcgtcatgtccttcaagaagaagtacccctggatccagctggcaggacacgcagggagtttcaaggcagctgccaatggcaggatcctgaagaagcactgtgagtcagagcagcgctgcctggaccggctgatggtggatgtgctgaggcccttcgtacctgcctaccatggggatgtggtgaaggacggggagcgctacaaccagatggacgacctgctggccgacttcgactcgccctgtgtgatggactgcaagatgggaatcaggacctacctggaggaggagctcacgaaggcccggaagaagcccagcctgcggaaggacatgtaccagaagatgatcgaggtggaccccgaggcccccaccgaggaggaaaaagcacagcgggctgtgaccaagccacggtacatgcagtggcgggagaccatcagctccacggccaccctggggttcaggatcgagggaatcaagaaagaagacggcaccgtgaaccgggacttcaagaagaccaaaacgagggagcaggtcaccgaggccttcagagagttcactaaaggaaaccataacatcctgatcgcctatcgggaccggctgaaggccattcgaaccactctagaagtttctcccttcttcaagtgccacgaggtcattggcagctccctcctcttcatccacgacaagaaggaacaggccaaagtgtggatgatcgactttgggaaaaccacgcccctgcctgagggccagaccctgcagcatgacgtcccctggcaggaggggaaccgggaggatggctacctctcggggctcaataacctcgtcgacatcctgaccgagatgtcccaggatgccccactcgcctgagctgcccacgccctccctggcccccgcctgggcctcctttcctcctcctgtgcttcctttctcgttcctaacttttccttcacttacacctgactgaccctcctgaactgcactacaagacactttgtagaagaggagatgagagtttctagtcattttcctaacttcagggcttggaggtggtgtttgcactgctttttgtagagagggtcacctactagaagagaaatgcccagtcttagaggtgggtcaggtgtagagctggagggggtccctggctgctgaggggaccctaccagatgagccctgcctctgggagccccctaggaagcaccagcctggacctaccacctgcggaggcctgctgccccctggcggccagtgctgttagagtgctgccaagcacagccttatttctgccggggcctccccaccggagagcccagggggccggccgggttcctggtccctggctgggagcagggctttctggtagttggggcacaaaaccatcggggaaccacatgttgactgtgagcaaagtgtcttccgattagcagcctcagggatgccctggtggcctctccagggctgctcaggcaaggccccccacccatctggtatggaaacctgccggctccaggccagacccaggagccaagagaaggctgaagccagcttggctgtgttctctgatctaggccttcccagaggaggcgagcagaagctgtgccacttggaattgcaacccatgagttcagaaggcacactctgccatgctgagctccaagggtgctaccaggggaagatgggatctatagagtctctgggccctggccccagggaggagcacatttttcttgaccctcacctacctggtgctagttggtcaaccctgcctgcatacatgggctcctgtcatggggcccagagtcccttgcagatatagaaataggggaggagctcaggtctgcgccaggcaggaagaaggcaggcttctggcttccagaggtgccgcggtggcctcctggcatcatttgttattgcctctgaaacaagccttactgcctggagggcttagattcctgcttccccaatgtagtgtgggtatcttgtagggtatgtggtggatgccagggcgtgctccaggcacctcttcctgaagtctctgcatttggagattcgtggagaacctatttaagcccaattttaactgaaagccagtgagtctgatatggaagggaatgtaaaatttgcctgacttcttaagaacaaaacccccagctctgtgccccatgctccttggggcttgccacccactcctttgctgtcagaggtacaggagctgggagagtccaggagctagggacacagagggagactatggaccaaggtgtgtgtgtctggaggaaccactgcccaccccaccaccccggggtctctggggaactgtcaacctgcccacgggacatgtacatttccccttttgtgctggaagtgtgagtgacacttgctgggggtggagggtgggacacatgaggatgtataagtacagattttaaaaaaggaaatcaacttacacttcctggctcttgtttaaaacagtggtgagctcctgtgtgggccgacttgctaaaggtcacacacgcgcccggtggagcacgagagacctcgtggcagcatgtgatctggaaggcaggcaggacgggggcgttggggagccaaagtcaactctgggcctctggagctatagtgacttttgggctagaagggaccctggtggtctgtgcttcagccatttgcagggcaggggcatcattaattcagacgtaaagattctatgaatatggactggccaaaagttatccttactccatctgtgaaagaagtttgctaaagcaaatcatgatatgaacaaaaattacaggggacctgtttaagagaacaaaatgttccaagcactttaggcagacaccagctgtttgcaaacaatgtgctaatatgcaaatgatgtgcttattaaaggaggcccatggggcctcttattggcaatacttggctgtgggttacattaaatatgtgaacatagtatgaagtagcatcattttagggttattctgttacttagggtttttgttttctgttttttttttctctttttttgtatttaccgtgctagttctcttctacacctactctgtctctcaagccattttgccactcgcttccctgccatctggcccttccctttgtctcagtgggatagatggattgtgaaatggaatctcccagaacccctgccctggcagcctggaagaccgtgcctgcccagccctcgtcaccacagggactccttgggtcctggcagtgcatgtgccagcaggcaggacaaactctgtgtacctgtgcccaggtgaatgggcgcagggtcctcttgccctgtcctgcggggggccccacgagttcctggcattcagcactgcttagcattctcggaaggtttcttcaactgcttgcttttcccaggcttgcctttagtgtcatgtaagacatttttaagttatatttattttgttgggttttaaaattgcacagaacactaagaccgaaaggctggactcttgtttctccttgaaagctttgcctttgttttgaacttcctttcccacttggtagaaagagcccagaagcagccctggccctgtaagatggactctttcatccttcagttgtatttagctttgagtttctctgcatctgtccaccccatgtgtatataacccagcccctggctctggggtggtcacctcgtcagtgccttttgttctggaggagaggacccccccgcctgccgagaggctctcttcctgttctgcacccctctccccatgggaccttggagaaaactgaactgttacaaacccctgcacagtgcctgtcaaacagatgcaaaccttcctgaataaagccttggagacggaattc

SEQ ID NO: 302 - DNA, 2304 bp, Homo sapiens
gaattcgtccaaactgaggatcacaagtctccacattctgagtaggaggatgagggtctgagttaggatttgggtcctgcagggcttgctaaggaatcccctgatggcctaggattccacgcagagcacatctggtgtgagagagctcgctgcaagggtgaaggctccgccctatcagatagacaaccaggccaccaagaggcccagccctccaaaccctggatttgcaacatcctcaaagaacagcaacgggccttgagcagaattgagaaggaaatacccccacctgccctcagccgttaagtgggctttgctattcacaagggcctctgggtgtcctggcagagaggggagatggcacaggcaccaggtgctagggtgccagggcctcccgagaaggaacaggtgcaaagcaggcaattagcccagaaggtatccgtggggcaggcagcctagatctgatgggggaagccaccaggattacatcatctgctgtaacaactgctctgaaaagaagatatttttcaacctgaacttgcagtagctagtggagaggcaggaaaaaggaaatgaaacagagacagagggaagcctgagccaaaatagaccttcccgagagaggaggaagcccggagagagacgcacggtcccctccccgcccctaggccgccgccccctctctgccctcggcggcgagcagggcgccgcgacccggggccggaaaggtgccaggggctccgggcggccgggcgggcgcacaccatccccgcgggcggcgcggagccggcgacagcgcgcgagagggaccgggcggtggcggcggcgggaccgggatggaagggagcgcggtgactgtccttgagcgcggaggggcgagctcgccggcggaggccgagcaagcggaggcaggagcggcggcgacggcggcggcggcggcggcgcccgagcacccgagggggtccgagccccggcagccggccagccccgcgccacaaagggagcgcccccgccgcccggcaccccgcctccctccccaatgtcctcggccatcgaaaggaagagcctggacccttcagaggaaccagtggatgaggtgctgcagatccccccatccctgctgacatgcggcggctgccagcagaacatcggggaccgctacttcctgaaggccatcgaccagtactggcacgaggactgcctgagctgcgacctctgtggctgccggctgggtgaggtggggcggcgcctctactacaaactgggccggaagctctgccggagagactatctcaggctttttgggcaagacggtctctgcgcatcctgtgacaagcggattcgtgcctatgagatgacaatgcgggtgaaagacaaagtgtatcacctggaatgtttcaagtgcgccgcctgtcagaagcatttctgtgtaggtgacagatacctcctcatcaactctgacatagtgtgcgaacaggacatctacgagtggactaagatcaatgggatgatataggcccgagtccccgggcatctttggggaggtgttcactgaagacgccgtctccatggcatcttcgtcttcactcttaggcactttgggggtttgagggtggggtaagggatttcttaggggatggtagacctttattgggtatcaagacatagcatccaagtggcataattcaggggctgacacttcaaggtgacagaaggaccagcccttgagggagaacttatggccacagcccatccatagtaactgacatgattagcagaagaaaggaacatttaggggcaagcaggcgctgtgctatcatgatggaatttcatatctacagatagagagttgttgtgtacagacttgttgtgactttgacgcttgcgaactagagatgtgcaattgatttcttttcttcctggctttttaactcccctgtttcaatcactgtcctccacacaagggaaggacagaaaggagagtggccattctttttttcttggcccccttcccaaggccttaagctttggacccaagggaaaactgcatggagacgcatttcggttgagaatggaaaccacaacttttaaccaaacaattatttaaagcaatgctgatgaatcactgtttttagacaccttcattttgaggggaggagttccacagattgtttctatacaaatataaatcttaaaaagttgttcaactattttattatcctagattatatcaaagtatttgtcgtgtgtagaaaaaaaaaacagctctgcaggcttaataaaaatgacagactgaaaaaaaaaaaa

SEQ ID NO: 303 - DNA, 2895 bp, Homo sapiens
cccgcctgacgactgaccagttgccatggcatcctactacgagatcctagacgtgccgcgaagtgcgtccgctgatgacatcaagaaggcgtatcggcgcaaggctctccagtggcacccagacaaaaacccagataataaagagtttgctgagaagaaatttaaggaggtggccgaggcatatgaagtgctgtctgacaagcacaagcgggagatttacgaccgctatggccgggaagggctgacagggacaggaactggcccatctcgggcagaagctggcagtggtgggcctggcttcaccttcaccttccgcagccccgaggaggtcttccgggaattctttgggagtggagacccttttgcagagctctttgatgacctgggccccttctcagagcttcagaaccggggttcccgacactcaggccccttctttaccttctcttcctccttccctgggcactccgatttctcctcctcatctttctccttcagtcctggggctggtgcttttcgctctgtttctacatctaccacctttgtccaaggacgccgcatcaccacacgcagaatcatggagaacgggcaggagcgggtggaagtggaggaggatgggcagctgaagtcagtcacaatcaatggtgtcccagatgacctggcacgtggcttggagctgagccgtcgcgagcagcagccgtcagtcacttccaggtctgggggcactcaggtccagcagacccctgcctcatgccccttggacagcgacctctctgaggatgaggacctgcagctggccatggcctacagcctgtcagagatggaggcagctgggaagaaacccgcaggtgggcgggaggcacagcaccgacggcaggggcgcccaaggcccagcaccaagatccaggcttgggggggacccaggagggtgcgaggggtgaagcaaccaaacgcagtccatccccagaggagaaggcctctcgctgcctcatcctctgaacaccgggcccaacctgatctgatccagatcttgactggggggtctgactcactgtgggaagagaagaggggagtatcctgagttgtaggaactgctttccaactccaagctccctccacaagtttccctccccaggccccccacaccccagtgtggacttgggatttgctgtgctcagcccagggctgataggtccctggtgaagcccagggtggggggtgtcagggcagtggaggggcccgaggagccaggttgcatttattggatggggagctccaaggggcattagtggtttgggctgggcttttgtgccctggtactctgccacctgtgttgctgatggtgtcaaggaaggaggacttggcctagggttgtctgagccggagccggcagctccactggagagcagtgcaggcagagtggagcctcctgctctcctggaccagctgcagacccccaaccctggtttctgtgccatgttgcgctctgaccgtctctgttgcttctcttctggtgttgcttctcctccctcccattctctctgcaactcctgcgggcgcatcgcttgctttcactgccgtctggctaggactcccttcttccttccttccccgagaaggcctcaatgtggcgaggaagatgctggggccggtagggctgtgagatcttctggggaggctagccgggtggggcgggagcctctcagctgtccagattcagaactggagcccactcctcctccctctcgttgcctcagccctgccctcaccctcagactaggcagaggtgaggctggctcaccctgaagaggtgggataggaggggactgcacccatactgcttccctaccacaaatcagggctcagggagaggccatgcggcagcccaggtctgcatgctgagccccatcctccacagcttgccgctgacgctctctcctgtcaccccgcccctgctctctccccagatgtgttctgagctggatgccgggttccagaatcgctgcacagttccaacaggacagcgccttcccccatgcgctgggaggggaccctccatttctccccctcacccatgctgagtgtagagccggggcctgggtggcgggtgggggccgggtgggaggtggcagtagtcttagcctgtgcactctcttccttgggtgtttggtgctggctcctggggactacaaatcccagagtgcggtgtgcccggcctcatttctgatagatcccgcttgggggaggtggtgtatggttacggagctgtgcatcttgggacatgtagtagcccaggtcttgtcactcgctgtgagatggggagattttgtcttttgatttatccctgtagggctggcagggttgtagatgaagggggaatgatctgagccttggttcccctgacacgtcttgctagccccagggttagagtgggcagggcagagccgcgcagcacctgggagcggtacctttcccttgggcagcctggggtcccaggaacaagccagggcgagtggcatgtctgcctgagcagggtgtggccccagaaagctgaggagtgtgggctggcagagagcttcgagggcaaggccacccgcgggggcgtgtgtgtggtggggcttggcatgtgatggcagctccagctccaggcatgccgctgcttgtatggctttctttggcctctgaccctgctgcccattctttccaacatcacagatgaactgcctctcctcctccctgcctggggagcccagtggccagggagggagtggtggagccagtcgctgtaacactgagcctcagagacgaaccaaaaccagctgggctgagctcagatccagggggaagaaatgctggaagtcaataaaactgagtttgagaaaaaaaaaaaaaaaa

SEQ ID NO: 304 - DNA, 1267 bp, Homo sapiens
cagcgagcggctgcagcggggccgtgaccagcagccagcgggaggcggcggcgagtcggtgagcagctgggaagagcagaaccggggcggagcacctgcaggcgcgggcggcggccccaccatggcgattcgcaagaaaagcaccaagagccccccagtgctgagccacgaattcgtcctgcagaatcacgcggacatcgtctcctgtgtggcgatggtcttcctgctggggctcatgtttgagataacggcaaaagcttctatcatttttgttactcttcagtacaatgtcaccctcccagcaacagaagaacaagctactgaatcagtgtccctttattactatggcatcaaagatttggctactgttttcttctacatgctagtggcgataattattcatgccgtaattcaagagtatatgttggataaaattaacaggcgaatgcacttctccaaaacaaaacacagcaagtttaatgaatctggtcagcttagtgcgttctacctttttgcctgtgtttggggcacattcattctcatctctgaaaactacatctcagacccaactatcttatggagggcttatccccataacctgatgacatttcaaatgaagtttttctacatatcacagctggcttactggcttcatgcttttcctgaactctacttccagaaaaccaaaaaagaagatattcctcgtcagcttgtctacattggtctttacctcttccacattgctggagcttaccttttgaacttgaatcatctaggacttgttcttctggtgctacattattttgttgaatttcttttccacatttcccgcctgttttattttagcaatgaaaagtatcagaaaggattttctctgtgggcagttctttttgttttgggaagacttctgactttaattctttcagtactgactgttggttttggccttgcaagagcagaaaatcagaaactggatttcagtactggaaacttcaatgtgttagctgttagaatcgctgttctggcatccatttgcgttactcaggcatttatgatgtggaagttcattaattttcagcttcgaaggtggagggaacattctgcttttcaggcaccagctgtgaagaagaaaccaacagtaactaaaggcagatcttctaaaaaaggaacagaaaatggtgtgaatggaacattaacttcaaatgtagcagactctccccggaataaaaaagagaaatcttcataatgaattataaactaattgatt

SEQ ID NO: 305 - DNA, 5857 bp, Homo sapiens
cggcgcaggcggcggcgtccgaggagatttaatccagagactgacttcactatagaacccacagttgtatcaatggttggggaaagatagtggcaacaggcaaaggagaaacagctctgacatacaaagaaaatgagtatgctaaagccaagtgggcttaaggcccccaccaagatcctgaagcctggaagcacagctctgaagacacctacggctgttgtagctccagtagaaaaaaccatatccagtgaaaaagcatcaagcactccatcatctgagactcaggaggaatttgtggatgactttcgagttggggagcgagtttgggtgaatggaaataagcctggatttatccagtttcttggagaaacccagtttgcaccaggccagtgggctggaattgttttagatgaacccataggcaagaacgatggttcggtggcaggagttcggtatttccagtgtgaacctttaaagggcatatttacccgaccttcaaagttaacaaggaaggtgcaagcagaagatgaagctaatggcctgcagacaacgcccgcctcccgagctacttcaccgctgtgcacttctacggccagcatggtgtcttcctccccctccaccccttcaaacatccctcagaaaccatcacagccagcagcaaaggaaccttcagctacgcctccgatcagcaaccttacaaaaactgccagtgaatctatctccaacctttcagaggctggctcaatcaagaaaggagaaagagagctcaaaatcggagacagagtattggttggtggcactaaggctggtgtagtccggtttcttggggagaccgactttgccaagggggagtggtgtggcgtggagttagatgagccacttgggaagaatgatggcgctgttgctggaacaaggtattttcagtgtcaacccaaatatggcttgttcgctcctgtccacaaagttaccaagattggcttcccttccactacaccagccaaagccaaggccaacgcagtgaggcgagtgatggcgaccacgtccgccagcctgaagcgcagcccttctgcctcttccctcagctccatgagctcagtggcctcctctgtgagcagcaggcccagtcggacaggactattgactgaaacctcctcccgttacgccaggaagatctccggtaccactgccctccaggaggccctgaaggagaagcagcagcacattgagcagctgctggcggaacgggatctggagagggcggaggtggccaaggccacgagccacgtgggggagatagagcaggagctagctctggcccgggacggacatgaccagcatgtcctggaattggaagccaaaatggaccagctgcgaacaatggtggaagctgctgacagggagaaggtggagcttctcaaccagcttgaagaggagaaaaggaaggttgaggaccttcagttccgggttgaagaagaatcaattaccaaaggtgatcttgagacgcagaccaaactggagcatgcccgcattaaggagcttgaacagagcctgctctttgaaaagaccaaagctgacaaactccagagggagttagaagacactagggtggctacagtttcagaaaagtcacgtataatggaactggagaaagacctagcattgagagtacaggaagtagctgagctccgaagaaggctagagtccaataagcctgctggggatgtggacatgtcactttcccttttgcaagagataagctctttgcaagaaaagttagaagtcacccgtactgaccaccagagagaaataacttctctgaaggagcattttggagcccgggaagaaactcatcagaaggagataaaggctctgtataccgccacggaaaagctttccaaagagaacgagtcattgaaaagcaagctggagcatgccaacaaagagaactcagatgtgatagctctatggaagtccaaactggagactgccatcgcatcccaccagcaggcgatggaagaactgaaggtatctttcagcaaagggcttggaacagagacggcagaatttgctgaactaaaaacacaaatagagaaaatgagactagattaccaacacgaaatagaaaatttgcagaatcaacaagactctgaacgggctgcccatgctaaagagatggaagccttgagggctaaactgatgaaagttattaaagaaaaggaaaacagtctggaagccatcaggtcgaaactggacaaagcagaagaccagcatctcgtagaaatggaagacacgttaaacaaattacaggaagctgaaataaaggtaaaggagctagaggtactgcaagccaaatgcaatgaacaaaccaaggttattgataattttacatcacagctcaaggctactgaagaaaagctcttggatcttgatgcacttcggaaagccagttccgaaggtaaatcggaaatgaagaaacttagacagcagcttgaggcagctgagaaacagattaaacatttagagattgaaaagaatgctgaaagtagcaaggctagtagcattaccagagagctccaggggagagagctaaagcttactaaccttcaggaaaatttgagtgaagtcagtcaagtgaaagagactttggaaaaagaacttcagattttgaaagaaaagtttgctgaagcttcagaggaggcagtctctgttcagagaagtatgcaagaaactgtaaataagttacaccaaaaggaggaacagtttaacatgctgtcttctgacttggagaagctgagagaaaacttagcagatatggaggcaaaatttagagagaaagatgagagagaagagcagctgataaaggcaaaggaaaaactggaaaatgacattgcagaaataatgaagatgtcaggagataactcttctcagctgacaaaaatgaacgatgaattacgtctgaaagaaagagatgtagaagaattacagctaaaacttacaaaggctaatgaaaatgcaagttttctgcaaaaaagtattgaggacatgactgtcaaagctgaacagagccagcaagaagcagctaaaaagcatgaggaagaaaagaaagaattggagaggaaattgtcggacctggaaaagaaaatggaaacaagccacaaccagtgtcaggagctgaaagccaggtatgagagagccacttctgagacaaaaaccaagcatgaagaaatcctacagaacctccagaagacgctgctggacacagaggacaagctgaagggcgcacgggaggagaacagtggcttgctgcaggagctggaggagctgagaaagcaagccgacaaagccaaagctgctcaaacagcggaagatgccatgcagataatggaacagatgaccaaagagaagactgagactctggcctccttggaggacaccaagcaaacaaatgcaaaactacagaatgaattggacacacttaaagaaaacaacttgaaaaatgtggaagagctgaacaaatcaaaagaactcctgactgtagagaatcaaaaaatggaagaatttaggaaagaaatagaaaccctaaagcaggcagcagctcagaagtcccagcagctttcagcgttgcaagaagagaacgttaaacttgctgaggagctggggagaagcagggacgaagtcacaagtcatcaaaagctggaagaagaaagatctgtgctcaataatcagttgttagaaatgaaaaaaagagaatccaagttcataaaagacgcagatgaagagaaagcttccttgcagaaatccatcagtataactagtgccttactcacagaaaaggatgccgagctggagaaactgagaaatgaggtcacagtgctcaggggagaaaacgcctctgccaagtccttgcattcagttgttcagactctagagtctgataaggtgaagctcgagctcaaggtaaagaacttggagcttcaactcaaagaaaacaagaggcagctcagcagctcctcaggtaatacagacactcaggcagacgaggatgaaagagcccaggagagtcagattgatttcctaaattcagtaatagtggaccttcaaaggaagaatcaagacctcaagatgaaggtggagatgatgtcagaagcagccctgaatgggaacggggatgacctaaacaattatgacagtgatgatcaggagaaacagtccaagaagaaacctcgcctcttctgtgacatttgtgactgctttgatctccacgacacagaggattgtcctacccaggcacagatgtcagaggaccctccccattccacacaccatggcagtcggggtgaggaacgcccatactgtgaaatctgtgagatgtttggacactgggccaccaactgcaatgacgacgaaaccttctgatgaagcctccagtggagaactgggcttgctcagacgcactcgcattgacacaacgtaacaccagcattgtgtgtgcagacttcaggagaactcatgttattttttaaccccgtcaacaaatctaggaaaatattttgatcttcaacaaattgccctttagtctccccgtatgagttagaataataaatatttagtaggtgagttttcacctcgaattttgttttcttgatttttacgtttgaagacattgcaccagatgccattacatttattggccccccgaccttgtagaaaaacccctaccctcacaataccttatttaagtaactttaaattatgccgttacttttcatatttgcacctaagatatttccaggctgcatttgtatatttagattttttggttaagctttgacactggaatgagttgaaaaaatgtgccattttgcattttcatctactcatttaaagtattttattcttattcaaagaaatatctgagctctttgcactacctgttatcagtagtgcctttacttcaggcttgataatacttaggtgtgattataaaatcatgaagcaggtaaagggaggggcaagccccaaactgctgtggggacattttataatctatatgctgcacccacttaatctactgtggtgttttgtttattagttttgcataatttcagcttctatatattgtatgtatatattttttaaaaatctatattttgggaaaaaaacatacacaatgtgtctttctttttggacatttacctttttgaaaaagaaaacacttaaaatgatcattaggacataacagactaggccagacatagcatcttgtggctttgcaaccattttcatttgtttgttttccttttatttcttcaccagatttaaataaaaggaggaattttctccaatttttttttccttctctggcaggtatccccagcagtcaattaacaataagccagtataaaacacctaaataaccaatctacaatctcccttcacaagtttttttactgtttttagatgaatgtacgatgagaaattcaacgttaataattctggattttcttatcacaaaaaagaaaatgaaggacctcaaagcacctgaacagtttatcgaccagtttgaatctatttatcttcatttgaatgtcttctagatatgtaaaaagtcataaaatgtatcttccatgctacatgtacaataagaacttctataattgtatatatgcctttgatgtattttcccctcaagattatcaactgtgtgttcgacagtgaatattcaatctggtaccagttgaaatttttggttataaatgtaatacgaattgtttcacaaacagaaaacatgtaaagcagtattaaaatttggccaaacaagtgttctgtatctacttttaataaatggttattcttt

SEQ ID NO: 306 - DNA, 1448 bp, Homo sapiens
ccaccatgctcgccctggaggctgcacagctcgacgggccacacttcagctgtctgtacccagatggcgtcttctatgacctggacagctgcaagcattccagctaccctgattcagagggggctcctgactccctgtgggactggactgtggccccacctgtcccagccaccccctatgaagccttcgacccggcagcagccgcttttagccacccccaggctgcccagctctgctacgaaccccccacctacagccctgcagggaacctcgaactggcccccagcctggaggccccggggcctggcctccccgcataccccacggagaacttcgctagccagaccctggttcccccggcatatgccccgtaccccagccctgtgctatcagaggaggaagacttaccgttggacagccctgccctggaggtctcggacagcgagtcggatgaggccctcgtggctggccccgaggggaagggatccgaggcagggactcgcaagaagctgcgcctgtaccagttcctgctggggctactgacgcgcggggacatgcgtgagtgcgtgtggtgggtggagccaggcgccggcgtcttccagttctcctccaagcacaaggaactcctggcgcgccgctggggccagcagaaggggaaccgcaagcgcatgacctaccagaagctggcgcgcgccctccgaaactacgccaagaccggcgagatccgcaaggtcaagcgcaagctcacctaccagttcgacagcgcgctgctgcctgcagtccgccgggcctgagcacacccgaggctcccacctgcggagccgctgggggacctcacgtcccagccaggatccccctggaagaaaaagggcgtccccacactctaggtgataggacttacgcatccccaccttttggggtaaggggagtgctgccctgccataatccccaagcccagcccgggcctgtctgggattccccacttgtgcctggggtccctctgggatttctttgtcatgtacagactccctgggatcctcatgttttgggtgacaggacctatggaccactatactcggggaggcagggtagcagtgcttccagagtcccaagagcttctctgggattttcttgtgatatctgattccccagtgaggcctgggacctttttaagatcgctgtgtgtctgtaaaccctgaatctcatctggggtgggggccctgctggcaaccctgagccctgtccaaggttccctcttgtcagatctgagatttcctagttatgtctggggccctctgggagctgttatcatctcagatctcttcgcccatctatggctgtgttgtcacatctgtcccctcatttttgagatcccccaattctctggaactattctgctgcccctttttatgtgtctggagttccccaatcacatctagggctcctcc

SEQ ID NO: 307 - DNA, 2679 bp, Homo sapiens
aatattgtatgatttcacttatacgaggcactagaataggcaaattcataaagacagcaagaatagtggttaccaggggctgaggaaagggagaaattgagttattttgtttaatgagtttccatttgggatgatgaaaaaagttgtggaaatggatattggagatggttgcacaacgctgtgaatgtacttaatgccactgaatcatacacctaaaaatgattaaaattgtaaattttatgttacatgtattttaccactataaaaaagcaataggtgcataagtaaaagcatcacacaccagaaaattatagaaaatgagaagggaaacctcctttttcctgtcctcctccccttaacaaataccaagtgttcgtagtggttgtctctgtaattctaaatcattgaggtaactctctataccttgattgttcctctgtagtgtctgcaacctcctctccaaggatgaggaattgactgcacttccactaagtcctaccaaccctctgcttctgtctcttgatatttgatagttacatcatactttggattttccagtggttaacttttagctttaaataacatacttaggctttttctccttaaattttttaaatatggaaattttcaagcatatacaaaagcagagaaaagactacagtaagcctctatatacccagccttctgcttctattacaaactcatagtcaacttgcttcatctgtatctccacgcactcccctccaccaattattttgaaacaaatcttagacattgtatcattttatctacatatttcagtatgtatgtcttaaaaaaataagcattctcatctaggtcaatgccattgagaaagtcttcaaagtgtacaatgaagctggtgtgacctttacatagatggatcgtggctgacttcctcactaccctcttcacctgtaacttctgcagacctatcacaagtttacatgtaaccacagaaatccctttccctcctgactcattagataatggataccattcgcaacaagtcaatccaaatcagccccttaaggagaaacaaattaaggttaggggatcatgtaaaagctgagtgtgaaagtagaaatcacctacaccagagagccattttggtattttgcctttaaactctcctccatctggctgtgcagtcttgctctgtggcttttcccaacacaatcagtgctattgctggggagggacagtcaagagcagtcagttgctctggacaagtctgggacatgctataactttagcatatttaagaagtaggggtgtggcattttcggaaggtggcatagtcctcaagtgagttcttagtattttatatcagcaaaataactcaattttacaggttgcaaacaaatataaaagctgtttctatttatgaattttattctttcagaataaaataagtacatgctgctgtaataaaattgcctttaatcacttaacaaccctaaccttgactcaaacagtgaatgcctataaaaataagaaattttaaaaactagtatttttatatcataaaacaatgtcatttataacttatcagtcatgcattgttgtccagcaaacattaaaagccctgtggataattatcttcatacttgcaaaaatgatagaggctatttttgttaaaactgtcagaatttgctaactatgacacatgggccaaagaaagcagtaacctccttatcatgttaaccaattgttctcttttgaagatctattgttgactaattgaacaataatcaagtggagtgtcccagaaagaaaccacttgggctccctgtttggagtctggctggctctgagcattgccaatggcccctactcgcctgactttgtgtcctctccttttagaggccttgcgttctgcagctagcttcattaacagtgggctgaaaacaactttgggttgagtgtttcgtttgggagttatttggccagggctttagagcagtagtgtcccaatgaagtgctagataataaatgtgtacaaatcagttcttttttttttaactataactccctttcagaaatttctaactactttgtaactgcattacttaacctggtgataaaagcagttattaaaagtctacattttccaggccaggcacggtagctcatgcctacaatcctagtgctttgggaggccaaggcgggtggatcacctcaggtagggagtttgagaccagcctgaccaacatggtgaaaccccgtctctagtaaaaatacaaaaaattagccgggcgtggtggtgcatgcctgtaatcccagcaacttgggaggctgaggcaggagaatcacttgaacccaggagcggaggttgcagtgagccgagatcgctccattgcactccagcctgggcaaacaagagcgaaactccatctcaaaagaaaaaaaaaagtctacattttccaaaaataaaaaaaacaaaaaaaaggatgctcaagaaagcataacctcaatgccattaccacacctaaaaaaaataattccttaatagccagtgactattgaaattttactctctttttctctgtgttcaaagatgtatctaaatacagtccttatactacaatcaatttacacgtctctttagactcttaatctataggtcctcactcttctttttcttcctatggcaatatt

SEQ ID NO: 308 - DNA, 1630 bp, Homo sapiens
gggaccggccgctcccgcagcagccatgtcgttcttcccggagctttactttaacgtggacaatggctacttggagggactggtgcgcgcctgaagggctgggcgagctcagccaggccgactacctcaacctggtgcagtgcgagacgctagaagacttgaaactgcatctgcagagcactgattatggtaacttcctggccaacgaggcatcgctctggcggtgtcagtcatcgatgaccggctcaaggagaagatggtggtggagttccgccacatgaggaaccatgcctatgagccactcgccagcttcctagacttcattacttacagttacatgatcgacaacgtgatcctgctcatcacaggcacgctgcaccagcgctccatcgctgagctcgtgcccaagtgccacccactaggcagcttcgagcagatggaggccgtgaacattgctcagacacctgctgagctctacaatgccattctggtggacacgcctcttgcggcttttttccaggactgcatttcagagcaggaccttgacgagatgaacatcgagatcatccgcaacaccctctacaaggcctacctggagtccttctacaagttctgcaccctactgggcgggactacggctgatgccatgtgccccatcctggagtttgaagcagaccgccgcgccttcatcatcaccatcaattctttcggcacagagctgtccaaagaggaccgtgccaagctctttccacactgtgggcggctctaccctgagggcctggcgcagctggctcgggctgacgactatgaacaggtcaagaagctggccgattactacccggagtacaagctgctcttcgagggtgcaggtagcaaccctggagacaagacgctggaggaccgattctttgagcacgaggtaaagctgaacaagttggccttcctgaaccagttccactttggtgttttctatgccttcgtgaagctcaaggagcaggagtgtcgcaacatcgtgtggatcgctgaatgtatcgcccagcgccaccgcgccaaaatcgacaactacatccctatcttctagcgtctggcccaaggctctcaagtgtgtgtgcgtgtgtgtgtatgtggtctgttacaagcctgtggctcacctgcctgtccggggtgtagtacgctgtcctagcggctgcccagttctcctgaccctcttagagactgttcttaggcctgaaaaggggctgggcccccccccccccaccaaggatggatggatgaagaccccctccagagcaaggaggccccctcagccctgtggttacagccgctgatgtatctaagaagcatgtcactttcatgttcctccctaactccctgacctgagaaccctggggcctgggggcagtttgagcctcctctcccttctgtgggtcgctcccagagccatggcccatgggaaggacagagtgtgtgtgtccttggcctggggggtgttgctcctcacgtccctccctcagccctgcccctctgagacaataaaactgccctctctaagcccaaaaaaaaaaaaaaaaaaaaaaaaaaaccggaattcgagctcgcccggggactcctctagagtcgacctgcagcc

SEQ ID NO: 309 - DNA, 2919 bp, Homo sapiens
agagtttcagttttggcagcagcgtccagtgccctgccagtagctcctagagaggcaggggttaccaactggccagcaggctgtgtccctgaagtcagatcaacgggagagaaggaagtggctaaaacattgcacaggagaagtcggcctgagtggtgcggcgctcgggacccaccagcaatgctgctcttcgtgctcacctgcctgctggcggtcttcccagccatctccacgaagagtcccatatttggtcccgaggaggtgaatagtgtggaaggtaactcagtgtccatcacgtgctactacccacccacctctgtcaaccggcacacccggaagtactggtgccggcagggagctagaggtggctgcataaccctcatctcctcggagggctacgtctccagcaaatatgcaggcagggctaacctcaccaacttcccggagaacggcacatttgtggtgaacattgcccagctgagccaggatgactccgggcgctacaagtgtggcctgggcatcaatagccgaggcctgtcctttgatgtcagcctggaggtcagccagggtcctgggctcctaaatgacactaaagtctacacagtggacctgggcagaacggtgaccatcaactgccctttcaagactgagaatgctcaaaagaggaagtccttgtacaagcagataggcctgtaccctgtgctggtcatcgactccagtggttatgtgaatcccaactatacaggaagaatacgccttgatattcagggtactggccagttactgttcagcgttgtcatcaaccaactcaggctcagcgatgctgggcagtatctctgccaggctggggatgattccaatagtaataagaagaatgctgacctccaagtgctaaagcccgagcccgagctggtttatgaagacctgaggggctcagtgaccttccactgtgccctgggccctgaggtggcaaacgtggccaaatttctgtgccgacagagcagtggggaaaactgtgacgtggtcgtcaacaccctggggaagagggccccagcctttgagggcaggatcctgctcaacccccaggacaaggatggctcattcagtgtggtgatcacaggcctgaggaaggaggatgcagggcgctacctgtgtggagcccattcggatggtcagctgcaggaaggctcgcctatccaggcctggcaactcttcgtcaatgaggagtccacgattccccgcagccccactgtggtgaagggggtggcaggaagctctgtggccgtgctctgcccctacaaccgtaaggaaagcaaaagcatcaagtactggtgtctctgggaaggggcccagaatggccgctgccccctgctggtggacagcgaggggtgggttaaggcccagtacgagggccgcctctccctgctggaggagccaggcaacggcaccttcactgtcatcctcaaccagctcaccagccgggacgccggcttctactggtgtctgaccaacggcgatactctctggaggaccaccgtggagatcaagattatcgaaggagaaccaaacctcaaggtaccagggaatgtcacggctgtgctgggagagactctcaaggtcccctgtcactttccatgcaaattctcctcgtacgagaaatactggtgcaagtggaataacacgggctgccaggccctgcccagccaagacgaaggccccagcaaggccttcgtgaactgtgacgagaacagccggcttgtctccctgaccctgaacctggtgaccagggctgatgagggctggtactggtgtggagtgaagcagggccacttctatggagagactgcagccgtctatgtggcagttgaagagaggaaggcagcggggtcccgcgatgtcagcctagcgaaggcagacgctgctcctgatgagaaggtgctagactctggttttcgggagattgagaacaaagccattcaggatcccaggctttttgcagaggaaaaggcggtggcagatacaagagatcaagccgatgggagcagagcatctgtggattccggcagctctgaggaacaaggtggaagctccagagcgctggtctccaccctggtgcccctgggcctggtgctggcagtgggagccgtggctgtgggggtggccagagcccggcacaggaagaacgtcgaccgagtttcaatcagaagctacaggacagacattagcatgtcagacttcgagaactccagggaatttggagccaatgacaacatgggagcctcttcgatcactcaggagacatccctcggaggaaaagaagagtttgttgccaccactgagagcaccacagagaccaaagaacccaagaaggcaaaaaggtcatccaaggaggaagccgagatggcctacaaagacttcctgctccagtccagcaccgtggccgccgaggcccaggacggcccccaggaagcctagacggtgtcgccgcctgctccctgcacccatgacaatcaccttcagaatcatgtcgatcctgggggccctcagctcctggggaccccactccctgctctaacacctgcctaggtttttcctactgtcctcagaggcgtgctggtcccctcctcagtgacatcaaagcctggcctaattgttcctattggggatgagggtggcatgaggaggtcccacttgcaacttctttctgttgagagaacctcaggtacggagaagaatagaggtcctcatgggtcccttgaaggaagagggaccagggtgggagagctgattgcagaaaggagagacgtgcagcgcccctctgcacccttatcatgggatgtcaacagaattttttccctccactccatccctccctcccgtccttcccctcttcttctttccttaccatcaaaagatgta

SEQ ID NO: 310 - DNA, 18061 bp, Homo sapiens
tgtaccgagctctaatacgactcactatagggcgtcgactcgatcatcccaacacccaggtattaagcctagcgtccattagctattcttcctgatgctttccccccaaccacaggtgccagtgtgtgttgttctccgccatgtgtccctgtgtggaaaatataatatgcattcttaacctgtcaatatctaaagttaatctgtatgtttgctgttttcctaaacagtcccgcaatttagaacaatttaactccattcatccccttccagccctcatctactttaattccatattgttttttcttctcaatagatatattattttatagccaatacttgtctttacatttacatttggtcgcatgcttagcactctatttgttcattattttaattcttttatgcatctcagaactttcatctggaatcatcttccttctgcttaaaacacattctttcagattgctcttagtgaaaacttagaagttgatggcaaattcagttttttaaatgttgaaaatggctttattttacccttcttcaaatataatgttaccgagtcagaaaattccggaatggcagttatttcctcccagcacattgaagattctattccatttccagtgtccattgttgcttttgaggagtcagtcatcagtctaaccaccattcctttgttggtgatttattctctatctgcttgtaattatctggttttctgcctcaatgtgtgtagtgatttatttttattccttttgcctggaattcattaggtctccttaatctgagaacttgggttttttttaaagaattctataaaattctcacttttattttgttgaatgttttcttattctcttgtgtcttcttctggaactctgattagacatatttagaccttctaattatagccttcatgccttcttgacttcctccttcgtcacttagctgcattctggaaattttcctcagagctacattttgttcaataatcctggcttaatctgttcctggatccatccactgaacttgtaattttaacggcattatttatttcctctggtttgtatttcagatctgcttggtacttgctccaattttaagtttgttttattttctaaaacaatttatatttatattcttcatccaatcattctatagccactatgagacaataaataaatccatccaactcatcaaaacacagctgagaattaccaaataagtacaaacaaaaacctaaatatgactgattaactgtgcagaatacaatgatgtaagtttactatacatcaacctccttgtacccatctcctcgcttcaacaaataactcagggcaaaacttccttcatccatacttccaccctccttctccctgtctgaacaagatgccactccagagactgcaggttctatgtctatcatatgtgattgcaatagcttggtcatggtagaatacaaaaaaaaagaaaaaagttgaaagccctctgaaaactgtagtgcttataatagccttcccaactactggccatacttaatattaatcattaacactctcagtagagtgtctcagaagtcaaaatgtatctcctactagctacaaggaagttgggatctaataagtatttatttacagctgcagtcacccaacagcctgaaataccagggtctctaaattcatgactttgtgtatgaacaagggtcaataggatctttactcagtcctcgagatataactcagaaaaatgaattgctgtgaaaaactcacttgatttcctgtggtcacattataagatcgaataatctacaaaagtacaaaactcagtgatatagagaagccagcaaattctcctgcccttatataaacaggtgggaggctttccagtagaattttttctactccaacaaattggtagattgaatgactatacctcataatgatgacactattgtatcatattttagtttaaatttaaaacctcaaaaacttaccaaaactagccaaagatttctggaataagatatagacaaagttatttctcaaaaaaaagaaaaaaattggctgggccgggtgcagtggctcacgcctgtaatgccagcactttgggaggctgaggcaggcagatcacaaggtcaagggatcaagatcaggctggccaacgtggtgaaaccccatctctactaaaaatacaaaaatcagctcggcggtggtgcccacctgtaatcccagctactagggaggctgaggcaggagaattgtgtgaaccggggagggggaggttgcagtgagctgagatcatgccactgcactccagcctggtgacagagcaaagctccgtctcaaaaaaaaaaaaaaaaaaaaaaaaaaacggctggacacaggggctcacacctgtaatcccatcattttgggagggtggggtgggaggatcacttgagctcaggagtttgagtccagcctgggcaacatagtgggaccctgtttctaccaaaaataaataaataaaaattatgtaagcatggcgtgtgtgcctgtagtcccagctacttgagaggctgaagcaggaggatcacttgagcctgggaggtcaaggctgcagtgagctgtgattgtgtcactgcactccagcctgggtcacacagtgagaccctgtctcaaaataaaaataaaatggaaaataactaaaaatgggattttcaactctttgatataaataggtccagccataaggaagaattgtgctacaaaagagaacaaaaatcatcatgtttaacaactgcattcatgttcttttctaattataaagctaactattgattttataatgcttctacacaccttgatcatgtgttagcatatgaaactcttagctgagaccaacttactataaaacttgtgtaatttaaatagtataattttccaatgactttaatctaacaacctcctaccccattaatcaacaccaaaaacaattcatctttgaatacatgtataaagaacatagttcatgtgtttataaaaagttcttctctgctacagagtttagctgtgacatctattaacaaagtaatttataactctaataagttagcaaggtcttcttgctaccagtccagtcattggtggtgagtactcagtattggctgatgaatacatgaatggataaaaatataagagctgcccacacatataccataaaatgcataaaatagattccattttatctcaatttttatttctgtgatataactaagataaaatcaaacacaatgtattattttaaagtatactgtttataagagagaaataataagatctgaccttattttagaagaaagttgtgtgtaaaagaaatttaaactcaaaagtaaaaaagccactggtttctaaaaactcaaaaaaaattttttttaagtgactggctttcagaacaacagcaacaacaaataagccactaaaataagacaattaaattccaattttttttgcatttacttgcttgcttaattatatacaaatctcaattccattaaagtatcaggatgacaattaattagatgtttttagtgacttttccaatcccttctaattaacttggaagtgattaactgattatctaattatattaattagtgattatctaattaactaaggaagtgatttacatgcttcatgggaagtgtgaattctcagccagggggtttgaatgaagggaagcaagtgactcaggcatttattggttgcttacaatcagattcccaccgatgagatcatgcccatgtgtctagaggtccacacacaagcagctgcctccagcccaaccctggaagctgagtgtagtcccaagtccccgcctgcaccccttcctatataaacagccactctcgctgtgattatgggggcatacaaggaagatcaggcttccatggaagcttctgcaactgaaatccactggggactttagaaggagcacctgtaagtagcttcaggatggatggggcagagtctgtctcatggtgggtgttaagctggcctcatacaaaagaggagacccatcctgataccatgccaggtacaaagcactgtgtgatttattctaagtgtcttggtaacaggacttgaagccaggtggtgactggaaacctaaaatgcaatatttagtcatagaacattagaaatagaaagaaaataacctcccaaatcatctaatccatcactcagctaaattcatttaattcacatccccaaactacatctccaaatgtacaatggtttcattcctggtttagggattcgaggttttgtgtttgtacaaaatattttaatagtcttataaaataagatgtccaaaacacaataaacttaaaagccaaacacaagcaaagcatgaaacagaggttctgaagagcaactcctcaatacaaatcaaacattgtcctttatctccattgtgactttcagttatgtaggcacatctgcctttttagatacctaaattatacatgaggattgtaaatattctttgtgtgtatgttaggatgaaaaaaacctgccaaggcaggcgcatgggctaaaagaatacactttcctgtttccttttattacctgtttaattaaaaaaaaaaaaagttgcccctgataaaagcctccaagaaatgcctctagtggtattttctggaattgaattaagcatattaacatattgctatacaaagcggggggcgtggaagtaaggcaaggtggactgtggtgccaatcctagtgacatgtcagcagaggaggagtttcttgcctgtggacttcataaaaggctagctcaacaccctccatgagacacactctgccccaaccatcctgaagctacaggtgctccctcctggaatctccaatggatttcagtcgcagaagcttccacagaagcctgagctcctccttgcaggcccctgtagtcagtacagtgggcatgcagcgcctcgggacgacacccagcgtttatgggggtgctggaggccggggcatccgcatctccaactccagacacacggtgaactatgggagcgatctcacaggcggcggggacctgtttgttggcaatgagaaaatggccatgcagaacctaaatgaccgtctagcgagctacctagaaaaggtgcggaccctggagcagtccaactccaaacttgaagtgcaaatcaagcagtggtacgaaaccaacgccccgagggctggtcgcgactacagtgcatattacagacaaattgaagagctgcgaagtcaggtgagagatgatgcttgtgtttcctactctgtgtttagcttcaagataaatcaagaggttatctatgttaggtaggtccaaatggactttgtaaagcaaattaggctaaaatgttacatctataaaaattctttcatctacctttagtgctggagtacctgactgtacaataggatgaccttaaatcatgctatttttaatgtttaacacaattacatacaaaatatgaacattttatcctccggaataaaatgaatctttgtcacagcttatcacatcagggctaaatgtatagtgaacaatctttctgaaaagagctaaaaattaattacgtgataaatctctcttagtttttcacctagtccttatcaagttttgaaaccccagtaaattcaaagacttttctccttttatttaagtaaatgttataatatgactattagaatactgtactgcagatttaaatagcaaagtgattctgggtggaaacagtgtggcaggaatatgggtcttaatgatgcctggatttttaagtgccctgtttaataacatgaccatcagcatcaagcagttcagaaactacttctacagtaataaaatgttctattgcccccaattcatgtttattacaatcatatcacaacctcctcctatgtcatcaaaaaaagggtggagctctgtattttatcagtttcatggaataaaagcagaagactttgctcctaattgaaaatttcagatatgacacagagcacttgcttcaaattaaagttcttatctaattaagaaaagtgttcactgtaatttgtgttaagattcatactcctttagagcaaagcgcatttacttaccagcaagtctgtttttcttgagttgtactaaacatcagggcaatttgattcggactccatgggaagttactttggaattttagaaactataggcatgtgaagcaatggcatttaaatagcgccttccggaataaagttcatcctctgcaagctctcactaaaaatgttcgaaccacacctgtctcgtgtttctgactctagtttggttcatctgaaatacacagcacaggccatccgtcccattgagctggacagtcccaaccataggaagcagccctctccaaaactgggtccattgaaagagaaatgtcattgtaacatcttctgcaagtagatttttcatctatatgcctccatcatgcatttcgttctttcatgcatcatgttctttcattcagccaatactgaatgaacactaactaggtgctgggcaccatgctggggactgaggaatattatggtggacacaatatgatttatgaggatacagggatggacagagggaccagcacacagagggataatgagagcacaggcagatcatccagttcagttttgagagcatctgtgaaggctcctatgaagcaatgttgtcgaacctgagacatgagggaggaatgggagttcaccagaccacaggggctaaaagaaatgtcctaagtagaaacatcaaaggcaaggcactcaataaggtgtgatgactcaagttgagttaaattatccttctgtaaaatcacaagaaagtagaccaaaccctggggcatctagagttgcattttatgactctgttatgttaaataactatgtcattattttttctatatattttcatgtagaaatacttgaaatgaacatcatttttgacataatagtcactgtagctggggataaactaaatccttgtaaactcctatccagttgaaaatgtcattcttggccgggcacgtggctcacgcctgtaatcccagcactttgggaggccgaggcaggcagatcacctgaggtcagaacttcaagaccagcctggccaacatggcaaaatgctgtctctactaaaaatgcaaaaattagccgggcatggtggcggatgcctgtaaccccagctactcgggaggctgaggcaggataattgcttgaacctgggaggcagaggttacagtgagccgagattgtaccattgcactccagtctgggcaacagagcaagattctgtctcaataaataaataaataaataaataaataaataaataaataaataaaaaagaaaatgtcattctttctcatgtattttccagattaaggatgctcaactgcaaaatgctcggtgtgtcctgcaaattgataatgctaaactggctgctgaggacttcagactgaagtaggttccctaatacgtggcaaaagtttctgaaaaagaattcctttagtagtccttccagatactcagctttccatatcattgttgataaaggaagcacggttcaatgtccagaatcctgaagcctaaaggaggttagaagctacatgtatgaagctaacccagcactcagggatggccttctctttcttgatcccccggcatgtaactaaacacctccagtaactactattctccttggttattactggttgctaaatttttttttagtaacctggtatctaaacctaattctgccctttggagtaataacaaagtaatttacaattctccttctccctaagtgcctttctgttatctaaagagagtcttgtgtctacccttggtgattctccaagtaattctccacgttcattcaagtgcctgcaagtgtatgacccaagttccaggggtgactcttgatgatttctggcttgccagtgttttacaggatggtctggccaaccaaagaaccaggaccaatctataataattagctggcgtgatgccgtatgtctgtaatcccagctactccggaggctgaggcaggagaatcgcttgaacctgggaggcggaggtttcagtgagctgagatcgtgccattgcactgcaacctggggggcagactgagaccttgtctcaaaaaaaaaaaaaaggaagaaagaaagaaaagaaaaagaaagtaaaaattgtgttcactttctttgtagtcatcacaccacatgtgaccagacctgttccttgcaaacagcttccacactaaggcctcttcatcctgaatttgtacaatgcattaacaccaaaaagccctttgtggttagaagggtagccttttaatgctccaagggattaacaagaaggaaataggaaatcaaatccaaagatgaaagcagtaaaggtgcattacttccaattttacctagcactgagtgtcacattgcagtgtcattttttaaagttggatattttaggaaactgggcagggcatgcatgatcgtaacgcctgtaatcccagcactttgagaggctgaggcaggaggctcacttgagtcctggagtttgagaacagcttgggcaacgtggcaaaaccacatctctatacaaaaatacaaaaaaaattagctgggcatggtggcatacatctcgtgtcccagctacttgggaggctgaggtgagaggattgcttgagccccaaaggttgaggctgcagtgagccatgatcacaccattgtactccagcctgagtgacagagtgggaccctgtctcaaatacacacacacacacacacacacacaccacacacagtgtgtatgtaagattgtagaggaggatgtagagctgtttgagataattcactttggatgtctctgttcacaaagtaataaaaataaatcgatcatgtacattcattaagtaaaactaaccattatttaatatcaataataagaaccctttgccaacacaataattaacacaatttaatttcttataagataaattctagaatttagaagtgttcaaaattatttcagattgcctttttaccagtcaccccaaattatagagattatattattgagcacattttctgactcctaggttcttatgtaaatttcatgattgtgtaaaggcagacattataaagtattgaaattgatctcctcataagccacatttaaaaacctatcccattatattagattctctccttataatggcttcagaaggaccagttatctctgtacactaattaattcacaggtatgagactgagagaggaatacgtctaacagtggaagctgatctccaaggcctgaataaggtctttgatgacctaaccctacataaaacagatttggagattcaaattgaagaactgaataaagacctagctctcctcaaaaaggagcatcaggaggtgagaaaatattcagaagtggtattggaaacaatggaatggttctatataatactaataataggaggagcgggagaaacaggagaagggggaagagttggtggtgatagtgacagagatgatgacgatgacaataatgatacaagccctaccttcttttcataatgttgttgtaagttaaatgacttagagcagcacctggaccacaataagcccaacacaagttattattttatatcttttttacttattcccaatgaaagaggtcatgagactccttatgtcttttctgcccagccttatctgagaatgtgcttcagactaaaatcaatcagaaatttcactttcataggaagtcgatggcctacacaagcatctgggcaacactgtcaatgtggaggttgatgctgctccaggcctgaaccttggcgtcatcatgaatgaaatgaggcagaagtatgaagtcatggcccagaagaaccttcaagaggccaaagaacagtttgagagacaggtaaccacacaattctaaagggtgagcaaacgtgtagatgctttcctccagaaacagataactcattttctttttcatttgttcattcttcctttctctttctgtcttttctttcttatttccacccctcaactatttttttttcactcttggcactgtagactgcagttctgcagcaacaggtcacagtgaatactgaagaattaaaaggaactgaggttcaactaacggagctgagacgcacctcccagagccttgagatagaactccagtcccatctcagcatggtaaagcatatctaacttctctttctcaatctagtatgtgtttaccaaggtcctctgttaggaactatagaaatgcaaagacctacaagaaataacccttccccttgcagaactggcagggaaacaggccgaacaactgattataattaaaggacagagagaaatcgaggaaagggcaatgtactgcatgaatgcagaggaaagagtaaatctggaagatttcacagggaaagtggcatttaaaccagatctttttgtaacttttaagttcaggagtacatgtgcagatttatgatgtagttaaacttgtgtcatggggatttgttgtacaggttatttcatcactcaggtattaaacctaatacccattggttatttttcctgatcctctccctcctcctaccctccaccctctgttaggcccccatgtctgctattcccctgtatgtatccattataccagatctcaaaatctaagataaaattttaagatggagaatggactagagacattccaggccaagcaaatcagcaagcccatgacaaattatgttgtggtaagcagaatccctcaaaccacagtggcctgcagccatgatactacatccaccgtgacatttcctttccaagggcaaggctaaaggggtaggccctacctaggacatgccagtgtcctggcagaaagaaaagagcaatggttggtccacttgatagctcttaaagcttctccttagaaaaggcatttgtcctttgggaggccaaggcaggaggatcatttgaggtcaggaggttgagaccagctggccaatatggtgaaaccccatctctactaaagatacaaaaataagctgggcatggtggtgtgtgcctgtaatcccagctacttgggaggttgaggcaggagaatcgcttgaacccaggaggcagaggttgcagtgagctgtgatcacattactgcactccagcctgggcgacagagcaagactccgtcccaaaaaaaaaaaagaaaaagaaaaggcatttgtcagtttgacctgcattttattaaccaaagagagtcacatgacccagccaggtgtcaatggattaaaggaatctaatcctgcaattgagaaatgccacagatcacatggccaggtctgatgaaggagtgagaggtataacatcttcacacagtggggaagcaagtactgagaacaatgctacaatgcgccgcactgaaagaacagtaggtgcaaagctacaagcaaagaaaaaccccaagagctaatgatcctagctggctggctgaggttgcctagttgggaagagtgggagatggagctagaaatatacaccatgcccacagtgatgaactgcagagacccttctcaaaggaaattaaaattaacccatctcttgaatcaagtcctcacataagaagtgccctatttttcttgtgctcatagaaagagtctttggagcacactctagaggagaccaaggcccgttacagcagccagttagccaacctccagtcgctgttgagctctctggaggcccaactgatgcagattcggagtaacatggaacgccagaacaacgaataccatatccttcttgacataaagactcgacttgaacaggaaattgctacttaccgccgccttctggaaggagaagacgtaaagtaaggctcttagaatcaaggaataggtgtcaatatctgtatgcacttctattttaatgtccctgtcactcattacccagcaccaatgcaatccctaggacagaagcaattatactcacacatgcctcaccacgaacaacaaaacgaaaatataccaaaaaatacacacacgcccaaaatatcaagtacagccttgagatcatgtggtaggactgagttctaccacatgatcatttggagataattctccaaatgatatagattatgctgatattaattttcatcattaatatataattgaaggcataataaccttttggaaattctaattgagagctcatgaattagacaataagctgctgaggtccacgggagccagtctgagaatcataagtgtggcagcagcaactgtcttcagataccatacctaagaatatcaacaagagaacacaagatttaaacttccattgtaattttgttattttaattagaggaacttcttagcatatattaaactggtcagttttaaatctatgtatttttcaagttaaaaagtaaaatgctcaagtttgcaataaaagcaatgtaaaagggaaagatatatgaaagcaataacacattcacttggactttgaaatataaaagacaggagtgcattccattttcaaaacagcaataatgcttttttctgtttcttttttcttcttttcattaaaaaaaaaaacagaactacagaatatcagttaagcaccctggaagagagaggtaagttctaaatttttgcacattttctatgacattcagctgctttctattaactacatgccactgataaaaagtaaagtgaggctgttttagtctgttttctgctgctgtgacagaatacctgagactggataatttacaaacaatagacgtttacttggctcacagttctggaggccagaaagtccaatatcaaggtgccggcatcttgtaagggccttcttgctgtgtcatcccatggcagaaagtagaagtgcaaaagagtgtccatgagaaccagagagcaagaggaggctaatctttcttttagaactagcccactctcacaataactaacccattatcatggtaaccacattaatccatccatgagagaagagccctcatcatctaatcaccttttactaggccgcacctcccaacactgttacattggggattaagttttccacacatgaactccagggaacacattcaaaccatagcaaaggccaattctcaagggagcagatatgacaccagggattctaaaaatcttgtacatggcataaagaaaccctccacatgggaacttgggcacactcctcagaatggggtgattttcttggcctgtgctattgctatcttgaaacatcctgacatcctgaaaaggaaaaacaagacaaaatttgaattccacttaaattcaagataatttatttcttgaatttttaagagtaggacatttgtaaatttggggagaagcacattttctgcatctatttataaaatggacttaagattttttgagaaagaggatgggtttaacatatttttctaaaagaaggaaataagtaaaaagaataataatttaaagttgaataatataaatcagcagagtcatgtgcctgaattaacatttaatgtttaatatgaattcagatataaagaaaaccaggaagattaagacagtcgtgcaagaagtagtggatggcaaggtcgtgtcatctgaagtcaaagaggtggaagaaaatatctaaatagctaccagaaggagatgctgctgaggttttgaaagaaatttggctataatcttatctttgctccctgcaagaaatcagccataagaaagcactattaatactctgcagtgattagaaggggtggggtggcgggaatcctatttatcagactctgtaattgaatataaatgttttactcagaggagctgcaaattgcctgcaaaaatgaaatccagtgagcactagaatatttaaaacatcattactgccatctttatcatgaagcacatcaattacaagctgtagaccacctaatatcaatttgtaggtaatgttcctgaaaattgcaatacatttcaattatactaaacctcacaaagtagaggaatccatgtaaattgcaaataaaccactttctaattttttcctgtttctgaattgtaaaaccccctttgggagtccctggtttcttattgagccaatttctgggttaatcttattgatttttcagcatcagtacaactctacaacctttgagctatatctgctttttcccattgcttccactgccttttaaaactcaacacagctttttgaataatttgagagtcaaattcaatcacaaatgctgagacgaataagagtgaagtacactatacttaaaatggaaatagattaaaaacaacattactgaaacccttcgcaaggcaaaatgtgtctccttttgataataagctgcatatactatcaggtcctctctttctttatatggtgaacatatatttttaatgaaatgtctctcatttttttaataacagatttattgagatataattcacacaccatgaaattcacccttacaaaacgtacaattcagtggtcttcagtatgcttacaatgttttgcaaccatcaccactatctagttttagaacacttcatcaccccaaaaggaaatcttgtacctattagtagtcaccgccttttcccttcctcccagcccctaacaaccactaatctacttcctgtctctacggatttgcctactctggacatttcatataaataggttaatacgatgtgtccttttatacacaaatgttcatagcagcattactcataaaagccccaaagcgaaacacctcaagtgtccatcaaccgatgaatggataaacaaaatataatatatccacacaatagaatcttattcgtcaataaaaaggaatgaagtactgatacatgctataacagagatgaacttcgaaaacatgctaagtgaaagaagccaaatccaaaaacaataaaaacacatattgtatcctcaccctttttgcattttagtgagcaatcattgcatatgaatgtttatgggaaaaatcaatgtgtgctaaatcattgtattccagtaaatagattggacttaaaacttgatacagaagttgcaaataagtgggattgagtttgattattatatagaaaataattacatgattcatttaagaataataatatccaccatttattgagcacttactatgagcctgtgtgccaaacatttcatgcatttctcatttaattctcacaataatcctgtgaggtagaagctattaggttgaatcatatgaacttgccaatatatgataatttctaagagttgggaatttttgaggatgtgaatggtaccactttgaattcctaagatgtaatataatatctaacacatagcaggcacttgattcattattttaaattgaaagaataaagttttttaagctttccaatatatgataatttctgactttcagaaatagcaattttatatgctattatatagcatatataataaggttcagccttattatgttacccccactttacatatgaggataaatgaggactcatatgaagacatgagataaagactttcccaaagtcaagcagttaccaagtagtagagcgagactgaacctcagcgctgtttctctaaaaccaggacaccctcataagcaactaattacataacaaagcaatacatgattcacagttgaaataggcacttgctatccgcagttattttgttgttttctaattgtcattttcatcagccagacacaacagccaattgtggcaaatgtccagctttggctcgtaacatcacacatgacttgattcagtacaacttttgtcagaaaaggtattctcacctattctcattgccttcttttccaaagtgaagagatttcactcatttttttcttaattttcttccaagtcacgctagctagtaagttgcatttaaagatgttaagaatatttaaaagtgaattctttttcacctactgagtcacattccagaatagtctgaaactttgacatgcaaataccagactgtgaatctgattaataagaaacctatgcagatgggtttgtaactgattaggcctgaccactgttatatggcaatgatgacactgtgttaaaagaggtaggattgttattcttaatttaggatggtcctcttttaactacctgttaaaagaagtagaattgttatttttagatcagaaaaatgaagattttttcttcctcttgcttctttggtctgtctctagtttcttccaagcaatctttcaaagaagtgagtgagagctacatacatgtggaccagatggtggagttctacctccagttctgccagcagttactgtgtgaaagtgaagcattaatctttgtatctatctatatttctgatatgagctaagaactagaatgacataatcctatttctgacaggtaaacagatccagagagaagtctttatcacacattagaattatcatcaatgtattttttcattttatatgaaattgtcagtgcagaagtgaagctatcaaactcagagagagcccctagaggtgaggttaggatggaaataactattttttctgagctctggagattatttctacccagagttctgaatcatctaaaaaggagaatgacatggagtgatacaaaatcaaaacatggccagtgacctcctcagacactctgttctcatccacatgcatcaggatcagcctcaggtacctgattagacccccaagtaacaattccaacttaaagcattagtagtgatttttatttttgaattctctttcaaacatctctgttttctctcccctaggctcatttccaagattcctctcatcagggtattattttatcatcttcctgtctcctaccactttcaaaattctcccctgctttcaagaaccattgatctctggagcccagaagtcaatctcactcataccccttaggtccttgtttaaccctcatctcaaaagcacaatacataaaatgtaggcaacccaaaattctctcagtcactcacaggattttataatgttatccaaagtgaaagatgttacagatcaagggatcagcgagttgcagaaaatgacaggtctgtcttacgggaaaaaactcaggtagaaaaccctgcaaagaccaggacagaaaccaacctgacatgaaaagatgagggtatgatttactcaataaaaatctaaagacttgtaaaaaccacataactaattttctctattttgaacatttcctaaactctacaaaaatggaagatataattcttttgaacagtttgccctggctataatcattttcctctctgcctcaacttatgcaatcactctgccaacaagcccaagattgtttattgttttttacatcaccactgccttatgcattaatgtggctgtcaaagaaaattattttcacttctaaaacctctaaagcagagtcttgattatttaacttagcctcccacttaaaaaaaaaaaagccactgaagaagaaatatttcccttttcaacttctgaagttgctccccattcataactgaattcagaataaatattggtcaaagcataccagtaaattagggcacagtcattttcaaatgaaatgaatttcaaatgacacattcaaacacattaagacttaacttctttcaaatgaaatcattcaaggagtgcagtgataaagttcagcgaaacactaggctaggactcaggataaaaaataaattagatgtagtacctacctaacaagcttagtctaggataatatgttatatgtatagaaacataaacaaataatatataaacataatttttagagattgagcaatattatttaaattttaccataggcattagagttggaaagtgtacctttcagcacaaaatcaattccaagttcaaaaattcaacttaatcatattcccgtattatgtgatcgagtcgactccctttagtgagggttaattgagctc

SEQ ID NO: 311 - DNA, 2834 bp, Homo sapiens
tcggagcctgcggagggtggtggtggtggtggtggtggccctcgcccgcctcactcatgcctcctcctcctctgctctcgctcaggcgcctcggtggcggttggtcggcggttacgcggctggtggtcgcggcggccggggctcgctctcggggaggccggggcggatctcgcggcgcaggcggcggcggccgaggtggggtcgcgcggcggaggcggctcgagcttcgtgctgcgcgctcgctcttgggctcctcgctgcaggaggagtgtgactatgtgcagatgatcgaggtgcagcacaagcagtgcctggaggaggcccagctggagaatgagacaataggctgcagcaagatgtgggacaacctcacctgctggccagccacccctcggggccaggtagttgtcttggcctgtcccctcatcttcaagctcttctcctccattcaaggccgcaatgtaagccgcagctgcaccgacgaaggctggacgcacctggagcctggcccgtaccccattgcctgtggtttggatgacaaggcagcgagtttggatgagcagcagaccatgttctacggttctgtgaagaccggctacaccattggctacggcctgtccctcgccacccttctggtcgccacagctatcctgagcctgttcaggaagctccactgcacgcggaactacatccacatgcacctcttcatatccttcatcctgagggctgccgctgtcttcatcaaagacttggccctcttcgacagcggggagtcggaccagtgctccgagggctcggtgggctgtaaggcagccatggtctttttccaatattgtgtcatggctaacttcttctggctgctggtggagggcctctacctgtacaccctgcttgccgtctccttcttctctgagcggaagtacttctgggggtacatactcatcggctggggggtacccagcacattcaccatggtgtggaccatcgccaggatccattttgaggattatggtctgctcaggtgctgggacaccatcaactcctcactgtggtggatcataaagggccccatcctcacctccatcttggtaaacttcatcctgtttatttgcatcatccgaatcctgcttcagaaactgcggcccccagatatcaggaagagtgacagcagtccatactcaaggctagccaggtccacactcctgctgatccccctgtttggagtacactacatcatgttcgccttctttccggacaattttaagcctgaagtgaagatggtctttgagctcgtcgtggggtctttccagggttttgtggtggctatcctctactgcttcctcaatggtgaggtgcaggcggagctgaggcggaagtggcggcgctggcacctgcagggcgtcctgggctggaaccccaaataccggcacccgtcgggaggcagcaacggcgccacgtgcagcacgcaggtttccatgctgacccgcgtcagcccaggtgcccgccgctcctccagcttccaagccgaagtctccctggtctgaccaccaggatcccagcccaagcggcccctcccgccccttcccactcgcagcagacgccggggacagaggcctgcccgggcgcgccagccccggccctgggctcggaggctgcccccggccccctggtctctggtccggacactcctagagaacgcagccctagagcctgcctggagcgtttctagcaagtgagagagatgggagctcctctcctggaggatgcaggtggaactcagtcattagactcctcctccaaaggccccctacgccaatcaagggcaaaaagtctacatactttcatcctgactctgccccctgctggctcttctgcccaattggaggaaagcaaccggtggatcctcaaacaacactggtgtgacctgagggcagaaaggttctgcccgggaaggtcaccagcaccaacaccacggtagtgcctgaaatttcaccattgctgtcaagttcctttgggttaagcattaccactcaggcatttgactgaagatgcagctcactaccctattctctctttacgcttagttatcagctttttaaagtgggttattctggagtttttgtttggagagcacacctatcttagtggttccccaccgaagtggactggcccctgggtcagtctggtgggaggacggtgcaacccaaggactgagggactctgaagcctctgggaaatgagaaggcagccaccagcgaatgctaggtctcggactaagcctacctgctctccaagtctcagtggcttcatctgtcaagtgggactctgtcacaccagccattcttatctctctgtgctgtggaagcaacaggaatcaagagactgccctccttgtccacccacctatgtgccaactgttgtaactaggctcagagatgtgcacccatgggctctgacagaaagcagatcctcaccctgctacacatacaggatttgaactcagatctgtctgataggaatgtgaaagcacggactcttactgctaacttttgtgtatcgtaaccagccagatcctcttggttatttgtttaccacttgtattattaatgccattatccctgaattccccttgccaccccaccctccctggagtgtggctgaggaggcctccatctcatgtatcatctggataggagcctgctggtcacagcctcctctgtctgcccttcaccccagtggccactcagcttcctacccacacctctgccagaagatcccctcaggactgcaacaggcttgtgcaacaataaatgttggcttggaaaaaaaaaaaa

SEQ ID NO: 312 - DNA, 10660 bp, Homo sapiens
ctactacagtggcggacgtacaggacctgtttcactgcagggggatccaaaacaagccccgtggagcaacagccagagcaacagcagctgcaagacattgtttctctccctctgcccccccttccccacgcaaccccagatccatttacactttacagttttacctcacaaaaactactacaagcaccaagctccctgatggaaaggagcatcgtgcatcaagtcaccagggtggtccattcaagctgcagatttgtttgtcatccttgtacagcaatctcctcctccactgccactacagggaagtgcatcacatgtcagcatactggagcatagtgaaagagtctattttgaagcttcaaacttagtgctgctgcagaccaggaacaagagagaaagagtggatttcagcctgcacggatggtcttgaaacacaaatggtttttggtctaggcgttttacactgagattctccactgccaccctttctactcaagcaaaatcttcgtgaaaagatctgctgcaaggaactgatagcttatggttctccattgtgatgaaagcacatggtacagttttccaaagaaattagaccattttcttcgtgagaaagaaatcgacgtgctgttttcatagggtatttctcacttctctgtgaaaggaagaaagaacacgcctgagcccaagagccctcaggagccctccagagcctgtgggaagtctccatggtgaagtataggctgaggctacctgtgaacagtacgcagtgaatgttcatccagagctgctgttggcggattgtacccacggggagatgattcctcatgaagagcctggatcccctacagaaatcaaatgtgactttccgtttatcagactaaaatcagagccatccagacagtgaaacagtcaccgtggaggggggacggcgaaaaatgaaatccaaccaagagcggagcaacgaatgcctgcctcccaagaagcgcgagatccccgccaccagccggtcctccgaggagaaggcccctaccctgcccagcgacaaccaccgggtggagggcacagcatggctcccgggcaaccctggtggccggggccacgggggcgggaggcatgggccggcagggacctcggtggagcttggtttacaacagggaataggtttacacaaagcattgtccacagggctggactactccccgcccagcgctcccaggtctgtccccgtggccaccacgctgcctgccgcgtacgccaccccgcagccagggaccccggtgtcccccgtgcagtacgctcacctgccgcacaccttccagttcattgggtcctcccaatacagtggaacctatgccagcttcatcccatcacagctgatccccccaaccgccaaccccgtcaccagtgcagtggcctcggccgcaggggccaccactccatcccagcgctcccagctggaggcctattccactctgctggccaacatgggcagtctgagccagacgccgggacacaaggctgagcagcagcagcagcagcagcagcagcagcagcagcagcatcagcatcagcagcagcagcagcagcagcagcagcagcagcagcagcagcagcacctcagcagggctccggggctcatcaccccggggtcccccccaccagcccagcagaaccagtacgtccacatttccagttctccgcagaacaccggccgcaccgcctctcctccggccatccccgtccacctccacccccaccagacgatgatcccacacacgctcaccctggggcccccctcccaggtcgtcatgcaatacgccgactccggcagccactttgtccctcgggaggccaccaagaaagctgagagcagccggctgcagcaggccatccaggccaaggaggtcctgaacggtgagatggagaagagccggcggtacggggccccgtcctcagccgacctgggcctgggcaaggcaggcggcaagtcggttcctcacccgtacgagtccaggcacgtggtggtccacccgagcccctcagactacagcagtcgtgatccttcgggggtccgggcctctgtgatggtcctgcccaacagcaacacgcccgcagctgacctggaggtgcaacaggccactcatcgtgaagcctccccttctaccctcaacgacaaaagtggcctgcatttagggaagcctggccaccggtcctacgcgctctcaccccacacggtcattcagaccacacacagtgcttcagagccactcccggtgggactgccagccacggccttctacgcagggactcaaccccctgtcatcggctacctgagcggccagcagcaagcaatcacctacgccggcagcctgccccagcacctggtgatccccggcacacagcccctgctcatcccggtcggcagcactgacatggaagcgtcgggggcagccccggccatagtcacgtcatccccccagtttgctgcagtgcctcacacgttcgtcaccaccgcccttcccaagagcgagaacttcaaccctgaggccctggtcacccaggccgcctacccagccatggtgcaggcccagatccacctgcctgtggtgcagtccgtggcctccccggcggcggctccccctacgctgcctccctacttcatgaaaggctccatcatccagttggccaacggggagctaaagaaggtggaagacttaaaaacagaagatttcatccagagtgcagagataagcaacgacctgaagatcgactccagcaccgtagagaggattgaagacagccatagcccgggcgtggccgtgatacagttcgccgtcggggagcaccgagcccaggtcagcgttgaagttttggtagagtatcctttttttgtgtttggacagggctggtcatcctgctgtccggagagaaccagccagctctttgatttgccgtgttccaaactctcagttggggatgtctgcatctcgcttaccctcaagaacctgaagaacggctctgttaaaaagggccagcccgtggatcccgccagcgtcctgctgaagcactcaaaggccgacggcctggcgggcagcagacacaggtatgccgagcaggaaaacggaatcaaccaggggagtgcccagatgctctctgagaatggcgaactgaagtttccagagaaaatgggattgcctgcagcgcccttcctcaccaaaatagaacccagcaagcccgcggcaacgaggaagaggaggtggtcggcgccagagagccgcaaactggagaagtcagaagacgaaccacctttgactcttcctaagccttctctaattcctcaggaggttaagatttgcattgaaggccggtctaatgtaggcaagtagaggcagcgtgggggaaaggaaacgtggctctcccttatcatttgtatccagattactgtactgtaggctaaaataacacagtatttacatgttatcttcttaattttaggtttctgttctaaccttgtcattagagttacagcaggtgtgtcgcaggagactggtgcatatgctttttccacgagtgtctgtcagtgagcgggcgggaggaagggcacagcaggagcggtcagggctccaggcatccccggggaagaaaggaacggggcttcacagtgcctgccttctctagcggcacagaagcagccgggggcgctgactcccgctagtgtcaggagaaaagtcccgtgggaagagtcctgcaggggtgcagggttgcacgcatgtgggggtgcacaggcgctgtggcggcgagtgagggtctctttttctctgcctccctctgcctcactctcttgctatcggcatgggccgggggggttcagagcagtgtcctcctggggttcccacgtgcaaaatcaacatcaggaacccagcttcagggcatcgcggagacgcgtcagatggcagatttggaaagttaaccatttaaaagaacatttttctctccaacatattttacaataaaagcaacttttaattgtatagatatatatttccccctatggggcctgactgcactgatatatattttttttaaagagcaactgccacatgcgggatttcatttctgctttttactagtgcagcgatgtcaccagggtgttgtggtggacagggaagcccctgctgtcatggccccacatggggtaaggggggttgggggtgggggagagggagagagcgaacacccacgctggtttctgtgcagtgttaggaaaaccaatcaggttattgcattgacttcactcccaagaggtagatgcaaactgcccttcagtgagagcaacagaagctcttcacgttgagtttgcgaaatctttttgtctttgaactctagtactgtttatagttcatgactatggacaactcgggtgccacttttttttttttcagattccagtgtgacatgaggaattagattttgaagatgagcatatattactatctttaagcatttaaaaatactgttcacactttattaccaagcatcttggtctctcattcaacaagtactgtatctcactttaaactctttggggaaaaaacaaaaacaaaaaaaactaagttgctttctttttttcaacactgtaactacatttcagctctgcagaattgctgaagagcaagatattgaaagtttcaatgtggtttaaagggatgaatgtgaattatgaactagtatgtgacaataaatgaccaccaagtactacctgacgggaggcacttttcactttgatgtctgagaatcagttcaaggcatatgcagagttggcagagaaactgagagaaaagggatggagaagagaatactcatttttgtccagtgtttttctttttaagatgaacttttaaagaaccttgcgatttgcacatattgagtttataacttgtgtgatattcctgcagtttttatccaataacattgtgggaaaggtttgggggactgaacgagcataaataaatgtagcaaaatttctttctaacctgcctaaactctaggccattttataaggttatgttcctttgaaaattcattttggtctttttaccacatctgtcacaaaaagccaggtcttagcgggctcttagaaactctgagaattttcttcagattcattgagagagttttccataaagacatttatatatgtgagcaagattttttttaaacaattactttattattgttgttattaatgttattttcagaatggctttttttttctattcaaaatcaaatcgagatttaatgtttggtacaaacccagaaagggtatttcatagtttttaaacctttcattcccagagatccgaaatatcatttgtgggttttgaatgcatctttaaagtgctttaaaaaaaagttttataagtagggagaaatttttaaatattcttacttggatggctgcaactaaactgaacaaatacctgacttttcttttaccccattgaaaatagtactttcttcgtttcacaaattaaaaaaaaaatctggtatcaacccacattttggctgtctagtattcatttacatttagggttcaccaggactaatgatttttataaaccgttttctggggtgtaccaaaaacatttgaataggtttagaatagctagaatagttccttgactttcctcgaatttcattaccctctcagcatgcttgcagagagctgggtgggctcattcttgcagtcatactgcttatttagtgctgtattttttaaacgtttctgttcagagaacttgcttaatcttccatatattctgctcagggcacttgcaattattaggttttgtttttctttttgttttttagcctttgatggtaagaggaatacgggctgccacatagactttgttctcattaatatcactatttacaactcatgtggactcagaaaaacacacaccaccttttggcttacttcgagtattgaattgactggatccactaaaccaacactaagatgggaaaacacacatggtttggagcaataggaacatcatcataatttttgtggttctatttcaggtataggaattataaaataattggttctttctaaacacttgtcccatttcattctcttgcttttttagcatgtgcaatactttctgtgccaatagagtctgaccagtgtgctatatagttaaagctcattcccttttggctttttccttgtttggttgatcttccccattctggccagagcagggctggagggaaggagccaggagggagagagcctcccacctttcccctgctgcggatgctgagtgctggggcggggagccttcaggagccccgtgcgtctgccgccacgttgcagaaagagccagccaaggagacccgggggaggaaccgcagtgtcccctgtcaccacacggaatagtgaatgtggagtgtggagaggaaggaggcagattcatttctaagacgcactctggagccatgtagcctggagtcaacccattttccacggtcttttctgcaagtgggcaggcccctcctcggggtctgtgtccttgagacttggagccctgcctctgagcctggacgggaagtgtggcctgttgtgtgtgtgcgttctgagcgtgttggccagtggctgtggaggggaccacctgccacccacggtcaccactcccttgtggcagctttctcttcaaataggaagaacgcacagagggcaggagcctcctgtttgcagacgttggcgggccccgaggctcccagagcagcctctgtcaccgcttctgtgtagcaaacattaacgatgacaggggtagaaattcttcggtgccgttcagcttacaaggatcagccatgtgcctctgtactatgtccactttgcaatatttaccgacagccgtcttttgttctttctttcctgttttccatttttaaactagtaacagcaggccttttgcgtttacaatggaacacaatcaccaagaaattagtcagggcgaaaagaaaaaaataatactattaataagaaaccaacaaacaagaacctctctttctagggatttctaaatatataaaatgactgttccttagaatgtttaacttaagaattatttcagtttgtctgggccacactggggcagaggggggagggagggatacagagatggatgccacttacctcagatcttttaaagtggaaatccaaattgaattttcatttggactttcaggataattttctatgttggtcaacttttcgttttccctaactcacccagtttagtttgggatgatttgatttctgttgttgttgatcccatttctaacttggaattgtgagcctctatgttttctgttaggtgagtgtgttgggttttttccccccaccaggaagtggcagcatccctccttctcccctaaagggactctgcggaacctttcacacctctttctcagggacggggcaggtgtgtgtgtggtacactgacgtgtccagaagcagcactttgactgctctggagtagggttgtacaatttcaaggaatgtttggatttcctgcatcttgtggattactccttagataccgcatagattgcaatataatgctgcatgttcaagatgaacagtagctcctagtaatcataaaatccactctttgcacagtttgatctttactgaaatatgttgccaaaatttatttttgttgttgtagctctggattttgttttgttttgttttttaaggaaacgattgacaataccctttaacatctgtgactactaaggaaacctatttctttcatagagagaaaaatctccaatgcttttgaagacactaataccgtgctatttcagatatgggtgaggaagcagagctctcggtaccgaaggccgggcttcttgagctgtgttggttgtcatggctactgtttcatgaaccacaagcagctcaacagactggtctgttgccttctgaaaccctttgcacttcaatttgcaccaggtgaaaacagggccagcagactccatggcccaattcggtttcttcggtggtgatgtgaaaggagagaattacactttttttttttttaagtggcgtggaggcctttgcttccacatttgtttttaacccagaatttctgaaatagagaatttaagaacacatcaagtaataaatatacagagaatatacttttttataaagcacatgcatctgctattgtgttgggttggtttcctctcttttccacggacagtgttgtgtttctggcatagggaaactccaaacaacttgcacacctctactccggagctgagatttcttttacatagatgacctcgcttcaaatacgttaccttactgatgataggatcttttcttgtagcactataccttgtgggaatttttttttaaatgtacacctgatttgagaagctgaagaaaacaaaattttgaagcactcactttgaggagtacaggtaatgttttaaaaaattgcacaaaagaaaaatgaatgtcgaaatgattcattcagtgtttgaaagatatggctctgttgaaacaatgagtttcatactttgtttgtaaaaaaaaaaagcagagaagggttgaaagttacatgtttttttgtatatagaaatttgtcatgtctaaatgatcagatttgtatggttatggcctggaagaattactacgtaaaaggctcttaaactatacctatgcttattgttatttttgttacatatagccctcgtctgagggaggggaactcggtattctgcgatttgagaatactgttcattcctatgctgaaagtacttctctgagctcccttcttagtctaaactcttaagccattgcaacttctttttcttcagagatgatgtttgacattttcagcacttcctgttcctataaacccaaagaatataatcttgaacacgaagtgtttgtaacaagggatccaggctaccaatcaaacaggactcattatggggacaaaaaaaaaaaaaattatttcaccttctttccccccacacctcatttaaatggggggagtaaaaacatgatttcaatgtaaatgcctcattttattttagttttattttgatttttatttaatataaagaggccagaataaatacggagcatcttctcagaatagtattcctgtccaaaaatcaagccggacagtggaaactggacagctgtggggatattaagcacccccacttacaattcttaaattcagaatctcgtcccctcccttctcgttgaaggcaactgttctggtagctaactttctcctgtgtaatggcgggagggaacaccggcttcagtttttcatgtccccatgacttgcatacaaatggttcaactgtattaaaattaagtgcatttggccaataggtagtatctatacaataacaacaatctctaagaatttccataacttttcttatctgaaaggactcaagtcttccactgcagatacattggaggcttcacccacgttttctttccctttagtttgtttgctgtctggatggccaatgagcctgtctccttttctgtggccaatctgaaggccttcgttggaagtgttgttcacagtaatccttaccaagataacatactgtcctccagaataccaagtattaggtgacactagctcaagctgttgtcttcagagcagttaccaagaagctcggtgcacaggttttctctggttcttacaggaaccacctactctttcagttttctggcccaggagtggggtaaatcctttagttagtgcatttgaacttggtacctgtgcattcagttctgtgaatactgccctttttggcggggtttcctcatctccccagcctgaactgctcaactctaaacccaaattagtgtcagccgaaaggaggtttcaagatagtcctgtcagtatttgtggtgaccttcagattagacagtcttcatttccagccagtggagtcctggctccagagccatctctgagactccgtactactggatgttttaatatcagatcattacccaccatatgcctcccacaggccaagggaaaacagacaccagaacttgggttgagggcactaccagactgacatggccagtacagaggagaactagggaaggaatgatgttttgcaccttattgaaaagaaaattttaagtgcatacataatagttaagagcttttattgtgacaggagaacttttttccatatgcgtgcatactctctgtaattccagtgtaaaatattgtacttgcactagcttttttaaacaaatattaaaaaatggaagaattcatattctattttctaatcgtggtgtgtctatttgtaggatacactcgagtctgtttattgaattttatggtccctttctttgatggtgcttgcaggttttctaggtagaaattatttcattattataataaaacaatgtttgattcaaaatttgaacaaaattgttttaaataaattgtctgtataccagtacaagtttattgtttcagtatactcgtactaataaaataacagtgccaattgcaaaaaaaaaaaaaaaaaaaaaaaaaaaaaaaaaaaaaaaaaaaaaaaaaaaaaaaaa

SEQ ID NO: 313 - DNA, 1008 bp, Homo sapiens
cccgaattttccggctcgaatgcccggcagccgtggcggctagagcgttcctccccagctcgaatgcccggcggcgaggcggctagagcgtcgcctcctcccggggaaccgcgtgtgaccttccagcccgcggaccgatgctgccggcggccgctcgccccctgtgggggccttgccttgggcttcgggccgctgcgttccgccttgccaggcgacaggtgccatgtgtctgtaccgtgcgacatatgaggagcagcggccatcagaggtgtgaggccctcgctggtgcacccctggataacgcccccaaggagtacccccccaagatacagcagctggtccaggacatcgccagcctcactctcttggaaatctcagacctcaacgagctcctgaagaaaacgttgaagatccaggatgtcgggcttgtgccgatgggtggtgtgatgtctggggctgtccctgctgcagcagcccaggaggcggtggaagaagatatccccatagcgaaagaacggacacatttcaccgtccgcctgaccgaggcgaagcccgtggacaaagtgaagctgatcaaggaaatcaagaactacatccaaggcatcaacctcgtccaggcaaagaagctggtggagtccctgccccaggaaatcaaagccaatgtcgccaaagctgaggcggagaagatcaaggcggccctggaggcggtgggcggcaccgtggttctggagtagcctccagctcggaggacttgtgttcaggggtcctgggccccggcgaggtcccgccctcccgtggtcactggctccgcccccagcaccaggcgcccagtggagccgtttgggagaattgcctgcgccacgcagcgggccggacaggccgcacagacctactgtggcgggagggaggggcggctgctgcctggtgacggcacccggaagcccaccaggacgcgccaccggtcaatgtgcctctggtggctgctgagaaaaatacactgtgcagctc

SEQ ID NO: 314 - DNA, 3701 bp, Homo sapiens
cggaaatcatcctagtaataaagtgaaatcagacccacaacgaatgaatgaacagccacgtcagcttttccaaagctcatgaacactggaaaacaacatacgtttgttgaaacagagagtgtaagatatgtctaccagcctatggagaaactgtatatggtactgatcactaccaaaaacagcaacattttagaagatttggagaccctaaggctcttctcaagagtgatccctgaatattgccgagccttagaagagaatgaaatatctgagcactgttttgatttgatttttgcttttgatgaaattgtcgcactgggataccgggagaatgttaacttggcacagatcagaaccttcacagaaatggattctcatgaggagaaggtgttcagagccgtcagagagactcaagaacgtgaagctaaggctgagatgcgtcgtaaagcaaaggaattacaacaggcccgaagagatgcagagagacagggcaaaaaagcaccaggatttggcggatttggcagctctgcagtatctggaggcagcacagctgccatgatcacagagaccatcattgaaactgataaaccaaaagtggcacctgcaccagccaggccttcaggccccagcaaggctttaaaacttggagccaaaggaaaggaagtagataactttgtggacaaattaaaatctgaaggtgaaaccatcatgtcctctagtatgggcaagcgtacttctgaagcaaccaaaatgcatgctccacccattaatatggaaagtgtacatatgaagattgaagaaaagataacattaacctgtggacgagacggaggattacagaatatggagttgcatggcatgatcatgcttaggatctcagatgacaactatggccgaattcgtcttcatgtggaaaatgaagataagaaaggggtgcagctacagacccatccaaatgtggataaaaaacttttcactgcagagtctctaattggcctgaagaatccagagaagtcatttccagtcaacagtgacgtaggggtgctaaagtggagactacaaaccacagaggaatcttttattccactgacaattaattgctggccctcggagagtggaaatggctgtgatgtcaacatagaatatgagctacaagaagataatttagaactgaatgatgtggttatcaccatcccactcccgtctggtgtcggcgcgcctgttatcggtgagatcgatggggagtatcgacatgacagtcgacgaaataccctggagtggtgcctgcctgtgattgatgccaaaaataagagtggcagcctggagtttagcattgctgggcagcccaatgacttcttccctgttcaagtttcctttgtctccaagaaaaattactgtaacatacaggttaccaaagtgacccaggtagatggaaacagccccgtcaggttttccacagagaccactttcctagtggataagtatgaaattctgtaataccaagaagagggagctgaaaaggaaaattttcagattaataaagaagacgccaatgatggctgaagagtttttcccagatttacaagccactggagaccccttttttctgatacaatgcacgattctctgcgcgcaaggaccctcgactcacccccatgtttcagtgtcacagagacattctttgataaggaaatggcacaaacataaagggaaaggctgctaattttctttggcagattgtattggccagcaggaaagcaagctctccagagaatgcccccagttaaatacctcctctacctttacctaagttgctcctttatttttattttattattattattattattattattttttgagatggagtctcactttgtaacccaggctggaatgcaatggcatgatctcagctcactgcaacctccgcctcctgggttcaagcaagtctcctgcctcagcctccgagtagctgggactacaggtgcacgccaccacgcctggctaattttttgtattttagtagagacggggtttcaccgtgttgcccaggctggtcgcgaactcctgagctcaggcaatccgcccacctcagcctcccaaagtgttgggattacaggcatgagccaccatgcccagctgctcctttattttaatccctaaatataatccctaaatatagttatatttcatacttagtttgtttttaaaaagttttctctgtagaaaattttaatcattcataccctttacctttaggtttttctttctatacattcagtcaggcactgggatcatctgtttacaggcattatatttatttggcactcctggaacaagtatatctaacccattcttgatttttggactattcaggtgaactatttgaggggtatggggtctagaagttaaaagatacgcatgtcttctrttcttttcccgtatcaattcattccttcatctctttgccaagttgttttcctttcagggcctgtccttccagtttagaacagtaccatgaatcccacttgtgtcaatattaaagatagctgagaagcacctttcaaatggcacagtccctcttcaagatgtctaaaagaatggttatgtctgtccagttagggatttcacatccacatgtaatcatgtctgctgctgttgctacccaaattttcatttctccacattttgggtacttaagctaaaacgtaatggccacagtctgtaatccattcacattcctcagtttcaccacctccctcttccagactgcactctctgtcatcagtcccctcctttctaacagaaatggggttatgattttgaaggctgtgggttcagggagtctttgccaatcctgttggccctaaactatcaaggaggctccatttcaccatttgattttttgcatttcaggaggcaactgattgtttcgatatgtacatattactcacgtataccccatttccttccagtcagcccaacattttccaccagtctgtccccatctctgaaatccttccttctctttccccctaagtcttttgagtgtcatcatgtactggtggtttctcggttccatctcatccatttccttttcaatggagactacagcgtcagccagctcagccttggcttttaactcaatattccagtccataggggtggttaaaagttgctgcaaggctgcaggcactggcagtgggaagaggcagacgactagatgacttctgcacttttagctggttgaaaagtaccactcccactctgaacatctggccgtccctgcaaagagtgtactgtgcttgaagcagagcactcacacataaatggctgtgtgtggaattgcttgccaaagaagtttctagcctttccctttcccctaactgcatcagggaagaattcttatctctagcttggtttccacatgaggtttttctgagaagggcttgggacaagaagtctgtcatgttagttaagcaggcaagaaatcctactaatccagttttgtttgaaagttgtttgtccgtatgattttttaaaagtcaagtttaatttcaaaaaaccttttttttctgagattacttttggggtaatatttaaaatgagagacattttgtaaccctgtaaaatacatagggaatataacattccagtgtatacaaagaaggcaaattccaaaaaaaaaaaaaaaaaaaaaa

SEQ ID NO: 315 - DNA, 1530 bp, Homo sapiens
aattaaatggacaacaccgttagatgtgtatgtaaaaattttctgtttcatatttttcctttcactttcggtttagaacatgctatatgtactgtatgtcctgtggcccagtgcggctccacagcatggaatctgatgtatgatatgatagaatgtggcactaaatgcagtttcagattttatttttttaatcatatgaactaaaattgtcaattgtgagttgtgctttctcatcatgttggttatattgcacaattggttatatttatgacctgatattcaaagactctggcattgatagccagtgtgttttcttatttaactccgtttactacattctacatggtgtttacgtgatccacacttgaaatactagatcagtagacattcactaatataccaaaataaaatgaaaaattgagtttttccgtgaactttatactgtccagctctgttgattttaaagcttcttcatccaggtcagttcaggaagtatatctggagtacctggctctgtttttggctgtgagactagcactaaggattctggtacctttacccaaacctactgggctactaatacttctctcagcagttgaatcaaatacaatagaccatgtaagctggggccgctcatccacttccagtttgctggtctccctgctagaagacacattgtactgtgctttttctggaattcacgataatggcatcactgcctgtttttcacatcttttgtttcctgttcattttaaggaaacctactaaatccagttaatattaaatggacaccactcattaagaaatttctttatggcttctgcctgaatacttaaaatgccttactacagttatccagttgacatgtttttaattcatataaggtatattgggtatattgaagtatatattgtattacaaagacttgttcttgtattttaaaatgtcagtgcaaaaaatatatggtggaacctttctttaaagttgaaatgcagtattatttaaatctgaaaggttaaaaagctttcttcaccttatatatgttcttccactgtgactttttagttgaagactagtaaattaacttttagttagaagatgcctactgcttttgttgtttattttaatcagcagagcacagagacacataaaaactctgggaaatgactaggataaaaatatcagtatgtatctgttttagatattttgagttttgctttttttatgccttgaatattttatttcaaaaagtatctgaagcaaattctcagactgaactacttcttagacctcactgtaagaatattttattcaatgtctcatttatgatagatttgcaagctgctcatttttgaacagctttttgcatgggataggagcatgtctattctaacacatcagcttattcaaaagcaagaattttaaaaataagataaatgtaaagttgttttataaacgatcctgttaattaaaccacagacaccatatatccttctgcatcctttggccaataaaagttgctggagaacc

SEQ ID NO: 316 - DNA, 3461 bp, Homo sapiens
ggagcgcccggctgcgctggagccgcccggagctaggggctccccggggcgcaggagagacgtttcagagcccttgcctccttcaccatgccggttgccgccaccaactctgaaactgccatgcagcaagtcctggacaacttgggatccctccccagtgccacgggggctgcagagctggacctgatcttccttcgaggcattatggaaagtcccatagtaagatccctggccaaggtgataatggtattgtggtttatgcagcagaatgtctttgttcctatgaaatacatgctgaaatactttggggcccatgagaggctggaggagacgaagctggaggccgtgagagacaacaacctggagctggtgcaggagatcctgcgggacctggcgcagctggctgagcagagcagcacagccgccgagctggcccacatcctccaggagccccacttccagtccctcctggagacgcacgactctgtggcctcaaagacctatgagacaccaccccccagccctggcctggaccctacgttcagcaaccagcctgtacctcccgatgctgtgcgcatggtgggcatccgcaagacagccggagaacatctgggtgtaacgttccgcgtggagggcggcgagctggtgatcgcgcgcattctgcatgggggcatggtggctcagcaaggcctgctgcatgtgggtgacatcatcaaggaggtgaacgggcagccagtgggcagtgacccccgcgcactgcaggagctcctgcgcaatgccagtggcagtgtcatcctcaagatcctgcccaactaccaggagccccatctgccccgccaggtatttgtgaaatgtcactttgactatgacccggcccgagacagcctcatcccctgcaaggaagcaggcctgcgcttcaacgccggggacttgctccagatcgtaaaccaggatgatgccaactggtggcaggcatgccatgtcgaagggggcagtgctgggctcattcccagccagctgctggaggagaagcggaaagcatttgtcaagagggacctggagctgacaccaaactcagggaccctatgcggcagcctttcaggaaagaaaaagaagcgaatgatgtatttgaccaccaagaatgcagagtttgaccgtcatgagctgctcatttatgaggaggtggcccgcatgcccccgttccgccggaaaaccctggtactgattggggctcagggcgtgggacggcgcagcctgaagaacaagctcatcatgtgggatccagatcgctatggcaccacggtgccctacacctcccggcggccgaaagactcagagcgggaaggtcagggttacagctttgtgtcccgtggggagatggaggctgacgtccgtgctgggcgctacctggagcatggcgaatacgagggcaacctgtatggcacacgtattgactccatccggggcgtggtcgctgctgggaaggtgtgcgtgctggatgtcaacccccaggcggtgaaggtgctacgaacggccgagtttgtcccttacgtggtgttcatcgaggccccagacttcgagaccctgcgggccatgaacagggctgcgctggagagtggaatatccaccaagcagctcacggaggcggacctgagacggacagtggaggagagcagccgcatccagcggggctacgggcactactttgacctctgcctggtcaatagcaacctggagaggaccttccgcgagctccagacagccatggagaagctacggacagagccccagtgggtgcctgtcagctgggtgtactgagcctgttcacctggtccttggctcactctgtgttgaaacccagaacctgaatccatccccctcctgacctgtgaccccctgccacaatccttagcccccatatctggctgtccttgggtaacagctcccagcaggccctaagtctggcttcagcacagaggcgtgcactgccagggaggtgggcattcatggggtaccttgtgcccaggtgctgcccactcctgatgcccattggtcaccagatatctctgagggccaagctatgcccaggaatgtgtcagagtcacctccataatggtcagtacagagaagagaaaagctgctttgggaccacatggtcagtaggcacactgccccctgccacccctccccagtcaccagttctcctctggactggccacacccaccccattcctggactcctcccacctctcacctctgtgtcggaggaacaggccttgggctgtttccgtgtgaccaggggaatgtgtggcccgctggcagccaggcaggcccgggtggtggtgccagcctggtgccatcttgaaggctggaggagtcagagtgagagccagtggccacagctgcagagcactgcagctcccagctcctttggaaagggacagggtcgcagggcagatgctgctcggtccttccctcatccacagcttctcactgccgaagtttctccagatttctccaatgtgtcctgacaggtcagccctgctccccacagggccaggctggcaggggccagtgggttcagcccaggtaggggcaggatggagggctgagccctgtgacaacctgctgttaccaactgaagagccccaagctctccatggcccacagcaggcacaggtctgagctctatgtccttgaccttggtccatttggttttctgtctagccaggtccaggtagcccacttgcatcagggctgctgggttggaggggctaaggaggagtgcagaggggaccttgggagcctgggcttgaaggacagttgccctccaggaggttcctcacacacaactccagaggcgccatttacactgtagtctgtacaacctgtggttccacgtgcatgttcggcacctgtctgtgcctctggcaccaggttgtgtgtgtgtgcgtgtgcacgtgcgtgtgtgtgtgtgtgtgtcaggtttagtttggggaggaaccaaagggttttgttttggaggtcactctttggggcccctttctgggggttccccatcagccctcatttcttataataccctgatcccagactccaaagccctggtcctttcctgatgtctcctcccttgtcttattgtccccctaccctaaatgcccccctgccataacttggggagggcagttttgtaaaataggagactccctttaagaaagaatgctgtcctagatgtacttgggcatctcatccttcattattctctgcattccttccggggggagcctgtcctcagaggggacaacctgtgacaccctgagtccaaacccttgtgcctcccagttcttccaagtgtctaactagtcttcgctgcagcgtcagccaaagctggcccctgaaccactgtgtgcccatttcctagggaaggggaaggagaataaacagaatatttattacaaaaa

SEQ ID NO: 317 - DNA, 925 bp, Homo sapiens
gaattccaagatcctggcctgtgcagctcgggtttccgagcttctgcctcaggcatctccgcgatctcctctcccctccaatcctatccgtgatggacgatgcccacgagtcgccctccgacaaaggtggagagacaggggagtcggatgagacggccgctgtgcccggggacccgggggctaccgacaccgatggaatcccagaggaaactgacggagacgcagatgtggacttgaaagaagctgcagcggaggaaggcgagctcgagagtcaggatgtctcagatttaacaacagttgaaagggaagactcatcattacttaatcctgcagccaaaaaactgaaaatagataccaaagaaaagaaagagaaaaagcagaaagtagatgaagatgagattcagaagatgcaaatcctggtttcttctttttctgaggagcagctgaaccgttatgaaatgtatcgccgctcagctttccctaaggcagccatcaaaaggctgatccagtccatcactggcacctctgtgtctcagaatgttgttattgctatgtctggtatttccaaggttttcgtcggggaggtggtagaagaagcactggatgtgtgtgagaagtggggagaaatgccaccactacaacccaaacatatgagggaagccgttagaaggttaaagtcaaaaggacagatccctaactcgaagcacaaaaaaatcatcttcttctagaccaaagtctagaaaggcctatgttactgacggaagaagtattggttccagacttcctataagactgtctgcattggtgctttagtatctcaggcctccaaggattccatgatgattttaatgtctttctcaaaactctgatatttgtcacacctagaaagtatgtagcctgattgatacttggcttgactaaattt

SEQ ID NO: 318 - DNA, 1172 bp, Homo sapiens
ctttccgggagactggagtcgaaggccgtgagtattttctaagccagtgtttagagagtatgtgaggcaagagtacctatagaacccggaggagggtgaggagcagagctggccataatggcaggtgaagaaattaatgaagactatccagtagaaattcacgagtatttgtcagcgtttgagaattccattggtgctgtggatgagatgctgaagaccatgatgtctgtttctagaaatgagttgttgcagaagttggatccacttgaacaagcaaaagtggatttggtttctgcatacacattaaattcaatgttttgggtttatttggcaacccaaggagttaatcctaaggaacatccagtaaaacaggaattggaaagaatcagagtatatatgaacagagtcaaggaaataacagacaagaaaaaggctggcaagctggacagaggtgcagcttcaagatttgtaaaaaatgccctctgggaaccaaaatcgaaaaatgcatcaaaagttgccaataaaggaaaaagtaaaagttaactttttggttttgatgtacacatattcaaaaagtacattaatatgtaatcacagtaatatgtaaagctaaatacttcctctccaaagatcattatctttattgattagcactgaggattttaacattgtgatatattatatatttataatttaccatctcttgatgagactcttatttctttatataggtcagtcttgcaagtaccattttataagcagctgtgaaatttaagtgaaatgttctttgtaaacatttgtactattttaaatgaataatgaccttatgaagtatgctatctgtaggctgaaattataggtacatctgttttcactatatgatattaagaaagcgtgaaatgacttaaatgttcatttttttctgtatagatactttatcatgttttcatgattttaggaattactgctttgttgatattcaaagtgtgaaactaaaagtttatggttgtactttaattcttggcatgttgcctctatgtcccatttaaaataaaatacattctcattaactttagatgggaaataaggttgtatgttgatggatgaattttggcatgatgactgtactctcaataaaggctgaaaatgttgtaaaaaaaaaaaaaaaaaaa

SEQ ID NO: 319 - DNA, 4237 bp, Homo sapiens
cagctcggtcgcccccaccggccccatggcagcccccggcgccccagctgagtacggctacatccggaccgtcctgggccagcagatcctgggacaactggacagctccagcctggcgctgccctccgaggccaagctgaagctggcggggagcagcggccgcggcggccagacagtcaagagcctgcggatccaggagcaggtgcagcagaccctcgcccggaagggccgcagctccgtgggcaacggaaatcttcaccgaaccagcagtgttcctgagtatgtctacaacctacacttggttgaaaatgattttgttggaggccgttcccctgttcctaaaacctatgacatgctaaaggctggcacaactgccacttatgaaggtcgctggggaagaggaacagcacagtacagctcccagaagtccgtggaagaaaggtccttgaggcatcctctgaggagactggagatttctcctgacagcagcccggagagggctcactacacgcacagcgattaccagtacagccagagaagccaggctgggcacaccctgcaccaccaagaaagcaggcgggccgccctcctagtgccaccgagatatgctcgttccgagatcgtgggggtcagccgtgctggcaccacaagcaggcagcgccactttgacacataccacagacagtaccagcatggctctgttagcgacaccgtttttgacagcatccctgccaacccggccctgctcacgtaccccaggccagggaccagccgcagcatgggcaacctcttggagaaggagaactacctgacggcagggctcactgtcgggcaggtcaggccgctggtgcccctgcagcccgtcactcagaacagggcttccaggtcctcctggcatcagagctccttccacagcacccgcacgctgagggaagctgggcccagtgtcgccgtggattccagcgggaggagagcgcacttgactgtcggccaggcggccgcagggggaagtgggaatctgctcactgagagaagcactttcactgactcccagctggggaatgcagacatggagatgactctggagcgagcagtgagtatgctcgaggcagaccacatgccgccatccaggatttctgctgcagctactttcatacagcacgagtgcttccagaaatctgaagctcggaagagggttaaccagcttcgtggcatcctcaagcttctgcagctcctaaaagttcagaatgaagacgttcagcgagctgtgtgtggggccttgagaaacttagtatttgaagacaatgacaacaaattggaggtggctgaactaaatggggtacctcggctgctccaggtgctgaagcaaaccagagacttggagactaaaaaacaaataacagaccatacagtcaatttaagaagtaggaatggctggccgggcgcggtggctcacgcctgtaatcccagcactttgggaggccaaggcgggcggatcacgaggtcaggagttcgagaccagcctgaccaacatggtttgctgtggaatttgtcatctaatgacaaactcaagaatctcatgataacagaagcattgcttacgctgacggagaatatcatcatccccttttctgggtggcctgaaggagactacccaaaagcaaatggtttgctcgattttgacatattctacaacgtcactggatgcctaagaaacatgagttctgctggcgctgatgggagaaaagcgatgagaagatgtgacggactcattgactcactggtccattatgtcagaggaaccattgcagattaccagccagatgacaaggccacggagaattgtgtgtgcattcttcataacctctcctaccagctggaggcagagctcccagagaaatattcccagaatatctatattcaaaaccggaatatccagactgacaacaacaaaagtattggatgttttggcagtcgaagcaggaaagtaaaagagcaataccaggacgtgccgatgccggaggaaaagagcaaccccaagggcgtggagtggctgtggcattccattgttataaggatgtatctgtccttgatcgccaaaagtgtccgcaactacacacaagaagcatccttaggagctctgcagaacctcacggccggaagtggaccaatgccgacatcagtggctcagacagttgtccagaaggaaagtggcctgcagcacacccgaaagatgctgcatgttggtgacccaagtgtgaaaaagacagccatctcgctgctgaggaatctgtcccggaatctttctctgcagaatgaaattgccaaagaaactctccctgatttggtttccatcattcctgacacagtcccgagtactgaccttctcattgaaactacagcctctgcctgttacacattgaacaacataatccaaaacagttaccagaatgcacgcgaccttctaaacaccgggggcatccagaaaattatggccattagtgcaggcgatgcctatgcctccaacaaagcaagtaaagctgcttccgtccttctgtattctctgtgggcacacacggaactgcatcatgcctacaagaaggctcagtttaagaagacagattttgtcaacagccggactgccaaagcctaccactcccttaaagactgaggaaaatgacaaagtattctcggctgcaaaaatccccaaaggaaaacacctatttttctactacccagcccaagaaacctcaaaagcatgccttgtttctatctttctctatttccgtggtcccctgaatccagaaaacaaatagaacataattttatgagtcttccagaagacctttgcaagtttgccaccagtagataccggccacaggctcgacaaatagtggtctttgttattagggcttatggtagatggcttcctggaatcaaaatgtgaattcatgtggaagggacattaatccaataaataaggaaagaagctgttgcattactgggattttaaaagtttgatttacatttatattccttttctggttcccatgttttgtcactcatgtgcacattgcttcgccattgggcctccagtgtattgttctgcagtgttgaaacagaatggaaatgacaagaaatatctgcagttatccaggagaaagtataatggcaaaattattggtttctttctttactttgtgcttgtttttatccccttggttgtttttctctgatttttaaataaacttaagaaatttagattacagagtatgcatgactgtaagaaaaagaaattgagaggaagtgatcatagcaaattaaagaagtcttttcctcccagaacttaaagtaaaataaaaaataaataaataaataaaatcttttccacagagaaaggcaactgtgatgataaaatttaagctcccccaacactgagtcaatgagatttttctcaggagatactttacctataacaacgccgttaaatccaaatctcttctaaacgatggcattctatgtaatgcctttcctggacttttttggccactgcctggactagtgaaagaatggactctatctttatctgcaagaggaactaaggccttctatcagactgcctggccagcctggggcactgaaaatacggctcatgttaatgagttacattatcagccagcccagccttgcccaccatttaagaaatatcacagagccactagatctcatatgatcttcttcaagccattattttaactcaagaaaactctagagaagaaaagtgaagaagtcatgttgaagaagatgtaagaatgtgtcaagaccatccagaaatgatatgagaaatactgatattttaaatggttgacatcatccagcgaaatgaatctacattaaatgttgttttaactgcgctatgattaaaaccattcatatagagttagtctttacaactactattctgttatttttttttttaatctgacaacatttgtcctaagtaagataagcaaaaaaattcttcaactccttttggcaagaaaactgtaacagaaaataaattttgaatgtgtacttaagtctttattatatttgaagcaattttttttcaattttaaaagctgaatgaagacaacttaggttgctaacctagttcaaaatgaaattatttagataccaatttttaaaatactggagagaatttatatgtctttttccagagttctgatgataagca

SEQ ID NO: 320 - DNA, 6492 bp, Homo sapiens
gaattcaagtcttgttcctgcacattccaccctggagaaatctggggcaagtgactgttccccgggccttagcttctcctgtcactgggacatcacaacagcacctaccttagggcaactcaggccagggaagttggtgctgcctcacctcccaatgtgcgtcctcctgggcctggagcctcagggcctctggaaggaggaagtgagcgcctctgggcaggattcctgggaggcctgggagagcaagggaagcgccaagagctgagcagagttctgggactgatccatggccctttctctctcacctttcaggaggtgggccccctccacccccagcacttcccacctggtcggtcccgaacggcccctccccggaggaggtggagcagcagaaaaggtggggctgggccctgggtggggaaccttagccgctgccagagttccatatgttctggaacccttgactcctagagttcagaacccagccaacttgcagttttcagaatgttcaagaaacttctgacactcagagttgcagaacctcctggtccctgcagattcctggaaatcagaatatggtggttgaaagaatcttgtggctgggcgtggtggctcacgcctgtaatcccagcactctgggaggccgaggcgggcagatcgcctgaggtcaggagtttgagaccagcctggccaacatggcgaaatcccgtctctactgaagataacaaaaattagccggtcatggtggcgcccgtgcctgtaatcccagctcggcaggccgaggcaggagaatcgcttgaacccgggaggcagaggttgcagtgagccaagatcgagccactgcactccagcctgggtgacagagtctcaaaaaaaaaaaaagaaaagaaagaatcttgggcattttgtaattcggtgttcctgacagtttagtgactgggatctcgcatcctgatctctccctgtcgctgccctgccctccattccccctactctcacccagcccccttcttggttccctaggggaggaaggcttgggtgagtattaggagccagccaccctggagacctctgagagagaggacggaggtcgctggccccttcgctggccatccttaggaccctgattgacggcagctctctcgcctccccccacaggcagcagcccggcccgtcggagcacatagagcgccgggtctccaatgcaggtgatgctcagatagcttcgggagttgggagggggcctccctggaggaagtggccagccagctggacagtgaagaatgaggcttctctctctcagctgcccccttttctgtgtttgtttcaggaggcccacctgctccccccgctgggggtccacccccaccaccaggacctccccctcctccaggtccccccccacccccaggtttgcccccttcggggtcccagctgcagcgcacggagcagggggaggaccaccccctgcaccccctctcccggcagcacagggccctggtggtgggggagctggggccccaggcctggccgcagctattgctggagccaaactcaggaaagtcagcaaggtgaggggccgggagaggtgggcagggggcaacagggcttttatgggggatgaggccagggctgccggcggtgtcattgggctggaaggccaaaaggcctgcccctaaagctcctgccccttttaaatttctccagcaggaggaggcctcaggggggcccacagcccccaaagctgagagtggtcgaagcggaggtgggggactcatggaagagatgaacgccatgctggcccggaggtgagcctgagcctggacccccaagtcacctggagttccagttcagtagggcccagtcagaggagggctccaattcctgtttagtttgtttcttttggtgaatgttccccctttgataaccaggtttgggatataatggtggggtttgtcatgaaatgcctgaggcttgcaaccacctaggtagcctgtagatgttctaaaacccagaattctagaaccgtaggagatctttcctcagaattctgggaactcaggttcctgcaatctcagtgttccaacacagcaccgctccaccctcggaatcttactgttccctaatataagaatcatagaacctcctccaccctgattctagaaccacaatctcttgaattttttttttttttttttttttttttttgagatggagtcttgctctgtcacccaggctggagtgcagtggtatgatctcggtccactgcaacctccgcctcctgggttcaggcagttcttctgcctcagcctcctaagtagccgggattacaggcatgagtcaccacacccggctaatttttgtatttttagtagacacaggatttcaccatgttggccaggctggtcttgaactcttgacctcaagagatccacctgcttcagcctctcaaagtgttggcattacaggccactgcgcccagcacaatctcttgaatttctaaaactagagtttccttaggttttcggagttccagaattctatgcgctaggatctacatttctagaactcccctcagaaggggatgggttgggtgacggaagcacgtgtttttgcttttctctcctgcagaaggaaagccacgcaagttggggagaaaacccccaaggatgaatctgccaatgtaagtcagggactcttcttgccctacatctcttaggccgtaccatgagggtagggatagtgggatgtgtggggtttgaacctgaaagaggaaatgggcagaggtgtggcaggggctggctcatggcagttttatttcctaccagcaggaggagccagaggccagagtcccggcccagagtggtgagtagagtgcccagtccagccacaggaactacaaatcccagaatactctgttctcacatgttaagcacccttataggagagtcagggcgaatggtgctggggattgtagtctcctgagatggggctttgatcaggggctgatgaggttgggggagtaagattgattggggggcagtcttttgtccctgatctttctgatttcttgcctatccccagaatctgtgcggagaccctgggagaagaacagcacaaccttgccaaggtaggccatcggtcctggggcccttggggaggtaaaggcgggcagatcgcttgagcccaggaggtcaagaccagcctgggcaacatggcgacaccccatctctacaaaaattagccaggcgtggtagcacttacctgtggtcccagctactcaggaggctgaggtgggaggattacttgagcccaggaagttgaggcctcagcgagccatcatcatgcctgcactccagcctgagaaatagaatgtgactgtctcaaaacaaaacacaacaaaccaaaaccaaaaaaaaaaaaaactggggccccaaaaatacttggacttgcccaatttataaggcagagctcaatgtgatccctggaataggaggcggggaagcaggtcctctctctaatctcattgctgtcccaaaccacaccaactcccccaggatgaagtcgtcttcttcggtgaccacttccgagacccaaccctgcacgcccagctccagtgattactcggacctacagagggtgaaacaggtaacttgggggggaagttggggaccacagcaagagagatctaggtctggcccctgccactggcatgccgtatgatcctagataacatctcagaaacctcaggtttccaatctgacaaatggagaaactggattgggtcaaggatgaccgagactccacacccccttttctggcacctgtgacagacattattaatctatcaccgcgctcattccagatgagtgccttgaattctttccgcacattgacccagctgtccatcaccaattggagttggcaggaggctggaatgcgcttgccaaccttggtactggatgttctccagtacttttccggctccaaggatccagaattctcccctagaatcctccagtcactctgcgaccttgacagcgatgtcatggtgtcgatgtaggggtaggtctcaaacctactccccctggcttttccatcaacaagaaagaggggactctggcagggcacggtggctcatgtgtgtaatttcagcacattgcgaggctgaggtgggagcattgcttgaggccaggagtttgagaccagcctggggcaacatcgggagacccccatctctaaaaataacttttaaaagttacctgagaaggccaggtgcggtggctcatgcctgtaatcccagcactttgggaggccgaggtgggtggatcacctgaggtcaggggttcaagaccagcctggccaacatggtgaaacccatcgctactaaaaatacaaaaattaggctgggaatggtggctcacagccataatcccagcagtttggaaggctgatggggacggatcacgtgaagtcaaaagttcgagaccagcctggccaacatggcgaaaccctgtctctactaaaaatacaaaaattagctgggccttgtggggggcacctgtaatccagttatttgggcggctgaggcaggagaatcgcttgaacccgggagccagagattgcagtcagccgagattgggccactgcactgcagtctgggtgacagggagactctgtttcaaaaaaaaaaagaaaaagaaaaagttacctgattgtggcggcaggtgactgtggtcccagctacttgggaggctaaggcaggaggattacctgagcctgggaagttgaggctgcaatgagctgtgatcatgccattgcaccctagcctaggcaacagagcaaggttccttctcaaaaaataaaagaagggggattcattcctgcaagtcccggtacccctcctgattagttttaccccattaattttaggagcttctggaagaggtgaagaaggaattgcagaaagtgaaagaggaaatcattgaaggtgaggtggtttgctttggttttgttcttaaacatttacttattttggaggcatcatgtccctgggcaagagccctgttttggaagggaggaggcagagactctgcccctgacctctgctccttgtttccttccagccttcgtccaggagctgaggaagcggggttctccctgaccacagggacccagaagacccgcttctcctttccgcacacccggcctgtcaccctgctttccctgcctctacttgacttggaattggctgaagactacacaggaatgcatcgttcccactccccatcccacttggaaaactccaagggggtgtggcttccctgctcacacccacactggctgctgattggctggggaggcccccgcccttttctccctttggtccttcccctctgccatccccttggggccggtccctctgctggggatgcaccaatgaaccccacaggaagggggaaggaaggagggaatttcacattcccttgttctagattcactttaacgcttaatgccttcaaagttttggtttttttaagaaaaaaaaatatatatatatttgggttttgggggaaaagggaaatttttttttctctttggttttgataaaatgggatgtgggagtttttaaatgctatagccctgggcttgccccatttggggcagctatttaaggggaggggatgtctcaccgggctgggggtgagacatccccccaccccagggactccccttccctctggctccttccccttttctatgaggaaataagatgctgtaactttttggaacctcagttttttgattttttatttgggtaggttttggggtccaggccattttttttaccccttggaggaaataagatgagggagaaaggaaaaggggaggaaacttctcccctcccaccttcacctttagcttcttgaaaatgggcccctgcagaataaatctgccagtttttataaatgctaagatctctggagtgatttgaaggcctgttctgatggggatggaggtgtgctcggcccccggtgcccctccaggaagatttggtcctctgctgagaacccctgcctcctcccaggaatccaccttcccttcatcttccttcccaccctgcatattgcgcctgctcactcatcctcaggcccgcagccaggatgatctctgccccctccagcctccctccccatgccccttaggaggccacttcctccccatcccaccctgcccttcaccaccctaggggaggccagaagcagcctcactttgtgtagccttgggcaagtccatttgcttacctcaggcctcagtttctgatttgggaaagggctcataagatgattctctgcccccactctaccactctcccagcttctttcctcttttttttttttttttttttttaatgagttggggtcttgctctttcacccagtctggagtgtagtggcaggatcacagctcactgcagccttgaactcctggg

SEQ ID NO: 321 - DNA, 1040 bp, Homo sapiens
cgacgagccatggttgctgggagcgacgcggggcgggccctgggggtcctcagcgtggtctgcctgctgcactgctttggtttcatcagctgtttttcccaacaaatatatggtgttgtgtatgggaatgtaactttccatgtaccaagcaatgtgcctttaaaagaggtcctatggaaaaaacaaaaggataaagttgcagaactggaaaattctgaattcagagctttctcatcttttaaaaatagggtttatttagacactgtgtcaggtagcctcactatctacaacttaacatcatcagatgaagatgagtatgaaatggaatcgccaaatattactgataccatgaagttctttctttatgtgcttgagtctcttccatctcccacactaacttgtgcattgactaatggaagcattgaagtccaatgcatgataccagagcattacaacagccatcgaggacttataatgtactcatgggattgtcctatggagcaatgtaaacgtaactcaaccagtatatattttaagatggaaaatgatcttccacaaaaaatacagtgtactcttagcaatccattatttaatacaacatcatcaatcattttgacaacctgtatcccaagcagcggtcattcaagacacagatatgcacttatacccataccattagcagtaattacaacatgtattgtgctgtatatgaatggtattctgaaatgtgacagaaaaccagacagaaccaactccaattgattggtaacagaagatgaagacaacagcataactaaattattttaaaaactaaaaagccatctgatttctcatttgagtattacaatttttgaacaactgttggaaatgtaacttgaagcagctgctttaagaagaaatacccactaacaaagaacaagcattagttttggctgtcatcaacttattatatgactaggtgcttgctttttttgtcagtaaattgtttttactgatgatgtagatacttttgtaaataaatgtaaatatgtacacaagtg

SEQ ID NO: 322 - DNA, 863 bp, Homo sapiens
tagatatttttcaaaaatacagtgatgtcattgcaggacaattttatggacacactcacagagacagcattatggttctttcagataaaaaaggaagtccagtaaattctttgtttgtggctcctgctgttacaccagtgaagagtgttttagaaaaacagaccaacaatcctggtatcagactgtttcagtatgatcctcgtgattataaattattggatatgttgcagtattacttgaatctgacagaggcgaatctaaagggagagtccatctggaagctggagtatatcctgacccagacctacgacattgaagatttgcagccggaaagtttatatggattagctaaacaatttacaatcctagacagtaagcagtttataaaatactacaattacttctttgtgagttatgacagcagtgtaacatgtgataagacatgtaaggcctttcagatttgtgcaattatgaatcttgataatatttcctatgcagattgcctcaaacagctttatataaagcacaaatactagtatttcacagtttttgctaatagaaaatgctgattctgattctgagatcaatttgtgggaattttacataaatctttgttaattactgagtgggcaagtagacttcctgtctttgctttctttttttttttctttttgatgccttaatgtagatatctttatcattctgaattgtattatatatttaaagtgctcattaatagaatgatggatgtaaattggatgtaaatattcagtttatataattatatctaatttgtacccttgttgaaattgtcatttatacaataaagcgaattctttatctctaaaaaaaaaaaaaaaaaa

SEQ ID NO: 323 - DNA, 1157 bp, Homo sapiens
ccagctttctctcctttgaaaacactaagaataatgtcactgcatcagtttttactagagccaatcacctgtcatgcctggaacagggatcgtactcagattgccctcagtcccaataatcacgaagtgcacatctataagaagaacgggagccagtgggtgaaagctcatgaactcaaggagcacaacggacacatcacaggtattgactgggctcccaagagcgaccgtattgtcacttgtggggcagaccgcaatgcctatgtctggagtcagaaagatggtgtttggaagccaaccctggtgatcctgagaattaatcgcgcagctacttttgtgaagtggtcccccctagagaacaaatttgctgtgggaagtggagcacgactcatttctgtttgttactttgaggctgaaaatgactggtgggtgagcaagcacattaaaaagccgattcgctccacagtcctcagcttggattggcatcccaacaacgttttgctggcagcaggatcatgtgacttcaaatgcagagtgttttctgcctacattaaagaagtggatgaaaagaaagccagcacgccctggggcagcaagatgccttttgggcagctgatgtcagagtttggtggcagtggcactggtggctgggtccacggggtaagcttctctgccagtgggagccgcctggcctgggtcagccacgacagcaccgtgtctgttgctgatgcctcaaaaagtgtgcaggtctcgactctgaagacagagttcctgccgctcctaagtgtgtcatttgtctcagagaacagcgtcgtggctgctggccatgactgctgcccaatgctctttatctacgatgaccgcggctgcctgaccttcgtctccaagttagatattccaaaacagagcatccaacgcaacatgtctgccatggaacgcttccgcaacatggacaagagagccacaactgaggaccgcaacacggccttggagacgctgcaccagaatagcatcactcaagtctctatttatgaggtggacaagcaagattgtcgcaaattttgcactactggcatcgatggagccatgacaatttgggatttcaagaccctcgagtcttccatccagggcctccggataatgtgaagctgagtgga

SEQ ID NO: 324 - DNA, 974 bp, Homo sapiens
cggaaactggacactggaccggcagcgccatgagactcctcccccgcttgctgctgcttctcttactcgtgttccctgccactgtcttgttccgaggcggccccagaggctcgttagcagtggcacaagatcttacagaggatgaagaaacagtagaagattccataattgaggatgaagatgatgaagccgaggtagaagaagatgaacccacagatttggtagaagataaagaggaagaagatgtgtctggtgaacctgaagcttcaccgagtgcagatacaactatactgtttgtaaaaggagaagattttccagcaaataacattgtgaagttcctggtaggctttaccaacaagggtacagaagattttattgttgaatccttagatgcctcattccgttatcctcaggaccaccagttttatatccagaatttcacagctcttcctctgaacactgtagtgccaccccagagacaggcaacttttgagtactctttcattcctgcagagcccatgggcggacgaccatttggtttggtcatcaatctgaactacaaagatttgaacggcaatgtattccaagatgcagtcttcaatcaaacagttacagttattgaaagagaggatgggttagatggagaaacaatctttatgtatatgttccttgctggtcttgggcttctggttattgttggccttcatcaactcctagaatctagaaagcgtaagagacccatacagaaagtagaaatgggtacatcaagtcagaatgatgttgacatgagttggattcctcaggaaacattgaatcaaatcaataaagcttcaccaagaaggttgcccaggaaacgggcacagaagagatcagtgggatctgatgagtaaatgttcctttgtgcaacaattcggtctttacttaacctgccctaatatttttcggcctgatgggaattagtgcagagaagccaa

SEQ ID NO: 325 - DNA, 5487 bp, Homo sapiens
atggcctcaggagccggaggagtcggagggggcggtggcggcaagatccggacgcggcgttgccaccaggggccaattaagccttaccagcaggggcgacaacagcatcagggcattcttagcagggttacagaatctgttaagaatattgtgccagggtggttacaaagatacttcaacaagaatgaagatgtatgcagctgttcaacagacacaagcgaggttccacgctggccagaaaataaagaggaccatctggtatatgccgatgaggagagctctaatattactgatgggagaatcacacctgagccagcagtcagtaatacagaagaaccttcaacaactagtactgcttcaaattatccagatgtgttaacaaggccttctcttcatcggagccatctgaatttttccatgttggaatcccctgcattacactgtcagccatctacatcctcggcattcccaattggcagttcgggattttcccttgtaaaggaaattaaagattctacctctcagcatgatgatgataacatctcaactaccagtggtttttcttcaagagcttctgataaagatataactgtttcaaagaacacttcattgccacctctgtggtccccagaagctgaacgttctcactcactctcacagcacactgccaccagctcaaaaaaaccagcattcaacttgtctgcctttggaacactttccccttcacttgggaattcttcaatccttaaaaccagtcagcttggagattctcctttttatcctggaaaaacaacatacggtggggcagcagctgctgtaagacagtctaaactacgaaatacaccttatcaggcaccagttagaagacaaatgaaagctaagcaactcagtgcacaatcttacggtgtgaccagttcaacagctcggcgaatattgcagtctttagagaagatgtcaagccctttagcggatgcaaaaagaattccatccattgtttcttctcctctgaattctcctcttgataggagtgggatagatatcacagattttcaggccaaaagagaaaaggtggattctcaatatcctcctgttcagagacttatgaccccaaagccagtttccatagcaacaaatcgaagtgtttattttaaaccatctctgactccttctggtgaattcaggaagactaatcaaagaatagataacaagtgcagtactggatatgaaaaaaatatgacacccggacaaaatagagaacaacgagaaagtggcttttcatatccaaatttcagtttgcctgcagccaatggtttatcttctggagtaggtggtggaggtggcaagatgagacgagaaagacacgcctttgttgcttctaaacctctggaggaggaggaaatggaagttccagtattaccgaaaatctctctaccgatcaccagttcttcactgcctacctttaattttagttcccctgagatcacaacttcctctccatcacccatcaattcgtctcaagcattaacaaacaaggtacaaatgacctctccgagcagcactggcagtcccatgtttaaattttcatctccaatcgtaaaatctactgaggcaaatgtactacctccatcatctattggatttacatttagtgtgcctgttgcaaaaacagcagaactttctggttctagtagtactttagaaccaattataagtagttcagctcatcatgtcactacagtgaacagtacaaattgtaagaagacaccacctgaagattgtgagggtccttttagacctgcagaaatcctgaaagaaggaagtgttctagatattctgaaaagccctggtttcgcatcgccgaagatagattctgttgctgctcagcccaccgcaacaagcccagtagtttatacaagaccagcaataagtagcttttcttctagtggaattgggtttggggagagtttaaaagctgggtcatcatggcagtgtgatacatgtctactccagaacaaagttacagacaacaaatgcatagcctgtcaagcagcaaaattgtcacccagagatactgctaaacagactggaattgaaacaccaaataaaagtggcaaaacaactctttctgcatcagggacaggctttggagacaaatttaaaccagtgataggcacttgggattgtgatacctgtttagtgcaaaataaacctgaagcaataaaatgtgtagcctgtgaaacaccgaaacctggaacttgtgtgaagcgagcccttacattgacagtggtttcggaaagtgctgagactatgactgcttcatcttccagctgcactgtaaccactggtaccttaggatttggagataaattcaaaaggcccattggatcttgggagtgttcagtatgctgtgtttctaataatgcagaagacaataagtgtgtgtcctgtatgtctgagaaaccaggaagttcagtacctgcttcaagtagcagcactgtacctgtctctctgccttctggaggctctctaggattggaaaagttcaagaaacccgagggaagctgggactgtgaattgtgcctagtgcagaataaggcagactctaccaaatgtttggcatgtgaaagtgcaaagccaggcacaaaatctgggtttaaaggctttgacacatcttcctcatcttcgaactcagcagcctcctcatccttcaaatttggtgtctcatcatcctcttctgggccttctcagactttaacaagcactggaaattttaaatttggagatcagggaggattcaaaataggtgtgtcatctgattctgggtctataaaccccatgagtgaaggctttaaattttctaaaccaataggagattttaaatttggagtttcatctgaatctaagcccgaagaagttaaaaaagatagtaagaatgataattttaagtttggactttcttctggtttaagcaacccagtttctttaactccatttcaatttggggtatctaatcttggacaggaagaaaagaaagaggaactgcccaaatcttcctctgcaggttttagctttggtacaggtgttattaactccacccctgctcctgctaacaccatagtgacctctgagaacaagagcagcttcaaccttggaaccatagaaaccaagagtgcttcagtggctcctttcacatgtaagacatcagaagctaaaaaagaagaaatgcctgccaccaaaggaggattctcttttggcaacgtggagcctgcctctctgccatctgcctcagtgtttgttttgggaaggacagaagagaaacagcaagagcctgtcacttctacttccctagtttttgggaagaaagctgacaatgaagagccaaagtgtcaaccagtgttttcctttgggaattcagagcaaaccaaagatgagaattcttcaaagtccacatttagttttagtatgacaaaaccatctgagaaggaatctgaacagccagcaaaagccacttttgcctttggagctcaaactagtactacagctgatcaaggtgcagcaaagccagtttttagtttcttgaacaacagttcctctagttcaagtacaccagccacttctgctggtggtggcatatttggtagttccacctcttcctccaatccacctgtggctacctttgtgtttggacagtccagcaatcctgtgagcagctctgcctttggtaacactgctgaatccagcacctctcagtctttgctattttctcaagatagcaaactagcaaccacatccagcacaggtacagctgtcaccccatttgtctttggtccaggagccagcagtaataatactaccacctctggtttcggctttggagccacaaccacatctagctctgcaggatcctcctttgtatttggaactggaccctcagcaccatctgccagtccagcatttggtgctaaccagaccccaacatttggacaaagtcaaggtgccagccagcccaatcccccaggctttggatctatatcatcttccacagcattatttcccactggttctcagcctgcaccacctacttttgggacagtgtcaagcagtagccagccccctgtgtttggacagcaacctagtcagtctgcatttggctctggaacaactcctaattctagttcggctttccagtttggcagcagcactacaaatttcaacttcacaaacaacagtccatcaggagtgttcacatttggtgcaaattctagcacacctgcagcctcagcccagccttcaggctcggggggctttccatttaaccagtctccagcagcatttacagtggggtcaaatgggaaaaatgtgttctcttcttctggaacttcattctctggtcgcaagataaagactgctgttagacgcaggaaataaaggtcacattggtgttgtactcaattttaacaacagctggtgccctgctttcagatactggattgtactttgtgctggggttatctgaagtcagatctgcctaaggacttctttaattttggaattttcctcctttctctttcgttacagaagccccaccctgcctcacccacccttttttaaataaataaatagctagactggtgactgattcttcagcaaaaatattttatgatccagcagattattcactgatttgacatagtctggctgtacccaggaatggagcctgcacggtgaatggctttgtatagaacctctttgtctacaccattatgtgcgctgataacgttcatggaacgcgttgaaattgtaattatatctgaggaattctgtatagattagaattctgtatagattagagagtgttgaaacggatgatttctatgctgagtttgtgctggtgtatgtgtgaagtgagtgagttgggtgtattgtgcgctaaacttttctgatagaggaagcctgattaaagaatggtccgtgctaaggacttgttagatctagttcactctccatttaataattatatgctatttctatattttcattctcctatcacctgtcttgcctttttcattattttattatgaaacttgtgtaaatacaattttgtttctgtactttttggcataacataaatctgtgaacttgaaatttgaattttgtgttagagatttttttgttgtttgtttagtcttgtctcagattttattatgtaaatcccattattcaaagttgcctaaatccatttggaaatctttaaaaaaaaaattggggattcttaaagttgaatttattggcttttctgatccagttttgtttggaccaaaaaccagtattgtacaaagtattaagcatatatttttatatttactaaaatggtctgtggtgacttttggataataaggaaaagtttaatattaaagccatgtttattacagtataattaacatgttaaaccatgggataaatgccatcaataaaaaattatgacat

SEQ ID NO: 326 - DNA, 2640 bp, Homo sapiens
gggcggccaacgtgggctcgctcttcgacgacccagaaaacctgcagaagaactggcttcgggaattttaccaggtcgtgcacacacacaagccgcacttcatggccttgcactgtcaggagtttggagggaagaactacgaggcctccatgtcccacgtggacaagttcgtcaaagaactattgtcgagtgatgcgatgaaagaatataacagggctcgagtctacctggatgaaaactacaaatcccaggagcacttcacggcactaggaagcttttattttcttcatgagtccttaaaaaacatctaccagtttgactttaaagctaagaagtatagaaaggtcgctggcaaagagatctactcggataccttagagagcacgcccatgctggagaaggagaagtttcgcagactacttccccgagtgcaaatggtcaagaaaaggcttcatccggacgaggtggtgattgcagactgtgcctttgacttggtgaatatccatcttttccatgatgcttccaatctggtcgcctgggaaacaagcccttccgtgtactcgggaatccggcacaaggcactgggctacgtgctggacagaatcattgatcagcgattcgagaaggtttcctactttgtatttggtgatttcaacttccggctggattccaagtctgtcgtggagacgctctcagcaaaaccaccgatgcagacggtccgggccgccgacaccaatgaagtggtgaagctcatatttcgtgagtcggacaacgaccggaaggttatgctccagttagaaaagaaactcttcgactacttcaaccaggaggttttccgagacaacaacggcaccgcgctcttggagtttgacaaggagttgtctgtctttaaggacagactgtatgaactggacatctcgttccctcccagctacccgtacagtgaggacgcccgccagggtgagcagtacatgaacacccggtgcccagcctggtgtgaccgcatcctcatgtccccgtctgccaaggagctggtgctgcggtcggagagcgaggagaaggttgtcacctatgaccacattgggcccaacgtctgcatgggagaccacaagcccgtgttcctggccttccgaatcatgcccggggcaggtaaacctcatgcccatgtgcacaagtgttgtgtcgtgcagtgacgtggtgggaagagatgccagcgccacgagaggacacttcgtgagcctccctgtagccgtggaccgaatacgcactcttgaaagctgcatcgagaacccgcccaagcgccacctgctagacggccagccccacacttcgcttcagcctccggaccattccggagcagccccacatacctcactgtctcgtctgtctatgtgacattaagtagaaatattggtttttttttttttttaaataagtcacagtcctgttgtcaaaactctaatagacagcaaagagggtctgtaccgtagacttcacagttttcagtttttaatgattgccagtggaggggcttcttcagcacagagaccccccactgtgtccagggaccccctctgccaggtggaggtgtgtccaggggctggggaagccgagacgggcactccctctgccggccggcagcgtggccctgagcatggcaagggggtctgtctctgccgatgctccttccgcggcactgactctgcgccgtgtcacatggtttttgaatcacactgcagctgctttccatttttatatatatataaatatatataaatatatactttttaaaaataatttataaatcttaccaaaacttatgctaaatatactttccagtatgaacgcacaggagagtcccatcagcaggcggcattggagtctaggagctcagctgtgtgtccatcaacacacaaattcgtaaaaaacacacatggcctcgccatcgtgggtaaaatcggccccacagcacgtctgcaccagcgggccgttactcccatgccgttcttctgtgtaatattaagaactgaatgtgaagtttatagctagcctgggtgtaccttttaagaattttgtaaaccgtttgtctgtcttttgttactgttttatggtgccaagtatcctacgttacaacaataatatcatgggagaaatagaaatagcctagtttgcttccaatagaaactgcttttaacatgggctgtatataaaaatattaaagagaaacaaaactgtacatttcctcattgctccgctacagacaacccatgtcataaccttgttgcaaatatttttctcctatagcagtaagtacagcattagaaggtgattagagagtctgttgatgaaacacaaatgtatgtttttattgatttttactttagaacactacagagttcctgggaccggggtgaaggcattagctgggtgtttgtgtgggataaatactaccactgcaagtgactgctgtccgctgcggaatctgttcttggtggaagcacaggtccgtgtcgctgctgtggttgccgctgtccgcggttcaacacggagtccgccccgcgggtttcagctgttggtcgttctgaggggcctttggaagtgaccggtctggttcctaagcaataaaattgaccgtggtga

SEQ ID NO: 327 - DNA, 307 bp, Homo sapiens
ggaattttgtaagatttattgagaatagaacaggcttcctgtcccctaaccctgtggtggatcctgagaagagggaagcctaggtctgggtggtgtgggctggaggcctacccacctgcaaatggggactcccaggcccccgcgggtgcatacagtgaacaaagtaattgctctcccctatcacccctgatccttacctgcctggcccccaaggtctcctggggaccagagatccctgcatagccaggagccagcctggcccacctcaaggggcaggaagcaagggtagcactgtggaacctgtttt

SEQ ID NO: 328 - DNA, 287 bp, Homo sapiens
ctcagggataataaatctattttaataacgttacttttgacaacgatttgtacatgtatttaaagataacaactttcaacccccacccttaccccagactcccattacaaattgaggcatgacctgcccttgccaggaagtgagcaaagctgcaacatcaaaactctgcacatcccactctcagaggagggtgactttacactgtgttgggaaaaataactaagcatttaaatttttcattgtacacctgtacattggtttagattgaatggctcaaattaaacaaa

SEQ ID NO: 329 - DNA, 1619 bp, Homo sapiens
ggcacgagcccgctgcccgtggccgtcgcactgccgagccagggggcagtatgaagaccacattcaccatcgagatcaaggacggccgtggcaggcctccacaggccgggtgctgctgcccacaggcaaccagagggcagaactgacactggggctgcgggcgccccgaccctactcagcaccagtagtggggcaagagcaccatcacccgtgtcaacagccctgggaccctggctcggctgggcagtgtcactcatgtcaccagcttcagccatgccccccccagtagccgaggaggctgcagcatcaagatggaaccagagccagcagagcctctcgctgcagcagtggaagcggccaatggggctgagcgagcccgagtgaacaaagcaccagaagggcggcgtctgagcgctgaggagctgatgactattgaggatgaaggagtcttggacaagatgctggatcagagcacggactttgaagagcggaagctcatccgggctgacttcgtgagctccgacaaaggaagagagaccagcgggacaaggagcgggaacggcggctgcaggaggcacggggccggccaggggaggggcgcggcaacacagccactgagaccaccacgaggcacagcagcgggcagcgatggctctgctgtcagcactgttaccaagactgagcggctcgtccactccaatgatggcacacggacggcccgcaccaccacagtggagtcgagtttcgtgaggcgctcggagaatggcagtggcagcaccatgatgcaaaccaagaccttctcctcttcctcctcatccaagaagatgggcagcatcttcgaccgcgaggaccagcgagccacgggccgccatggccggctcgagagtgagaaacggcaggccgagaagaagaaagagctgatgaaggcgcagagtctgcccaagacctcagcctcccaggcgcgcaaggccatgattgagaagctggagaaggagggcgcggccggcagccctgcggaccccgcgcagccgtgcagcgatccaccagcttcggggtccccaacgccaacagcatcaagcagatcgtcgtggactggtgtcgagccaagactcggggcctacgagcacgtcgacatccagaacttctcctccagctggagtgatgggatggccttctgtgccctggtgcacaacttcttccctgaggccttcgactatgggcagcttagccctcagaaccgacgccagaacttcgaggtggccttctcatctgcggagatgctggtggactatgtgcccctggtggaggtggacgacatgatgatcatgggcaagaagcctgaccccaagtgtgtcttcacctatgtgcagtcgctctacaaccacctgcgacgccacgaactggcctcgcgcggcaagaatgtctagcctgcccgcccgcatggccagccagtggcaactgccgcccccactctccgggcaccgtctcctgcctgtgcgtccgcccaccgctgccctgtctgttgcgacaccctcccccccacatacacacgcagcgttttgataaattattggttttcaacgaaaaaaaaaaaaaaaaaaaaaaaaaaaaaaaaaaaa

SEQ ID NO: 330 - DNA, 4553 bp, Homo sapiens
ggcggcatggaggcggcgcatctgctcccggccgccgacgtgctgcgccacttctcggtgacagccgagggcggcctgagcccggcgcaggtgaccggcgcgcgggagcgctacggccccaacgagctcccgagtgaggaagggaagtccctgtgggagctggtgctggaacagtttgaggacctcctggtgcgcatcctgctgctggctgcccttgtctcctttgtcctggcctggttcgaggagggcgaggagaccacgaccgccttcgtggagcccctggtcatcatgctgatcctcgtggccaacgccattgtgggcgtgtggcaggaacgcaacgccgagagtgccatcgaggccctgaaggagtatgagcctgagatgggcaaggtgatccgctcggaccgcaagggcgtgcagaggatccgtgcccgggacatcgtcccaggggacattgtagaagtggcagtgggggacaaagtgcctgctgacctccgcctcatcgagatcaagtccaccacgctgcgagtggaccagtccatcctgacgggtgaatctgtgtccgtgaccaagcacacagaggccatcccagaccccagagctgtgaaccaggacaagaagaacatgctgttttctggcaccaatatcacatcgggcaaagcggtgggtgtggccgtggccaccggcctgcacacggagctgggcaagatccggagccagatggcggcagtcgagcccgagcggacgccgctgcagcgcaagctggacgagtttggacggcagctgtcccacgccatctctgtgatctgcgtggccgtgtgggtcatcaacatcggccacttcgccgacccggcccacggtggctcctggctgcgtggcgctgtctactacttcaagatcgccgtggccctggcggtggcggccatccccgagggcctcccggctgtcatcactacatgcctggcactgggcacgcggcgcatggcacgcaagaacgccatcgtgcgaagcctgccgtccgtggagaccctgggctgcacctcagtcatctgctccgacaagacgggcacgctcaccaccaatcagatgtctgtctgccggatgttcgtggtagccgaggccgatgcgggctcctgccttttgcacgagttcaccatctcgggtaccacgtatacccccgagggcgaagtgcggcagggggatcagcctgtgcgctgcggccagttcgacgggctggtggagctggcgaccatctgcgccctgtgcaacgactcggcgctggactacaacgaggccaagggtgtgtacgagaaggtgggagaggccacggagacagctctgacttgcctggtggagaagatgaatgtgttcgacaccgacctgcaggctctgtcccgggtggagcgagctggcgcctgtaacacggtcatcaagcagctgatgcggaaggagttcaccctggagttctcccgagaccggaaatccatgtccgtgtactgcacgcccacccgccctcaccctaccggccagggcagcaagatgtttgtgaagggggctcctgagagtgtgatcgagcgctgtagctcagtccgcgtggggagccgcacagcacccctgacccccacctccagggagcagatcctggcaaagatccgggattggggctcaggctcagacacgctgcgctgcctggcactggccacccgggacgcgcccccaaggaaggaggacatggagctggacgactgcagcaagtttgtgcagtacgagacggacctgaccttcgtgggctgcgtaggcatgctggacccgccgcgacctgaggtggctgcctgcatcacacgctgctaccaggcgggcatccgcgtggtcatgatcacgggggataacaaaggcactgccgtggccatctgccgcaggcttggcatctttggggacacggaagacgtggcgggcaaggcctacacgggccgcgagtttgatgacctcagccccgagcagcagcgccaggcctgccgcaccgcccgctgcttcgcccgcgtggagcccgcacacaagtcccgcatcgtggagaacctgcagtcctttaacgagatcactgctatgactggcgatggagtgaacgacgcaccagccctgaagaaagcagagatcggcatcgccatgggctcaggcacggccgtggccaagtcggcggcagagatggtgctgtcagatgacaactttgcctccatcgtggctgcggtggaggagggccgggccatctacagcaacatgaagcaattcatccgctacctcatctcctccaatgttggcgaggtcgtctgcatcttcctcacggcaattctgggcctgcccgaagccctgatccctgtgcagctgctctgggtgaacctggtgacagatggcctacctgccacggctctgggcttcaacccgccagacctggacatcatagagaagctgccccggagcccccgagaagccctcatcagtggctggctcttcttccgatacctggctatcggagtgtacgtaggcctggccacagtggctgccgccacctggtggtttgtgtatgacgccgagggacctcacatcaacttctaccagctgaggaacttcctgaagtgctccgaagacaacccgctctttgccggcatcgactgtgaggtgttcgagtcacgcttccccaccaccatggccttgtccgtgctcgtgaccattgaaatgtgcaatgccctcaacagcgtctcggagaaccagtcgctgctgcggatgccgccctggatgaacccctggctgctggtggctgtggccatgtccatggccctgcacttcctcatcctgctcgtgccgcccctgcctctcattttccaggtgaccccactgagcgggcgccagtgggtggtggtgctccagatatctctgcctgtcatcctgctggatgaggccctcaagtacctgtcccggaaccacatgcacgaagaaatgagccagaagtgagcgctgggaacagggtggagtctccggtgtgtacctcagactgatggtgcccatgtgttcgcctccgccccccacccttgccaccacactcgcccacttgcccaccgggtcccgccggataaatgacaggcccgaggtcagaatggccatccccgggccccgtcctggggtctctgtccccacttccttctggcctgggaggtctgtaattcctgtctcctggactctcctgggaagttccctgctctgcagctctggcccaggagctgcaggctgggagggggcagccaagaagccggagctggcagcatacccagagatccggggcccccccacccccaaatcacgagtgcagctggagcttgctcccccttgttcggaagctggacgttcacttggtgactggtgcctctgcactgacggaggactctgggggtccttcttaccggctctgacctctctcttcgtgcctggtctgggactgggtcagccctgggggatcagaaggggccatctgggcccagctgtgtacagcgagggtgggcagccccctccactccactctgcttccacaaagtcggctcccgagagctcgaggctgcttctgtttatatgtgcagggcccgggccggtgaagggtcagagagacggacacaaggagccggcaggagggcggagcgaggatgtcctttcccgggagacaagtcgggaaagcctggctggactgcctcagccccgcgcgcctcctggactcagggttccccgtcctgagctcgggagatgttcagagtcacactgccgcccggtctgccacgcagaggtccaacttgccacccgcgtccctggtacctgagaccaccgacatcctcaggttcctgaccgtggcgcccttctacccagcccagtgtgcggccgccgcgctgtctgcacagctgggggcctctgagcctggtgggcttcctggactcttggcctcactccttgccccctccccacgacacccatgagccgaaaggatgtcactaaggatggctgattccccaagggcacccgctctccctccctccctgctggaggaacacgtcatatcagatgagaggaagatggcctctgatggacagaatttttctcttaactcagcttttgctactttggcaaaaactagcgaggggtagcagaaacctgcaccaaggattgtccctatgtcttggcccctcctagagcgtgtgcagactgatgattttatatgtaaatcaagactcacatccctttcctagtcccccacatccaaagcccctcagcctgccttgcagaccaatgggctccatgttctgtagccccctcccctacgcctcacccctcctccctctcacaggttctgggcggccagtgagagaaacgcagtgggggaggcagggagtctggtgcctgcagagattctctgcttctttcctggggggaggtggggaggtcttagcaggagcgggccctgtacccacctgctgacctgctgtttggtagagaaataaaggttgtgtgactggggg

SEQ ID NO: 331 - DNA, 6372 bp, Homo sapiens
ctgcagtgttcgcttttgctagaaagaggatgtggaggaaggaggaggtgggcaatctggcttgagttgtgctgtatcctcttccttgttagcttgccttagtctcactggagaccatttgcggatagtgcttggtccatgcccagcaggacagggctttgctgcttctgaaagtctggtgttctgtatctggggctgtgggttcctgtgtctagctgctcaggaaatcttgagaagcattccactctggggtgtaaaccagtatgagtttgaaattcaagcgtttgtacctgagttggggagagaattgcaaggcatactttctctgaaagtaacagaaccattcaggctgccatgttattaaggaatctgaactgttgatagcagttaccttgtgggtgatacaatgggaggcggcaaaaaaactacctgcataggagaccctgccctttgtcaagagctgggagcacatttcatcagagtagcaggcccacctggtgccagagggcctgcccctcctgcttctgttcctttgccttgcagtctcctggagagagcctctcttttcctgtacagcctttgggccaaaatgcccttctagcttctccaaagaagatccgagtttatttcattctatgttttaagaggtaaaaggacataacaagtgaaagaagttttgggctaaagtaggctatgtctccttatgtattactcaatactgttttgcagagaaaacatttttcaagcatgtgcttcctgaagacacctcagtctttgggccatttgatttccaatacatagggtggaagaatgtgattttggggctgaccataaactggaaatttgtgaaatggcagtgattgggcaatcttcagtttattttttcagttgaagtggaactcatttctggaatggatttaataggctgtgtctaatgtacaaactgggtgagtcctgccttagtgtgtcctgccccaccggtacgcttccaggatactcttttcccctctgtaaagtcactttcttctgatggccagtgtcactatgatgtcagtgaggtctggggatgaggacagtgtgtcctgaaattcacaggactgacgcctcaccccagtgcacgaggattcctgtggcatcaggtgctgctgtacctggtgtaggagcctaatcattgaaccattgtgttactcacattccatgtcacagaacatatcagcctcaagaaggatttggtggaggtggatttaccactggttttacaaaggaccgtgtaaagtcattgaagttgtgaaagtctattttttttcctgtaaatctattttttacagaatataagaaacatcaatgacctgatctgtccttcctcctccttcccgcttcccccaaaatcacattccagtttttattgtctttgtgtccaaagtaaactaggtgacttatttgtataaaatgttattttgccacatgagacagtaataaaagaaagattttcacagtacgtctccctcgtcctgtctcctgattgttgggcccgttgtgttgctgaggggagcaggggcgaatgggggctccaggtttctcttactttggctattatgtggcccttctgtaagtagttgaactagagtatagctggcttctagagtgattgaggaattgtactggactttaggcttaatatttttgctttatattttcccagggtgagtggctttgtaaattgaaagtttacatgcatgttttaaaggtagggtttttttttttgagatggagtttcgctcttttttcccaggctgggatgtgatggcatgatggtggctcactgcacccttcgcctcccgggttcaagtgattgtcctgcctcagcctcccaagtagctgggattacaagtgcatgccaccacgcccggctaattctgtatttttggtagagacagggtttccccatgttggccaggctggtcttgaactcctgacctcaggtgatcaacccgccttggcctcccaaagttctgggattacaggtgtgagccactgtggctggccataaaggtaggcttattaagaaatactttaactacagtaaaatttacctcaattaagagtattgatgcattttgacaaatgaatacttttattacccatcacaatcatgatataggacatttccatcgtacccactcagaaagttcctgagttccttgtgtttgcagccaggtgacttcccccacttcgcctcttgcaaccactatctgattctgtctctattggaaaacttggatacttttaaaatgaaatttgaacgttcatatttacagtcacaaattctcaagagtctggtttagatgctctgtggcacctgaagcaattattggcctttgctcacaaacacaactcacttatttctcccttttctcctgcttcttcatcgtttcttccacccagggctggttcccaggtgggatgactgaaaggtgaggaagcccttagagcatttgccaatgggagccattcatttgactttaaagtactgagaatttagaggcgttcttttaaatgcattatttaaaaagaaaggtaacacattaaggactttgctgcatcttttgattggctttcttctaggaagtagtgaccgaggtttccactttcctccaagaggaagagacagaagttttggcaaataggtcaatgctgggaacagatgcctgcctggctgagtgctgggaaagaaaggcagttggagggatgtgtgggtgcctgggagggcgtgggtggtgcccaggaggctatgggaatcagaatcacacttgcacaagagaagacccttatgggacaagtaaaatcagcatagtttcttgggcggggcaaaggtgtcctgatgaggatgctaggggtcaaatatgtggctgggttctgccccaatcgggaatgagacacagtactgaagtggaacgggggtagcatctccacccaccttcacagcctctggggaaaagaaagctttccttgcagcccaactccaggggcctaaatattgagcgccaacacaagacaggtccttgagcttctcggagcgagtcggggaagcagataatttcagatgcaaagtgccttgaataaacagaacgaaagatagagagccagagggggagaaacggcttggtgtggtcagggcaggcatccatgagacctaaacgaagagggggcattccagacaaaaggaacagtgatcacagaggccccgagtcaggaaccagctaagggtcttagagaagagctgcctcgtaaagctaagcaacaataaccagggaatggtgggcatgggccctgatagacaaggcaggtcttggctttttaagccatagaattggattttaggagggatgggcccgccgacaaagccaacaaagttttaacccgaagatcgctatcttatttatgctttaaaaagacctctctggcctttctgcgaagctctatccttagctttctcttgttagcattttgattaacgaatgtgggcacgaacagccagctgaccgaccgcgcgcgcagtcgagcgtcggttcatcgccttgggagggaccactggaggccccgccccctggccgcgagcgcacctcggccccgctcccgaggccctacgggcgtggcctctgtcccgggtcccgccccccagcactccggaacagcgcgctcgcagcgggaggtcgcgaagcctgggactgtgtctgtcgcccatggccgccgcgctgctcgcccgggcctcgggccctgcccgcagaggtgagtgcgctggggatccgtacggcggggcttcagcccgcgtctggcccagcgggcggaggtcctggcggccggctctgtcagagccgctggcaggcggagccccactccgggagcgctcacggcctttgccccagttctgctgctccttgcgccgacccagcccggcccttcaggcgtccctggttcctgcacagacccctaccccccgattgaccccagccaccagcccagttcccagttcccatatctccctcccttcatttcacccccactagaggttcagggtgcgtccttcttccggagccaggcctgggattgaaccagacccgcatctgtgaccttgggcaagacagcccctcctcagcctcggttggcccatgtgtaaaatgtccacagagaaaatcagagttgttgggaggattaaatcatagggtatgtaaagcacttcgtgcctggcgtgtaacaggtgttccacaaatgctcgttcttgctggttaatacagtacctttcccatcttacgtgtctccagttgtagcagccgtgacacatatagccacggcttcctttgcctggcctgaattacaaggggaacgctactgagaactgtgttaagcgctagttagtctttctttcgcactccgaggagcggaatactattcgcctccacttgttatagaaacggaggctcactgacgtttaaaacccttgcctaaggtcacagagctgaggtcttattactgttggtattatactgaggactgaaggatgtagtgtatggaaatgtctagtgagtgtactaagcattcagttagtatggggttttcagtggccgccatggacattttgggctgacagttctttgttgtgggggctgtcctctgccttgttggatgttcagcagggatcccggacccctatccactgggtaccaatagtattcccctgctctagttgtgacaactagaactggctccagacattgccagatgtcccttggagggcaaaatcctccctggtgagttagtgggtcactaggattcttggagacctcctgcctcctccttccactcacttctgcccttgccggcagctctctgtcctagggcctggcggcagttacacaccatctaccagtctgtggaactgcccgagacacaccagatgttgctccagacatgccgggactttgccgagaaggagttgtttcccattgcagcccaggtggataaggaacatctcttcccagcggctcaggtgagagtgcaacctcagcagcccacgatagtggtctgccctctgctactggatgaatggtggcagtgacagtcagcggcactcggactttggtagaggaaccccaaagcagggcctggaacccagaaaatgctctggaagtttcccttgtccagcctgtggccagtagccaggacttaacttctgggacaacagtaatatgtggtggatggtcagttgcttactgtgccagccactgtgctcattctaaatagtgcctttagggtgtttggcatgcactaggcactgttcttgagatgggttatctcatctgttcctcacaacggtcctgtgaggtgaaggtactattcttatttatttttttgagacggagtttcactcttgtggctcaggctggagtgcaatggtgcgacctcgcctcactgcagcctctgcctcctgagttcaagtgattctcctgcctcagcctcccaagtagctgggattataggcgtgcactgctctgccccgctacttttgtatttttagtaaagacggcgtttcaccatgttggccaggctggtctcaaactcctgaattcaggtgatctgcccacctcggcctcccaaagtgctgggattacaggtgtgagacaccacgcccggccaaaggtagtattattatataccccatggactcagacttgtgaacaagttaaataacatacccaaggtcatggagctcatcagcggcagcctgctcgacctattttcttttttatttacttatttttttttgaaatggactctcgctctgttgcccaggctggagggcagtggcgcaatctcaacgcactgcacccctctgcctcctgggttcaagcaattctcctgcctcggcccccagtagctgggattacaggcgggcaccaccacgcccagctagtttttgtactttcagtagagatggggtttctccatgttgggcaggctggtctcaaactcctgaccttaggcgatctgcccgccttggcgtcccaaagtgctgggattacaggcgtgagccaccgtgcccggcctgcttgaactgttttctcccctgagtttcccatcagcgcgctccctcccgtgccactgtgttcttccatttgcattcagtctgtctgcagctacgcgttgaagatgttactgccgtacacgctgacctaaagatgtccagcacctggtgtaaacactcagtagtagatagttgtttaattaatgatttgtgaaaagtcaaacctctccggcctcttctccttgcctgtttttttttttaattttaattttaatttattttttattttt

SEQ ID NO: 332 - DNA, 89328 bp, Homo sapiens
gacccaagggcttggtcactggactgtgggcaatgacactcaaaagcaaaggaactgtgggactaccagtagggtgagctgggccctgtgatggccacaagcttagagaagttattagagttaacgagatgatccataagtgggggatgctctttcattatagctattgaggagtttgtgtactgcttagaacagtgtctggcacctaatagacacagtttaagtgttagcgttttcgttgttggtgtcattgtcatcatcatcatcaatgagaatattataaaactatcaaaagacatttaaaaagacttaagtggtaagatacaccattgtattataggaaacctcaataacaaagacatcaatacctcccaaattgacctgtggattcaatgccattcataataaaattgcagcagggtttttgctagaaattcacacagattttctaagttatatgagaaactcctaggttttctcttactctctgaactgtcatccctttaaggcttttttgtttttttgagatagggtctcactgtgtcacctaggctggagtgcagtggtgccatcacagcgccaccatgccccgctaattaaaaattttttttttttttggtagagattagctctcactatgtttcccaggctggtcttgaactcctgggctcaagtgatcctcctgcctcagcctcccatagtattgcgattacaggtgtgagccactgttcctggaaccctttaaggtttttttacatgaatcctcttctgactccccagttcttaagatccttctctatgccctcagcaaaattccctgtatcctgaacttctgtaaacatccattcatcttcttgatctaaatgaaatatggctctgaggacatgcctttcccagggttcttgaaagtgggaggctgttttctctcctgcactcagtacaatgcttggctcaaaggtgtggtagttctccttgattgtcattgctgctttcagacctttttcctccatagaccactccaacttttaatctcatgacatcagagtatcccttgtttaatcacttttgtggttaaaagagacctttgggtcagtctgcctcattccttgaagagtttagccctggctcacttttcactctatttcttctcctgtcttaaatcttcgttatttcattgtttatatagattttcctttcattatcctgacctcgaatttctttgactttctctcccttagtgagcttgacctccatcccatctcagacacacattgccataccttacttagactttatccataactgtagctgccttcccccacaatctcgagtcccaatccctgttttatcttctctttagggcccttgcttcatcaagtctttaacctcaccaggacctacagtcttttgaccctatttcctatttactaccccttttgtttttcattccccttcttaatgttcacattcccatcttgatctggcttagatccatggatgagtaataagagcattttttaatgtacatcctcaactccactgcctcctctctaaactttgttatgtttgcctggtaaaactccagctctggtcaaatccaacttgttacctttgcgacagtacccaaatagctgaacaaggctagagaaaaacatacagccgtgcagactgctctcactttaacttgctgatcactaactaacgtggcccttaatgctacctgtcagtcccgctgtttgccctggtcccttgactctcctgctccccgagtcaggtatttcatgctccaccctcttcaaacctccatcccatctccctcatcctcactctcagctctctgaaaataggagcaactagaagataatttccaggaactctcatcaccctctctgcccacctacttgtatctgtgcccgtagcctgcctttgcttctggtctgtggattagcgatcttgctctgaatatgagctccccttaagtttgcactaaattccattgccttttgcacacattgctccagcagtcttcttctctccccccttaaaaatcatcagttttaccctttctattggattgcactcatcagtttatagatctgctgtaatttttccatactaagaaaaatctctccctccatttccctgagtgataatccttcccggatctcagaactcagtcctcagacctcttctcttttctgcctatatttactttcagagtattctcactcaatcttgtggctttaataacttccgtttgctggtgactaacatttttctttagctggacttctttgtttttttttttgagacagggtctcgctctgtcacccaggctggagtgcaggggcacgatctgcagccctgacctcccaggcataagcagttcttccaccccagcctcccttgtagctgagactacaggcatccaccaccacacccggctattttttaaattttttttgtagagacagggtcttaccatgttgcccagtctggtcttgaactcctggcctcaggtgatccacccaccttggcctcccaaagtgctgggattacaggcatgagccactgcacctggcttagctagatttttctcctgaatgctagacttgtttattcacctgactacttcacattctacttgtatttctactgatcctctcatccaccagatatcctcagagtactcttgtttctgtaaacaataaatacatctttcaatttatggctcaggctaaagttttgatgtcatccttcactccccttttttagacaccctcataagaatccatcatcaagtcctattggctctatctttaaaatatccagaatttgatttctgtttaccgtatctgctgctttccctctgctccaaaaacagccccctaactggtctcctgctgtcgtctctttctccctttaagattgattctttacaaagcagccaaagagatccttttaacatgtaagtcagatgatgtcacccctctgctcagaaccttccatgggccgggcacggtggctcacgcctgtcatcccagcactttgggaggccaaggcaggtggatcacctgaggccaggagtttgagaccagcctggccaacatggtgaaaccccatctctactaaaaatacaaaaatttgttgggcatggtggcacatgcctgaaattctacctacttgggaggctgaggcatgagaattgcttgaacttgggaggcgggggttgcagtgagctgagatcctgcctctgcactccagcctgggcaacagagcaaaactctgtctcaaaaacaaaacgaaaaaaagaaccttccatggcttcacatcaggataaaagccagcgtccttccgtggcctactgtgcctgtccagggtggctctgtcttgtctctctgagtcgcacttctcttttctcactggggttcattgaagccagccctgacttccctgtgacgtgctctgtatgcctttgcctctagtccaagctcttctcccagcaagatgcatagttggctccctcaccttctttggatctgtgcttaaatactacttttaaaataaggtttaaataatatcttatgtacaaaatctttctctaagcatgtaaagacattctccttatattttcttccaaagccttgcaattttgtcttccatgtaattcctaaatccacctggagttactttttgggtagtgtaagtaaggatccaattcagtttttttctttttagattaacagttgttacagcacctcttcgagcacagtccatcttccccaggtctttaatgctattgatagatgccatttaccaagttaccatgtatacacagttctgctcttgggctgtcttttccagtggttgactttctgcctctgtgctaatttcaccttttcttagcttctctttcattttcttctcttttcatgttttcttagagacaaggtctcgctgtgtcacccaggcctgagtgcagtgttgtgatcatagctcaccatagccttgaactcctgggttcaagcagtccttctgcatcaggctcccaagtagctgggactacgaggcacagaccatcaagcccagctaattaaaacaagtttttttgttttttttttttttgtagagatagggtcttgctatgttaggcaggtcttgaactctcctggcttctgcctctcaaagcactggaattataggcatatgaaccactgcgcctggccgccttagttcctttcatttagcacagtgcgtttgttctgatgaaagatgaattttcaatgtgatgaggacagtgggaaagaggaagtgtgtggtttttggggagtggggagaggactggtatgtttggagccctttaaagcaggggttgccagaccatggccagatctggcctactacctgttttttttatgacccatgagttaagaatggttttttacgtttctaaatggttggggagatgataaagtttcatgacacatgaaaattatatgaatttaaattttagtttccacaaacagtttcattagagcccagccatgttcacttgtttaggtgtttcctgtggctgcgtttgtgcactgggggagttgagagtgtgacagaggctgtttggccatcagagctggaaatattcactctctgaccctttacagaaaaagtttgtgaccctgcaaaatggattggtctgggttgtcaggacggcttcggaatcctggatgtgacagaagaggagagaagagtgtgaaaagaagttttgagttctgcgcagatttcaaaattttaccctaggctgtttgtggcaggagatacagatgtttttattttctgtttttgttcaatcctgcccagtcaaatcagcaagattatggttttagataacaaccagtgattgttgttttaatctgtgaacttgtgtggattttaatagtttttctcactggcagttgttaaactactctaaaccacatatgccagtttttaagtaaatctaaggtattagaataaatcttttaacaagtatgaaggtcttagttgtagcattacaatgactagcatgtagcttttttttttttttcagtaggaggtcccacctgatgattgaactgtaaaatgtgtgtgcatacagtatattagacctatctaacctgttacatataatcacaggtagttttctttaattttactcaaacagaacttgccaagattaaaccctacagatctgttcaaacttgagggaaatgaaattctaccttttgtataattcaaaggatttttttggttctgtaatgtaacatttcatttatacattgtcttcagggtatgcattcctttgtaataggaatgtctaacggttgaattttaattgtccttgtaagtactttccgccttctgtgaatgaagtagctaagctttttaaagtcgctgtacattttttgttagtttggttaaagcagaaatgacagcagttattattaataacttttgtaatattggagtgattgatctttactatttcattgtcgttaatcattacacatatttagctgcattgtcttgacagtgaacgtagattttgcagacaagagtatactaggactattctggatctgtaatgccaaatagttttctttcaaggctgtagagaaggtaaagatgtatagaagagttaaatgctttcatagtatttactgttactgaataaaagcttctttgtcctcatctgatgaaagttgttgacatattatattgtataaaaatatggtgaatagaagctatagatatttattatatgactctagaggaagagttttactgacaccatttataaaaggaaacacatctaaaacatgttctttgctcttaagaaatttaaaatacagttaattgggttataactcctcccagaccctcaagcttatccactgtatcatttaatgggaaaggagaaattcgatgtttgcttaacagcagtcataaaatatctatatgatattcacatcttaaaatctgacacgtttttaagtttctgagtagagattatatggatttcttaatgggaaagggagggttgagctgatgcctcactttcccctttctgttgctgactcaaagggtactgatttcactgcctatgtcaggcttgattcctggctctgagcacaagctctgtaagtgcttggattacatagcaaggctgtgatgcagtcaggggccacttttgagtgtgcaaacagtctcatcactgtttaaaacttgaacaaattcaattaatgggtgccaattctgggccctagagatacagaaaagaataagatagtctccatttttcaaggacttaacagtctagccggggagataggttatataaatcttatctgatgtggacaagttattccagtcttatgaacagatctccagggcttcatagagggagtctgtttgtctggaaaagtggaggagtttctccaggtctgagtttcccaaaggtttgaaaggagatgcaggccaggcgcagtggctcacgcatgtaatcccaacactctgggaggccgaggcgggcagatcacgaggtcaggagaccgagaccagcctgaccaaaatggtgaaaccctgtctctactaaaatacaaaaaaattagccgggcgtggtggcatgcacctgtagtcccagctactcaggaggctgaggcagaagaatcacttgaacccaggaggtggaggttgcagtgagctgagatcacgctactgcactccagcctgggcaacagagcaagactccatctcaaaaaaaaaaaaaaaaaggagatgtaagtttctcccaggcagaggattgggagatttggagaggactttcttctggtggtgagatatgtttgagcaaagacagaagattggcgaaatcgggggttttcaggaatccatggtttacaacctggggagagcatatgacagtgatcacagctccacattattttttctttatactgcaaacgcgaattattgtgtgccaaatagatgctgtcatgattactctttagtcgctattaatagttatttggatttcaggaatgttttggttggccttagctcagttaaatgcttttcatttggttaaaattattataagggcatggtgcatatataacaaattaccatgtagcattgggaattattcacaacatagttcatgaacttagtatttattctatggtcgggaaatcatttttcccattttctttaagaatattgcttttcttctgtcttgtttagtctgtaccatagtttgattccaaagcttttgctgtgctagataccaattttgagtaaaacagatgttacgattgcaaggaatgacttcagggaagaccattcacgggggaaaggtggttcccatataagaggcagacggcaaaggatcaggtgaaagaaataattctcgctgctttcttacagctgtaaatacacattcttagtcatctcagtaggaaaagagaggcgttattgaagcttattcaagttgcagagctctacttttacttgactatagcattaaataataaatggcttcaaaacttcatgcagatggggcaaatagaggtgattagttttgttctttgtcctagaaattgtgatcagccttagcattcttcatagtgttttaaactcctggttattttcttagctgatgagtgtctacaatatatttggtactccttaaagctaccttaagaatgttagtgaatcggccaggtgcagtggctcacacctgtaatcccagcactttgggaggccgaggtaggcagatcacgagatcgggagttcgagaccagcctggctaatggtgaaaccctgtctctactaaaaatacaaaaattagccgggcgtggtggcgtgtgcctgtagtcccagctactcgggaggctgaggcagaagaattgcttgaacccaggaggcagaggttgcagtgagccaagattgcaccactgcaactccagcctgggcgacagagcaaaactccgtctcaaaaaaaagagtgttagtgagtattcttccattcttcttacggcaatgctgtcactaaaaaatggcttatgtacttgtttcatacagtttattgaggcaagattagtgctgtacccttgaattttcatttcttaatttggtcactcagttgccgagacactgagtcaaagtttcattatttacactcagggctgactgggggagacatagacaaattattttatgtgcagtttcccagtttttaattaatttatactctgcctctttcaaaaccaagtttgagataccttaaaaaataaatacgagaaaaagataaggggggaaattaggggtagtggaaaagccagatagaaaaagtaaggattcatgttgtttgggtcataaatttgactccagacttaagaaaggccccgacagagagaaaacataataaataatgtgagttctattgtctgttcgtaagataaaaacacacatcacttggtgtataagaagccatggtactgaagttcaaggaaagacgtgtttcctctgcccccggaaaaggggcttccataggtgtcttctgcggcaactgagcagctctgtaacctgggcagctcagtgtccagagttctgaatgaacatgtggctccctgctggtctggctcaatccaagggtgaaaggtagggcactgtgaatctacagcgagagcagaaggagaaaattcatatggtctgaatcatttggcatttatagaatctcttaaattgtccaatgtggcaactttccttctaacgttaaaagagatttgctgtttctttaggggatttatggaatgaggaagttggcttgcatttaggtgcaatgttgcacaaaaaattcttatctttagagctctggaatgatagccagtgcaggcagtactcctggcatgagaggcacgcagagactgagatgcccagagggtacaaccacaggttcatctttctccctgggcatacattcttggtggaagaacaggcacactttacattctccccctctcctttctctcccatctatgtagttgactgtagaagtttggtgtgtgtgttgtcagcctcactgtgtctacagagtagatagtatccttgtcctacaggaatattgtttcttataactgaacttagctacatattgggtgacagaggaccagaatatattctctgtctagaacattaaataaagatactctgttctgattcagggtagatccataagcatgagcagtcactggaactgggatttgggttgtcatgggtagtggaagtgctcaggccagagtgcttcacttggccttgtgtctctgccagttactggctgagtgatttgtgcaagttacttaccatctctacttcacttaccttatctgtaaatggagaggacagtgttggcctcataaggctgttgcagagactgagataatacatgagaagtgacaagaacagtgtctggtgcatagtaagtgctcaatatgtgtagatcttttatttggtgttgtaaattaaggagctaaagcagataaacgtagcgtacctccccacaatagtagataaaagcagttttctgaataggacatttggaaatcataatcttttttttctgattcgtgataattttatcctttttcagagaaacagcacccaggactatcttccaaagagttctggatatcctaaagaaatcttctcatgctgttgagcttgcctgcagagatccatcccaagtggaaaacctggcttccagtctgcagttaataacagaatgcttcaggtgtcttcgcaatgcttgcatagagtgttctgtgaaccagaattcaatcaggtagttacacacgtaccttggattctgtttctttgtatatgtgcatgctggttctgtcatttggtttatctgttagaagttgttttgggctgggtaaggtggctcatgcctgtaatcccagcattttgggaggctgaggcaggaggattgcttgagtccaggagttcaagaccggcctgggcaacatggtgagaccctgtctctacaaaaaaaatacaaaaaattagctggacatggtggcgcacacctgtagtcccaactgctcaggagactgaggtgggaggattgcttgggccagggagaggcagaggttgcagtaatctgagatgatgccattgctgcaggctgggccacattgtgagaccctgtctcagggaaaaaaaaaaaaaaaaagttgttctggcatgatagtatcacccactgttattgcaggattgccctttacatctgctgggagaggccctctacaggccttgccattggagtctctctgactagtgtataaaataatggagtgtgtttaacattaggggttagatttcttgtttgtttttatcacatgttttgaggtatttggttcttcatagtgttttgaagctgattttgagtctttgttcctagattttacctgcctaagtttatatgcagttcttgacctcaggttgtaaatgttttaattacttttaatgttttaatttgttactcttgtgtttggacaagaagcatattttgtaaatttacaagatgacctgtctttcctaaagatcatgtaaagttccaagctctgcttccacctattttatgatgcgcacatttttaaaagtagttaaaacatgagcaggcgagctgtccagtgctcttctttgcttttacgtgttaccgtctcctcccagaacacagcatctttcttctttgattttgtggaacctgctttttattaaaaatttttacttgaagtcagaagccacaaacaggatgctcactttccttcctggacttggatgtagacagagcctccaggcttccctgtcaccactgtgacgggtaagcttgggctggtccagaagccacttgagggactcccttcggttagacacatatacccgaggctttgatatgattaatgagatttttaagatcaaaggagagagggtaaaaagtgagtcgtgtaacttcaatactaaaccaaacctgccatccatttgaggataaatggatagaaacaacaataatcttgataataatagtctacattctaaaacataactagttatatgctagaagcatctggccagaaggctagtttcttttgtccttttccagtcacaaggtgctctagtgtgatggggaaggaaaggagagccgtagaactaacttttgactgtggctggcagatacacctttgtgcttggctaatcttggtggggaagggagtgagcattcgttgagcctgccttcggcattgggctttgtcccaagggttttgcttgtagtatcttctttaattcttagaacaaactcaagaaattttttcatttttacaaaagatgaaactgtaacttggagaggttaaataacttgtctgagagtcacttgttaagtgagagaggctgggaacattctctccatatccagacatctgactctaaagcttaagcttaacaagcagtctgcccttactgttctgagcttaagctcaaaagcagtctgggccaggcgcggtggctcacgcctgtaatcccaacactttgggaggccgaggcgggtgaatcatgaggtcaggagttcgagaccagcctggccagcatggtgaaaccctgtctctactaaaaataaaaaattagctgggtgtggtggcacacacctgtagtcccagctactctggaggctgaggcaggagaatcacttgaacggggaaagcggaggttgcagtgagccaagattgggctactgcacttcagcctgggcaacagagtgagactccgtctcaaaaaaaaaaatgcagtctacccttgctgtcctgagccttacacactggtcttgttgtggatgactgctccatcttgaccctggacaggtgacttggtcttcctgagtatcagttttgtcctctgtaaaactaggtaagcaatgtcttccaaacaggctggttatggggtgtaaatgagattacttatgtaaatgcctaatgcacattgtgtgctcagtaaacattaaatgtttctgcctctgcctcaggaatgaatgtacaacacaagtttatgttaatactttctttcaaagcagtcaatttttattttcttttttgagtaatatatgcaaactataaaaattctaacattacaaaaataaatactatgacaagtaagttatcggtggtcttttggtagggccagcaaagcaagggctgtgctgtttgtgatatctttttattgcatgcaacttatggttgggcggaaatgaaaatgaacatttaagggtgttaatttttctgcctcttcccttctaggattgtattattattcactgttgatttttaaaggaaaatttcaaccatttagggcagcaattttcagaaaagaattttctagttagaaatactacaaagattctagtaaagactttgtggccaagcttaactaaggccagtatttctgagccagtcaagattcagattgcaactagtacatatttttctgatgttttactttaagtcgttaaagagttcatcaaaaggtgtgatgctattaaagcctagatctttttacatcttttgcactttgtgtggactgggactgtttttgccaagaatgcatggaatggggtaaaatacaataaagcaaagaatctgagtcatgggaaacttcaggaagtactcaaagaaagctgttggaagcagttagctctgcatgtaaatataacctctactgctagggttgctatatttttcctgtaaagagccagataataaataatttaggctttgtaatctctgtcagatttctcagctctcccattgtagtgcaaaaacagccatagacaatatatgaatgaatgaacatgtctaattttgtcttttttaaaaaacccaggaacttggatacgattggtgttgctgttgatttgattcttctgtttcgtgaactgcgagtggaacaggaatctctgttgacaggtagcatgcaatataattcatggattatttatatctttataaagggttcaaaaccagtactttgagtattaacatcattcattgaaacacatgttctgtatttcatgagatagggaaactttaatagtgaattattaaagaattataaagttgtatcaacttcccttcctgaatggctgaattttgttcctttcacatttgtatgttgaagtctgtctgttccagttgctataacaaaatgccttaggctgggtagtttataaacaacagaaatgtattgcttacagttctggaggctggaaagtccaagattaaggtaccagcagattgggtgttttgcgggggctgctctcgtcttcatagatggtgcctcttgctttgttctcctgtggtggaaggtggaaggcagaaggcataaacaagctctctgggccccttttataagggcactaatcccattcacgagggctgcaccatcatgacctagtcacttcccaaaggccccatcttatactagcaagttggggattagatttcagcataggaatttcggaggggcacagatattcagatcatagcatggtcctaacccccaatacccagaatgtgactgaatttggagataggatctttaaagaggtaattaaggtaaaatgagggtatatgactggtatccttataggaagaggaaattaggacatggccatgctcagagtagagaccatgtgaagacacagggagaagatgaccatctacaggccaaggagcgagacctcagaagaaatcagccctctcgacaccttgatcttggacctccagccaccagaactgtgtaaaaataaatgtctgttgtttaagccattcagtctgtggtaagacttttaatatttatgaatgtgacaggccctggtccaggttttgggtgtgattcaaacagtgaccaaaacagacaaaaagtgtctgtccttagagaactcacattccgttgaggggaaccacatgttaagtgtctaagtcaagtatctagtgtgatgaaaatggaacttagctctgattgttaacggttgttgacttgggattaagagaaacaccacacttctttagactcattagtagaatggttttggtctttgttcttctagcatcaacatctttcctttggacagtggttattatcttaacataatgtttaaaaaaaaaacgtagatttttaatttatgatctctttgtgccaggaattgaaatactttatgggtaaacctaaattatttgataaaaaaatcttaatgtaggctgggtgccgtggctcatgcctgtaattctagcacttggagaggccaaggtggacagattgcttgagctcaggtgtttgagaccagcctgggtaacatggtgaaaccccgtttccaaaaaaatacaaaggctgggtgcagtggctcaagcctgtaatcccagcactttgggaggctgaggcgggcggatcatttgaggtcaggagttcaagaccagcctggccaacatggtgaaaccccctctctactaaaaatacaaaaattagctgggtgtgatggcgcatgcttgtgatcccagctactcaggaggctgaggcaggagagttgattgaacctaggagatggaggttgtagtgagccgagatcgtgccattgcactccagcctgggtgacaagagtgaaattctgtctcgaaaaaaaaaagaaccgggcatggtggcacacgcctgtagtcgcagctacttggaggctgaggtaggaagattgcttgagcctgggaggtggaagttgcagtgagctgagatcacgccgctgcactccagcctgggtgacagagcaagactctgtctcaaaaaaaaaaaaaaaaaaaaaaaaaacaaaaccccagaaaattttaatgtaaatttccaggtggataagttagatgtactaaattataggttaaattttgttgttgttggctgggcgcagtggctcacgcctgtaatcccagcactttgggaggctgaagtgggcggatcacgaggtcaggagatctacctggctaacacggtgaaaccccgtctctagtaaaaatacaaaaaattagccgggcatggtggtgggcacctgtagtcccagctactggggaggctgaggcaggagaatggcatgcacccaggaggcagagcttgcagtgagccgagattgccgccactgaactccagcctgggcgacagagcgagactccacctcaaaaaaaaaaaaaaaaattgtcattgtaataacgtctttaccttataattcaatgaatataacctttaaatgagaagtctccagttgcatttaaaatattatttgacttacaaattgttttatatacagttttaatgcctgtactttgcatataacatgaggcatatttctttttttttttttgagatggagtcttactctgtcgcccaggctggagtgcagtggtgcgatattggctcgctgcaaccaccgccttcccgccgggttcaagcgattctcctgcctcagcctcccgagtagctgggattacaggcgcctgccgccgcactcggctgattttttgtatttttttattagagatggggtttcaccttggccaggcaggtcttgaactcctgacctcataatctacccacctcggcctctcaaagtgctgggattacaggcatgaaccaccgcacctggccacgtgaggcatatttctattgatgttaatatgtgtgcttctcttggtagatagacaagaactagaggtgatggtcttttttcacaggtgaaataggctaaattagcgtgttagagcactgcctggtttggtttaatttctgtgatttcctagtgttttcattttaaactcagtttgctagaaattcttggatcttgctatttgattttgaagtattcctttaggaaatggtaattaaaaattaattacttcctttaagaatttacagacaaagtgcatcaccatgtttttttgagcatcagtttttaaaataatctcaagaaattgaaaggatgtaggatttagttgtgaaatgtttttacgatattatatatttaaagatacttctgtagctctattttataataaaagggaagcatcagtactcaaaattggggaattataaattagcagtaaagtccgtgtttcacagtgtcacttggaagggcagctattttgaggtctctgtgtggtatagtaattgagaaagaaagttgagaatgtactgtgttttataattggtgatcctgatggggcgggcagtgtggcgctccagagctgctgtgctgtggtgggcggaaggaggtttctcttttaatgatatatgctaaataaagaagcaaaggggaagtgctgtacaaatgctgtgattaaataactattagaatggagccagcccctccaccatgtgctggatttcatcgccacttgcccacgcagaagcttttctcctgaaattatccccttgctctcaggcagcctctgtttttttcctctttactccatcattttcatcagcaagtaatatgccctcccatttttcatttaaaaatatcttcttttgactccatgtccccgtcagtccagtatctcgtttttctgctctatcccaaatgtgctacaaaagatgtatttagtttttacaatatatggtaaaagattatttcatccttcacaggattactttccactgaagcaggtagatgacctaagaaaaaatttaacggagcagatatctgaaactacttttatgaaccagtttgtcattgaggagtaaattggttatttggttgttagcttggctattcactcatattcactaggcagagagggcagattcttacagacctgttacatgttagctgtattaaatgttgttcttaatttaggtagttgcatttgtatgagtttaattgttttttattgatgtgagattcacatattgttaactattttaaagtgaacaatcgagtggcatttagtacatccacagtattatgcaactaccatctctacctaattaaaaaaaaaatttttttttttgagacggagtttgctctcgttgcccaggctggagtgcagtggcacaatctcggctcactacagtctccgcctcccaggttcaagcaattctcctgcctcagcctcttgagtagttgggattacaggcacccaccaccacgcctggctaatttttgtatttttagtagagatggagtttcaccacattggccaggctggtctcgaactcctgacttcaggtgaaccacccacctcggcctccgaaagtgctggaattacaggcgtgagccgctgcgtccggcctaaaaatcaccctaaaaggataccgttttcattgagcagctgctctctttccgcctccctgtagcccctggcaaccactacttagcattctgtctctgtagatctacctactctggatacttcatataaatggaatcatagaattaattatgtgacctttggtgtcttactcctttcacttagcataatgtttttatttatttatttatttttttgagacagagtctcgctgtcgcccaggctggagtgcagtggggcgatctcggctcactgcaggctccgccccctggggttcacgccattctcctgcctcagcctcccgcacagctgggactacaggcgcccgccaccacgcccagctaattttttgtatttttagtagagacggggtttcaccgtgttagccaggatggtctcgatctcctgaccttgtgatccgcccgcctcggcctcccaaagtgttgggattacaggcgtgagccaccgctcctggcctttagcataatgtttttaaggttcatccaccttgtagtgtgtatcattacttcgttcctctttatggtggaataatactccgttgttttgatatatcacattttgtttatccattcattgtttgttggacatttaggttgtttccaccttttgtctatcatgagtcatgctgttgtgaacatgctggtacatccaattgtttatctgtttttatttcttttgggtgtatacctaggaatagaattgctgggtcatatggtaactctgcttaccatttgaggagctgtcagacttttccatagcagctgaatcatatgacttttcaccgacaccatacgaatgttcccatttcttgcatccttgctgactctttctttctgtgttgtagtcatcctggtgggtgtgaagtgggggtacttcattgtggttttgatttgcatttcctaaatgatcacgtacttattggccgtttgtaaatcttctttggagaaatgtctatttgagtcctttgtccagttttcaattgggctgtttgtgtctatttcttgtagagttgtaaaggttttctatacattgtagatacttgggataatattgaatctatagatcaattggggaagaattgccatcttaacactattgagttttcaagttcatgaatatggaacatctctctatttattcaggacttatttaatttttcagttgtgttcctatttagtagatagcttgtgtttcgccacagatgttattggaaggatattattgaggcaggaaggaaaatggaaaggaagtaatatttctcatcaccttgaaaacggcagctagtgaaatgaccgaattttagttggaattcagcaatgaaatttggattcaacagtgaaacttagaaaaaattttatggtgtgttagttcaaacctaatacaaataatcttttaaaaagtattctggttcctaacaaagcgcctgtacttttttgactctttctctgtgagaactttattctaggtagattttttagcagggtatgtgtgccagttttttgttaccacacttgaggtaagaactgtaattacattgtcaaaataatatttagagtattattttcagggaataattgcagtggtatgacgaatatattatgcccatcaaattttatgtaaacacaagcatgagttattttaattgagttattggtgttgtttttggcctttattctttcttactctgtaaaaataatgttgggatttttgagggtcttcataacatttgcagtatttacataaagatcagttgataagctgtttggtaaagtaaactgtcatttgtacctgtctggagttttcttttcttgtgtctgggacatctttaagccttttccttttcagaattgtgttctgatcctgagcattaatcttatgtgcctgatgagttgttggatcagttggttttcagatcaacctatactgttggctttttgcatgttcagttttatacagatctgagtgttaatattctaaaatattcagtagaaatctttttttttttctttttctttcctttttttttttttttttttgagacagggtctgggtctgtctccccggctggatgcagtggcttaatcttggctcactggaacctccacctcctgggttcaagcaattctccctgcctcagcctcctaagtagctgggattacagacgccttccaccacgcctggctaatttttgtgttttcagtagtgacggggtttcatcacgttggccaggctggtctcgaactcctgacctcaggtgatccgcacccccctcgtcttcccagagtgctgggattacgggtgtgagccactgcacccaggcaataagttaattaattttgtatgtagagtatattgttttggtaaggcatattaatttttttttttttttttgagacagagtctcactctgtctcccaggctggagtgcagtggcgtgatcttggcccactgcaacctctgcctcccaggttcaagcaattctcatgccccagcctcccaagtaattttttttacttttagtagagatggggttttgacatattggccaggctggtcttgaactcctggcctcaagtgatccacccgccttggcctcccaaagtgctgggattacaggcgtgagccgccgctcccagccatggcatattcatgttattcccaaagtgaacttgtggagacagactttaatttttaaaagaagcaagcagaaactttctgtttaataacatggagaatatttcttaagatgcatttatttattgtgtttaatcatttatttatttatttataacttttatatattcttagcttttcgctgtggcctgcagtttttaggcaacattgcctcacggaatgaagattcccagtctattgtttgggtgcatgctttcccagaactgtttttgtgagtatattgataagcatttttctaacttgtgagaagattgtggctatatttttccattttatataaagttcgaaaacaggaaaaagtaacccactgtaatagagttcaggatagtagttgttcttggtgggtgggtaccagctgggagagggcactagggaaacacctgggtcctggaagtgttcgtctatatcttgaccttggtggtggttacatggatgtatacatatccaaactttgttcattgagctgtatgtacacttaagatttatgcccttgattgtatatcagtttacttttacaaaaataaagtcatggataaagtaagtaatattgttaaggacactgaaatttataagaaacacaattaaaatagagcatcaaagtatgggcaatgaattaaaattgtttatgtattgaatactgatatgctgagcacaatgctgtatgttttggaagataagaagaagatgtggataaacaatcagtttatccatgtaagaagtgagtaaccagtccatttatcagtgtaagatgtgggtaaccattccatttgtctcgattggatcctggtactttttctggtgattctacttcttaaaaaccagctctgttcataagaaattgagcattgaggtaaaaggtgagcagggaatagagtcagtatacctagtaggaaaggcacagtctgggagtgggagacctggctttgaatctaggctttggtgccaatgaatggggtgactttgatggttgcaacagtataagcagcacagcagggtagcagctgttgtgtacataccctgaactgggcattatccgtatattttttctgttctcacaatagcctgcagagtaagtgttactgtctccccatttggacagatgagagacctgaagctcatcactggtaaatggcagaggtagagtgtaaacccattgctgccatctggatctaaagcctatctatgctcattgtaaatactgtgctgcttaaattccgtaatgcccttccttgttgtacagctttcctgggctcctctgtgaagtatagcgttaagatgggataaactctaattcacctgtagctcatggaatttctcaaattcctgcaaataattaagagttgaaggtgtatatatattaatgttacatatattaatgatatttgagcttaggtggaagaagagaattacgaaattcaagctacagaaataggcattgcttatttttgagaattcattcccttaaaacgttttggatacctaatatctgccaggttttgggatagatgattagaatgtggtggtaacttatatattcgttattcctgaaggatttcattctttggttggggaagtaaaggaacaggcacataggttgtgatgtaagaactaaggtaattagggcaaatccagggtgtaatagaaaaacaagggagaggcttaagtgtaggtcagtcagagaagtcttaacagtttacatgttgcttttagatgatctcatttgatcgtcattaaaaaccctgtgaaatagaggttttgttattgtattttattttttataccagaaaacatattaagagaggttctttgccttcactttttatgcatttatgggacagatataaccaaatttgaattccagttttgtcaggtgctggctttgtgctattggccaagtgaagctaacaaattctttatctgaaatagatgaataatacctccttcagaagagtattatgaagtttaaatgaaaaaaaatcctgccatattgcataacccatgatataattgacaatcaatatgtcagtgaccttccccaggtcacctggctgatagctagaggagctaggagttatagcgaggctcctgactccaaattctatttcttgccccactataccatctctcctgtaggcatcttgtccctaaggactattaaagcagtgccagcagtcattgaggtatcattttgtacctgtcgattttttctttctaacaagaatgaacattttaatgttttataaatgtaatcattctaatctttttctctaatggtaagttatttgccttttgccttctgagttctatgtcaacttcaactttaatattttggatactttttattgtgactaagtttatatttactatttttacagtaaataatctacttattttaaagtgctataattctaaatcctcaaaagtattagcatgtagtgaatttgacaatggtattactgttatttttgtgttttatcatgttactaaattgggctaacaatctcatttccttgtttggaaggtcttgcttaaatcatccggacaaaaaaattgttgcctactcttcaatgattttgtttacatcccttaatcatgaaagaatgaaagaactggaggagaacctcaatattgcaattgatgtcatagatgcttaccaaaaacatcctgaatcagaatggccgtaagtatcttgttagaaatttgattgctttggggcatcctgacagatcactttccttgcagaggttttaagtaaaaatttggacattgtgataattgaacgataagttaaaacttaacatgtgttgacagaattagagaagattttgagcagaatctagagaacttgtgaatgaggtgaataaagtgaggcttgaattgagcctttaaggacaaagagaattctttaaggtggtgaggagcgggaaagacattcttggtgtatgaaaaaacagtgtgaaatgcccaggcacctttggagtgcacagataagactgttgtggctgcagtagctagttcattagatcagaggttggtgcgagccttgtaagcatctgtgcagatgagatagagactgccattcaaattgccccccgatacataatgtactgccacccttcatacataatgtgttatttctctgtgattgcttttaagatttttctttgtcttttcagaggttaattatggtattggcatagatttctttgggtttactctttttggggtttcctcaacttcttgaatcagtagatttatgtcttttgccaaattggggaagttaatttggaaaattttcgctgttatttgtttgaatactttttttcaggcccttgttctctctccacttcttctgggactccatgttttaggcgcacacacagtccaaggcagggccaaggctgtggctcaactgatgggactgtgaaaataatacaagttacaacaatctacttttaggtttagacagtttgttacttatatagacagagaaaagaagaagccaaaggggccagctcctcctgatccttgtcccagacaccacaaagacctggatgattaggatatgaattgtgaggtatcccactcctgaggaggccttcttgactgtttaaagaggcattatatgctaagaggggcaaggcagaaagctctgtacctcattagcaccaaactcattagaacctgtcccatgacagcctcccctaggagacagaagagcaaaaaggatacagcctcagaagcctcaggcccctcccatctcgggttccaggaggatcacaagctattcagcaggcaagactcagattagccgctgttcaagctctggcatgcatggtatatatggatacatccaaggtcaccagggcactatgtggagctgttcccctagactctgaagatacaagtgttagtcttctgttgttgttttgtaagtgcctgaggctctgttcagtgctttttttttttttttccagtccattttctctctttgccagtactacagtgtcttgattaccgtaattttatagtaaattttgaaatcaggaagtgtgagttttccaactttgttctttttcagttttgttgtcctgggtcccttctgtttccatattaattttaggatcaacttttcaatttgttaaaaaaaaaaaacagctggaattttgataagaattacatgaatctgtagaccaccttgggggaatattgccatcttacctagattaagtgttccaatccatgaatagaggatattcatttatttatttaggccttttaaattttcgtcagttatgttttgtagtttttagtctatgagttttgggtgtcgttagttcagtttattctaagtattttattctttttgatggtattgcaaatggaagtctttcatttttggattgttcattgctaatgtgtagaaatacaactgatttttgtatattaatcttatatcctgcaatctttcttcctgaacttatttatagttttagtagatttttttgtgtacgtgattcttaggattttttctgtacaggaccgtgccatctgcaagtaggtaatatttttttctttccagttgggttgccttttctttcttttccttgcctagttgccctgactggaaattccaatacaatgttgagtagaattggtgagagcagacatatgtttcttatttaagatcttagtggggcagtctttcagtgtgctgttgcctgtggggttttctaagaagcccttgctcaggatgataaacttttcttctacttctactgattttcttttacttgttgaatgtttttattatgaaagtctattttatcaaatatattttgtgtctgttgagatagtcatatggctttgtcttttagtctattaatactttgtctaacagtgatttttatactttaaatcaactttggattcctgagataaatcctacttgttcatagtgtataatcctttttatatgttgctggattcggttcatattttgttggggatttttgaatctatattcataaggcatattggtttgtagcttttttttctttttgtgatttctttttctggttttggtatcaggtaaatactgactttacagaatgaggtcttgttttgttttgtttttggaagactgtaaaggatcggtattcatctttaaatatgtggtagaattcactggtgaagccatctggtcttgggctttttatcatgggaagggttttggttactaattcaaacctgttacttgttacaggtcttggtttttttttttgagacggagtctcactctgttgcccaggctggagtgcagtggtgcgatctcggctcactgcaacctccgcctcttgggttcaagcaattctctgcctcagtctcctgaatagctgggattgcaggtgcccgccaccacacccggctaattttttttgtatttttagtagagacggggtttcaccatcttggccaggttggtattgaactcctaatctcatgagccacctgcctcagcctcccaaagtgctgggattacaggcgtgagccaccgcgcccggcctccacttgttacgggtctattcagattgttgtcttcttgggttggttttggtagtttgtgtctttctaggaatttgcctgtttggtctaggccgggggtcctccagcccccgacctgtggactggtacctgtccatggcctgttaggaacaggaccacatagcacaagataagcagcaggcaagcaagcattcctgcctgagcgccacttcttgtcagatcatcagccacattcgattctcttaggagcacaaaccctgttgtgaactgcgcatgcgagggatctaggtctcacactccttatgagaatctattacaactaatgcctgttgatctgaggtagaacagtttcttcctgaaaccgtccccccacccctgtctatggaaaaattgtctttcatgaaaccagtccctggtgccaaaaaggttggggaccactggtctaggctgtctaatttgttggcacaaattgttaatagacccttagaatttttttatttttgtaagattggtaggaatgtcccctcttcattcctgattttagtaatttgagtcttctcttttttcttgttcactatagctaaaggtttgttagagtttttgctcttttcggagaaccaacttttggttttgttgattttctttacagttattctctatttcatttctttttgctgtaatctttattatattctttcttctgcgtgctttgggtttggtttgctcttctttttctagtttctcaagatggaaggttaggttactgatatgagatcttctgtcttttttacataggcatttacatctacaaatttcctggtaggaactactttagcatcccataatttaggattctgtaaattttggtgtttgtgcttttactttcatttatttcaaattatagtccaatttcctttgtgacctattggttatttgggagtttgttgtttaatttccacatatttgtttctaattttattccatgtggccagagaacccactttatatgatttcattctttttgacattacctaggcttcttttatggcctgacatgtggtctgtcatagagaatgttccatgtacacttgaatagaatgtgtatgctgctggttttggtggcatgttctgtagatatctattaggtctggttggctagatggttgatagtgttgtttaaatcttctgttttcttgctgatcttctgttctagttcttttcattattgaaagtgaattattgtgcattttttccttcagttctgtcagtttttgcttcccttattttcatgctctgttaagtacacacacacatgtttatatttattattgttataccttcttgatgcattgaccctttctcattataaaatttatcacaaattttgttgtttatgttttaacaatatcctgttttttaaaaaatctatttttccatatcttttgcacatagtagtcagtgtgtgattaggccacagattttctccagggagtaagccttgagcacctgtaatcccacttgcattcacaggtgaggtatgagctttttcaattttggcttcttgcagtgtaatcttttatcattctattgaaattatacctaattttgaaattatttctttttctgaatattcatttgtatttcaattaagatttacaaacaaacagaagttggtacatacaataatatgatgtgtttaacttagaaaacttccctttgtatgcaaatgtaacatgacaggatcaatcattagagtcaacttacttagagaaattttctgtagctgagttctgttttatttgttgagtaccttgggtctgtattttaatcatctgcagtttttttttagcagcttggaataaagggcaaaaggtcataaagggcaaaatataaaatctgtttaatataatataatatgatataatataatataatatataaatagctcaagttaaaggtattagagaccactagaaggaattcagaaaggaacaaaggatggatctagtagtggttaaatgatcacttctgcagtccaggtgcggaatactttgatttatgtgagaggaactctacatttggtaacaaacaatgagatcacagaatatccagaggcttctgacgaaattgttgtttttgctgttaaatataaactcatccctggaaattggagaaaacccactttctgccttttttcttccctacattttaggagataggtggcaaataatacaaaactacatggtcttagaattcatggtttcattatgttttcttttcttcctttgcttgtttcttagaaaagggcaaatgtgattccaataactttgggtttttttatttgagtatactagagacacaggaaagtgtaggcgagaaagtctttggcactacttggtttgaattattgggataatgtctttctaaaaatgtctgttcttttgtttgtaggtgtgaaagatgttttcatgctcttagataaccctagatgaatccagggattctattttgagttcatctaaatctgaaagtccagtaaatgtgcactggtaggttaggtcagtcagtgcagaattacacagtagaggaagaggtaggactgcctcgtgctgatcctgtgatgtgttggttgctttgtctgtgtaatctcattttcacattgctgccatcctgtgaattgtattttgctactatgtacctatgaaagttaagcagagtaaaccagtctgacaaaggtcacacaactagcatatagcagaggcagcattgcaagtgatgccaaactcgagggcctatcccatttttattaataccatgtcatgtgttatgaaaattaccgattttcagagaggaggtctgcatttcaaaggtgaggcatgaactcttttcagttttagcctcttttggtgtaaactttttctttttgagacagagtctcactctgttgcccaggctggagtgcagtggtgtgatcttgactcactgcaacctctgcctcccgggttcaagtgattctcccatctcagccccctgagtagccaggactacaggcgtgcgccaccacgcctggctaattttttgtatttttggtagagatggggtttcatcatgtcagccagcctggtcttgaactcctgacctcaggtgatctccccgcctgtctcccaaagtgctgggattacaggcatgagccaccgtgcccacctaaacttttattaatccattgaactttttacccagtttcactacaaaaatgaagttataactgggagcaaagcattcttttttgttagtatttgggttatctagttgatttattttgtattctctagggatgtgtcttgccttatgcatgtacattttattatcagcttaagtgtaacaatattaggaagataaacataattgtccatcctcttgcagtctgaatctgttgcccctcttctgttcgcgcacaacagccatgcattccactttcatggcacttagcgcatttaattgtccattagactgtgagctccctgtaaggcaggatttagtgttgtttgttattggatctttaacaagataatatctggcatgtgataagcattattttagtcatgattcttctgaatctaagtgactgaagtccacttcagatggtttatgcacataaagggatttattggcttatgcaactgaaaaattccagggtcattgggtgaaggcacggtgaatccagggctgaaagatgtcatcagtatctgtctcatctttgtctcatttttctcctgtgctggctttgttgtaaggcacatttcctgcttcctgtgttggctcctgttcttgcctactcagggttggcatggcccacggctggtcctcagaccactcttctccattattgctcattctctgggtgacctcatctcataccacagctttaaatacctcttctaaattgatgatttccacatttatgtttctggccttgatctcttgctgaagctctaggtttacatatacagcttcctattatgtgcttctaattggcatctgaaatgtatgaaggctgcgtccaaacttttgatttcccccacacataacacctcctgttactctaccaatgtttatccttcagtaactggtaccaccatttactcgtttgctgaggcctggaacctgagtcctgattttctttcactctcacccacttatactcattagccctatcttcaaaaggtgttccacattcacctacttcatgcctcctctgccatagacatctttcattgctactgccagaactttcttactcatctttctgtctctccttttgccctctgaatcatcacacagtagccagagtgaccttttaaaaattactgtagctgttgtcactccttgcttaaataaaccattcagtgccttcttattgcaacctagaagcaaatccaaagtacttgtcatgtcctggcgtctgactgaccacctcatcttatttcttactacttttactcctgctccttagttccatctggtcttactgtttttctttgaatactccaagtttgttctgtcctgaatctttacatccgctgtctttctgcatggaaccttcctttagatcttcccatggctagctcttttaggtctctgttcaaatatctatcatttcgactgagagaccttcccagcactttatgttcagtagtgtttcctgtaaacccgtatcgctttactctcttttattcatttgtttaatagcacttaccactatcgaacattatacaaatcttatttgctttcttgtttattgttggttgctagaatgtaggactagctccataaggccctggagtttgtcctggtcatcattctatccaaagcacctagaacatgtgttgacaaactatggcccatggtctgaatccggcccactgcttctttttataaataaagttttattggaacacagccaagcttgtttatctattgtctacggctgctttcatgtaacagtggcagagttgagtagttgtgacagagaccatttggcctgcaaagcttaaagtatttcctgtctggccctttatggaaaagtttgccaaccccatccattgaagggtttttggtagtagtatttgttgaataagtctggtgattggtggcatcgttgtccttcagtcacttcaggcttatctgaagcagataagcctggttctcctgaaccagataagactttggtgagagacccccaaagggtctgtatcgttgttctctagaactctatacaggcttcttcattttacatcagcaatctattcctgaaaatcagacattctgtgcaaaaaagtgactgagagcctacttccttcttaaaaatggggacattataaaatgttacatgtctacccaaaaccccagtcagtgtcttaaaatagaatcaaactaaaatactattcagcaataaaaaggaacaagtgttggtacaagccataacttgggaagatctcatggtaattatagcagagtgaaaaaaaaaagccaatgaatccccaaaggttaaataatgtatcattccatttacatgacattcttgaaatgacaaaattacagaaatggagaacggattagtggttgtcggggattgaggaaggatgctggagttataggcgggtgaacctgcaaaaggggtgccgaaccgttctggctctcacctgtgagaggggatctgtgaccctgcattattaagttacagagagctaaagacatgcacacagctactcctgagtaaaggcacaagttaacctgggaaacctgagtaagatccgcacatcgtgtcactgtcagcatctgggttgtcacatactatagttttacagatgttaccattggggaaaactgggtaagggtacacagaatctctcttgtgttttgtaaaactgcgtgtgcatctacaatgatctcaaaataaaaatatttaattaaaaaaaacccaaactcggtaaagcacctgtgtatataacagactatcatgttaggatgtgcactgcttaaaacatttctttctgattgccatagaattagtatagttgtcagcagacagttggctttgtatgcgggaacatggagcctcttaatgccaccattatgccagaagtgcttcttaaatgtctgtacacagttctgactttttaccaacagtgtatggaatgcatcttgtgattttgtgtatacgtgtatatctttttgtgaaatgttgtatggaatactttagaatataaaaaaaagtttcttctgtaaacattgactggcaagggtattgagaagtttgggaattagaaacaaagaggtaataaccagatggatgtttttgaggcatgcaagtggctctttttgggtcacattgtcatccctggggcagtgctgtttgttagggtgtgcagtcaggtgacctcccctgggggcacaggctgtcaggtttgggcccactcttgaaggaaaaagctaccaggtttgggctcattcttgaaggaaaaagaattcttgttatccaaggaaggaaaaaaggggatgctgaacaggggaaaaagtggcagatatccacaaggactgtcagtgtttggcgaatgcatgtccttttcattatctgcttttgcttcaggagggaaacatagtttaatttctttgatttttgttggagttgaattctgatacattattactggaaacaggagaagcagaataccttgatactgaagggtagacagcgtagccagtgtcacactgccagtgagtgttgggctgagactcaaacccagctctttctgagaccaaaatttgtgctcttaatctgtacacccactgcctcccttagaggacgacattaaaggaagggtggctgggatgtgcgtgtgtgtaatacgtttcccccagtgcctggcacatgtagattcaggaaatctatttatatatttttcagattataactcattttcttctagtagaggaagcatcgccattgaatcagtggactgttatttttctagtttaatgctactcacgtttaacccgttggaaatgttatttaactcttttaacaggagaagggaggttattttctagaccagctttgtaagctttgtccaaattgctgtgttaagcaactgtgggttagatttcccagatctcacaacaaaggagagtggcatttattttccatagcacatttaaatcaaaatttgtttatgaggtataaaaacattttctaggtttttgaactgattgaaatctattttactcatgttgtgagtatagcatcgccattgtatgcatgtatggatatggataatagatgaccttcattaaaaaaaaaatttccctgaaaccccccgtctttaggactgtctctgtttactggtgaggagttcgcctttcgctgtctgttggcatgtgctcctcgatgcccacacaggtgacctttactaccttctattttgtatatcagtattgtaatgcagatgctgattcatctgcctgcaactgttcacgtactttaaaatcaatcataaatgagaaagattgagagaaggaaaaagatgagaagagagaccttcatgcattttgttttttggcaagtgtggaaaatgatgtaaagtgtagttagtgctttggcatcaacaatgtgatttgtgaatgttagcttttctgtgatgacatttaaatgatgaatttcaagattaaactgaggagttccttaggcgaacttacagagttctcctatatgaccgttcctcgtccttaaagcctgaggagccaggttcatctgaatggtacttccaccaagatgcagaaatactgtcactctttagcagaatggttattaagtagaacgaagtgtgagcttactttgcctgtatatattgcttacattacatactgaattatttgatagactatatgtggttcagatatcaaaatgcatagtttacccccagccgtttacctagttcttccaaccacaacccctacttctccccacactgttgggctttttgcttttttcactaaatagtacatttctgagatctttccatattcctatataaagactttcctcagttaaagatctttcattgtatgaatataccaggatttatttcatcagtctcttctctatgggcattctgattgtttccgttttttcacgactagaagctactgccatgaatagccttggttgcacatgtcatatcgcatgtggacaagtaatgattgtagaataaattcataagtgcaattctgggtcaaaaggaatgtactgttataattttgacaaacacttcaggttgtccttcatcgctattgtgccagtgtcaactcccctgtcccacatcattgctaacagtgttagcaagatttggatttgccagttctgccaaggtgtaaaccggccttcttgcacagttttatttcgtatttttcttatgagttggagaaccttttttttcttttatgtgtattctaattttctttacctatttttctattggggtattgatctttatcagtgtataggagtattttctagattagggatatcacccatcatataaaataaaatacatgtatttttctgtttttgtattttgactttgttcgtggtattttattttttatttttttgagacagcgtctctgtcactcaggctggagtgcagtggtgcaatcatggctcactgcagcctcaatctcccaggctcaagtaatcttccctcctcagcccactgagaagctgggatcgcaggtgcataccaccgcacctggctgattaattttttattttgtagagatggggtctcactatgttgcccaggctggtcttgaagtcctggccttaagcagtccttccaccttggcctcccaaagtgctgggaatacaggtgtgagccactgtgtccagccatatgatacttttttatgtaaaagtttttgatttttttagtagatgaattaatcagtcttttaaaaaaatgtgttccgtagttttgataatagctataaaggcctttcctctaccaaggctttcttctagtatatcatttcaattttgttgtttaagtatttgatttacttggaatttatgttggtttaaaggttgcagtgtggattcactctcatttttgtttctgatgatgctggtggtcccggcaacagagcactgtcatggctgagacctgtcttcccttctcctccgtccttgccctagtccctatacccttactgctccatccatggacaacttttttacttcaacttttgcttcctaaccacgcattccagcatgcagaactcagtccttcctttacgatgtctcagttctactattttaagtccttgaggattttatgaacatattgatcaaatcacatttattgaacatttgttaggagatttttggtttttcaagaagaaaatttccaaagtgaagcagacccagtctgttgcccactgtttaaaaactgtttatatatattgtctggttttatgttgtttaaggtagggggtaaattgttattccattatgcccagaagcagaagcgatagttggagattttaacacctgcttttcagccatgggcaggactcatagacaaatatcagtatagactgatgttttatacattatataaacatgatgatatggatcaagtttgtccaacctgcaggccgcatgcagcccaggatggctttgaatgctacctaacacaaatttgtgaactttcttataacatgagttgtttttgttatttgctgttgttgttgttgttaagctcattagctattcttagtatattttatctgtgccccaagacaattcttcttccagtgtggcccagggaagccaaaagattggacaccgctgatacagatgatcttggtagtactgtcgtaggtagccaccttcacctgagtgatatttatagaccttcccttagtacttccaaactccactttcttttcacctgcatgtgtcatgttcactaaggtagaccataggctggcctgtacaaaagtttcagtaaatgtgtaagggattgaaatcatagagcacattctcttactcataagatgatttctagaaaaattccaaacttttggaaattaacacatctgattgatttgtcaaaaaagaaatcacaggcaaattagaaaatattttgacctgaagtaccaagttttgtgggataaagcaaaagcagccaagtgtggtggctcatgcctgtaatcccagcactttgggagtctgagaagggaggatagcttgaggccaggagttcaagaccagccagagcaacatagtaagacactgtctctgccaaaaaaataaaaataaaaaaagctgcgtatggtggcacatgcgtgtagttctatctacttgagagactgaggtgggaaaattattcgaacctagaagtttgagggtgcagtgagctatgatcgcacaactgcactccagctaggtgacagagcgagaccccatgtcttaaaaagacaacaaaaacgaaagcggcgcttagaggagagcttattgctttgagtgcttccttttttttttttttttttggagatagagtcttgctctgtcgcccatgctggagtgcatggagtgcagtggcatgatcttggctcactgcaacctctgcctcctgtgttcaagtgattctcatacctctgcctcccgagtagttgggattacaggcatgcaccaccacatccaactattttttttgtgtgtttttggtagcgatggggtttcactatgctgtgttggccaggctggtctcaaactcttgacctcaagtaatccacccacctcagtctcccaagtgctgggattacaaggtgtgagccacggcctggaatgtttctattaataaagaaaggtctgaaatcagtgacccacagttctactttgagaggatagaaaaagaagagcatagtaagtcctgagtaagtaagaaagaaagaaataaaagatgacagaaatcaatgaaacataagacaaaaacaatagaaaaaattcacaaaggcaaaagttgatctttgaccaacaaaattgatcaagaaaaaagaaagagagcactaattaccaacactatgaaagaatgtgtagttatcacatcagtcttcaataaactcaaaccttggttgaggcaactttcttcacctgagacactctgaagacccacgcttttgggtcctgacttccttttgaagccctaatagtattttgttgcttgtagttccccagacacactgctgttctttccttcttgctgtttttctaagtcctttttttcccctcctaatttaaatgctatcttcttttccttcttctagggattggcgaaatacctcctctagcctgtttgatcttcttgccccctgtctgtcacccctcttgcccccagcctattggttagatacatttgtttctattatataatccttaatgtgtatctgtcagcacttaacatgttcttctgtaaattatctgactaaatatgggtctttattgtttggagaatatatttggcaatatggcttgtgacttggaatattgcgtttttgctattcttatgggaaaatgctttaaattctaagtacctgaattatgaatgagctttaagatctcaatttagtttgtgtatccatctgggattgcatagatttctattgacctgcccagattgataggaatactgtttgagaatttcaaatattatccattatttttaggaatattttacatcagagtgttgatcagctattttaaatgctgtagaggaaatagaatatgtatttggatttcgcttttatgtgaagtgacagtgtattgtagtagttaatatgcttcatttggttatcagactgaatatagttttattgtatttttgtattgttaagtgattaaactatgtgtcaatatatttaatgcttgcagtcaatttttattactataacctggttataatcagtatattccttagttcttaagtcttttcctcagatgccctctggtaaatataattcataattaattaataatagtgttgaatctttttagttgtcacaggggtactttgaagaactatgcctataatctttgccttggggtttccataagttgatctcttaagtttagatgagtgcattgcttgacaatgaggatgttttcttggtaacttgagaattcttaaagagtgaataatcaagccagtaatggaagtgtgacaagtctttctctggttcattatagcagttagcttctgactaaaccaatttaatatgttttttgtttatacctgatcttgttgctaaatgaagaatttttctttctcaacttagataacagctatagtagccctgtcttcccgttgaatcaatttaaattatttccataaagctttcagaagtaaaattggagaaaaatatttttaggattttttttccttttagctgctgatagattaatagtatgtgaaccttttaagacatttaagattacagcaaatcaaaaattcactgaaaagaaatgcttttgtgtgtaagtggtgcctataaagtagataagggcatgtctcttttactatgtttcaagtaaccaaactttcctcctcttttttccctaggttcttgattattacagacctctttctgaaaagcccggaattggtacaagccatgtttcccaaactgaacaatcaagaaaggtaaccccccaaccagcgtggtctggagtatttagcattccatatagggtattcgatgcacgtgactgaaaagctgtgtggtttctgagttggcacagaatctctaaatacatgtttctgtgttggtaatggttttaaattggttggttaacattacagcttagccacagtaggcagtgatttatggagggtagcaggatccaggttggtgccattattcagtaaatgcatattaagaaaaacattaagaacaaaatattatgcatatgcctggattttagaatagtaatttatgtaactgtgtattacagttgaatatttgaggtgtactcatttgtttaggtcatgggtgttattatttgtgatacactctgctaggtttgtaggtttctaatggataatttggactaaaataaaattgacgcccgtccacaatgtcacagttactgtagtaggaaaaacagtgacctaggagttctaagacactggccctgtgctttgctgtgattatagttctttatgtgaccttgttgggattcaggttcgtgtgtgtgtgtattttttttttttttcctaaacctctatggtaaggtacaagggattcagtttcttgacctgtaaattaaggagattgaataaataatttgcagtacacttcatttcaatagaatatatttttcctaaccttattagaaatgttgccttaggaaaataacaaaatatattcagaaactacagatctagtgatgaaaatctcttaaagttgttaatcttttgattgtagtcacgagttttagtggttttggactttttactttgtatttaggtttcagtagttaagctttgtgtacttttgtagtcttttattaattaggtcatttttcttctttaatatctcaaacaggaaaagcttatgcttttaaagtcatatgaaataccaggtttataagtccaattccagtgcttctttccctatatgtatacccccattacagatagagaagtatttgtagttttttgacctaaaagagataatacgacatacagtgctaaaaattagtatttttttttttttgcagtaaggaacacctgaatacaggaagaatgcacagtttaattgtattttaatattcaagctgatattttccatagtctatcaaaattatctatttttaaatggtttattacataactacatggtgatggtagactaaaaatgttttatttttattgataaagttgtatcaggtgcatccttacttcattcaaggttctgctcagttgtcacctcctcttgcccctgctttatttttcttctggaggagatgagctgtcatttcatcacatcattcattcatcgtgttgtgtcacatacctgcttgttattgtagcacatttccattagattgttggcaccctgagggcaaggattcatcccttcttattcttcattccacatttccagtcagtggttggcacacagcaggtgctcaaaaagaaaaaaaaatagtttttcagtgaaagcatgagtgaatgaatgaatattcttactcaataaagtgttcctctagtatattgattaatgtaatcttatcttctaagttggaagcctcaaggttatactcagcttctccactttaccttttcagttcatactggtcagtaaaccttatcagttatactatcccaaggtcttatgtatttattctcttttttgtcacagccctagtttaccctatggaatctttgactagattttgacaatagcctttgtcaaaaaattgtggtaaatcacacataatataaagtttactattgtaaccttttttttttttttggaaaaggtataagacagggtcttgctgtgtgttgcccaacctagagtgcagtggctgctctcaagtgtgatcgtagtgcactacagccccaagctcctggcctcaaacaatcctcccacctcagcctccccagttgctgggagtacgggtgtgggtcaccatgccagactaccattgtaaccattttttaatgtacggttcagggggtgtgaaggatgttcacattgctgtgcagtgaacctctggaactttttcatcttgtgtatcagaaactctgtacccattaacaataaactacaatgaggtaccacttgatacccattaggatggctactatcaacaaactgaaaagaggaagtttgggcaaggatatggagaaattggaacccttgtgcactgtttatttcctactggtgggaatgtaaatggtgcatctactgtcttaatctgttttctgctgccataacagagtcctggagagtgggtaatttataaagaaaagaaatttatttctaacagtctgaggctgggaagtccaagaacatggcactggcatttggtgagggctctcttgctgtgttatcccatggtgggaggtgagagggcaagtgagtgcatgtgagcattacagagacacagtccctgcccttactgtgagggtaataaccatgtgttgttatgtacaagaatgacagtgctgtgtaaattcttaagcttttttcttgtgctagttcttttcattgttgtcaaaattagttgacttcttcacccagaggctggtagtctattcatgcagattactcggtggggaaattttggatatagactcatcatcaattcacgtggcatgattcagcaaaaatgagagcctacatttacatacttgtctggtctcctttccaggtgaattggagtgaatattaacaaattggactagctgctcgtggtaaacagcttgtgtagttttcaggtttatgatctctgtgtacggcatagtagttaaggacagatgctagtgctgccgcttactactttggataggttaatgagaataatagtagctaccccatgaaattgttatgataactgattgaaatgtgtataaaactctcagtgcctggcatgtaatggtcacccccgtaaacgtgttgcagggaagaagataattgactttggcatcagaaagagttcaaataccacctcagtacctctgtaacccagggcaaataccttaatctataacctgagctattgctatttctgcttccatgctcttactactattactgcaactacaagtctaacaactactgctactatgctgatgaccttgccgttttctccaggtagcatcaccgttatgtatagaaggcaccatgtagcccttgtcatttaatcctcacagactctgtgaaataggtattattcttgacattttccaaattggagttctgaggcctgtagttccagctactcgggaggctaagccaggagaatcactttaacttgggaggtggaggttgcagtgagccaagattgcttcactgcactccagcctgggcaacagagcgagactctgtcacatgaaaaaacaaaacaaaacaaaacaaaacaggaatcgtaattttaaggcagactatgtaagtactgtatttaatcaggggagaattagaaatagaatgctaatgacagccagtgattgagagacaaaattatggcagcatggctctgtttggagaggtgtgtctggtgaactcagagcagcctgagtgatgatttctgggttaagggagcaagactttcacaccaatgtgtaataattctagacggctgtagcctctaacccctttagctgggtctttcctacttttgcatccttcacaccacagtgaataagtcaatgagtaactagcatttgtcagaccacttgtattcttttatattttcaaggaagagatagagggttgggtggagtgtctggtagggagacccgtataccagactaaagagcttttagactcattccttaacagtgggaaccattagaaggtttaaatggcagatgacttaatgtaagtaggatcatttaatgaaggatagtctattctgaggtgatagtcaaacttagtttgtacttttatattttaaagattcatttctgactttgactgcttctttcctttgaaatcactcagtacccacatcgttagctctctcatcttgtaaccatataataaagctgcattatacaggcggcatctgctgggccagggagaagttgagccagaggaggctggcctgtgtgtcattgtgtaaggaaggcagtgtgtgcttctactccctttagcacttgcagatctccctgcacctcatccgcttggacccccggagtctcctgttgctgctgaacaactttgatttccaccaccttggggcccacccttcctgtcctcacctcaggactgcccatttgggatctgcccctgattcaggatctgcactattgttcgttttttttcttcagttgtaatccatctgttttctttctcatttctccacatccctatctgtggataccttaacactcacaaatctgataaaattattttcttctatttcattacctattcaagaaatagtgaactaggtgccaaattccctgaagccagggatcctgacttcttatacttagcaataactgttacattatgtaatccaatttaaaaggaatatatttagagtacgcatttgggccacgtggaataggtggcctcttagcattccttgaaagtcatatgtgtgtgtgtgtttatatatatatatgtgtgtgtgtgtatatatatatatgtagatagatccacttatgatagagatatatatagataggtatatctatattttatatagacataaaatttcagtagcttttggggtacaagtggttttggtcacatggatgggttgtatagtggtgtggttttggtcacatgggtgggttgtatagtggtgtgatttttggtcacatggatgggttgtatagtggtgtggttttggctacatggatgggttgtatagtggtgtggttttggtcacatggatgggttgtatagtggtgaagtcggcgattttagtgcacctgtcacctgagcagtgtatattatacctgatatgtagtttttattccttaccctcctcctaacttcccgcctgctgagtctccagtgtccattatactactctgtgtgcctttgggtacccatagcttaactcccacttgtaagtgagaacatatggtatttgatttttccatttctgagttcttcacttagaataatggcctccaactgggcatggtggctcacacctgtaatcccagcactttgggaggtggaggaagtcagatcacttgagaccaggagtttgagactagcctggccagcatggagaaaccccgtctctactaaaaatacaaaaattagccaggcgtggtggcgcttgcctgttatcccagctactcggggaggttgaggcatgagaattgcttgaacctgggagacggaggttgcagtgagatcacactactgcactccagcctaggtgatagagtgagaccctgtctcaaaaaaaaaaaaaataaaaggcttccagctccatccaagttgctgcataagacattatttcattcttttttatggttgagtagtattccattgtgtatatatatatatatcacgttttctttgttcattcctcagttgatgggtacttacattggttctatatctttgcaattgtgaattgttctgtgataaacatacgcgtgcaggtgtcttttcctttgggtagatacccagtagtgggattgctggattgaatggtaggtctacttttagttctttgagaagtccccatactattttccatgaaggttttactattttactttccccccagcattgtatatgcgttcctttttcactacatccatggcaacatctgttgttttttttgactttttaataatggccactctgacaggttaaggtggcatctcattgtggttttaatttgcatttccctgatgactagtgatggtgagcattttttcatgtttgttggccatttgtagatcttcttttgggaaatgtctattcatgtcatttgcccactttttgatggaattatttgtttttttctcactgatttgtttgagttccttgtagattctggatattagttctttgtcagatgcatagttgcaaatgttttctcccattctgttggttgtctgtttactctgatgattatttcttccgctgtgcagatgcattttagtttaactaggtcccatttatttagtttttgttccatttgcttttgggatcttagtcataaatgctttgcctttgacaatgtcataaagtttttcctaggttttctcctagaatttttatggtttctggtctagatttaaatctttgatccatctcaagttgatttttgtgtatggtgagagatctagtttcatttttctacctgtggctatccagttttcccagaaccatttattgaataggaggttctttccccagtttatgtttttgtatgcttttatggaaggttagttgattgtaagtatttggccttatttctggtgtttttattctgttgtattggtctgtatatctagctttatatcagtacaatcctgttttggttactatagacttgtagtataatttgaagttggagtaatgtgatgccttagaattgttctttttgcttaagattgctttggatatttgggctcttttttggttccatatgaattttaggattattttttctaattgtatgaaaaatgatgttggtattttgataggaattgcattgaatctatatattgctttgggcatatgatcattttaatagtattgattcttctaatccatgagcatgggatgtatttccattagtttgtgtcatctgtgatttctttcagccatgttttatagttttccttgtagagatctttcaccttcttggttaaatatatttccaggcatttgattttttttttttttttttgcagctattttaaaagggactgtgttcttgatttgtttctcagcttagttattgttgatgtataccagtgctactgatttgtgtacattgattttgttacctgagactttactgaattcattgatcaaatctaggagtctttcggtaaagtctttagggttttctaggtatatgatcgtatcattggcaaacagagatagtttgccttccttttttccaatttggatgccctttgtttatttctcttccctgattgttctggctagaccttccagtgttatactgaatagaagtggtgaaagtggacatccttgtcttgttccagttcttaggggcaatgctttcatctttttccccattaagtatgaggttggctatgggtttgtcatgtgtggcttttactattttgagatatgttccttctatgcccagatttttatcataaagggatgctggattttgttgaacgttttttctgcgtctattgggatgatcatattttttttgtttttaattctgtttatgtgatgagtcacatttacttgggtatgttgaaccatccctacatcctaagatgaaacccacttgattatggtgaattatctttttgctgtgccgatggattcagttttctagtattttgttgaggatttttgcatctgatgttcatcagggatattggtctgtggttttctttttttgttatgtcctttactgcttttggtatcagagtgatactggcttcatagagtgaattaggttagagttaggtaggattctctctttctcaaccttttggaatagtttcagtatgattggtgccaattctttgaatgtctggtggaatttggccatgtatccgtctggccctgggttttttgtttttttggcaatttttgttattgattcaatctcactggttgttactggtctgttcagacctcctatttctttctgattcaagctaggagggttgtacgtttccagagatttgttcatttcctctaaattttcttgtttgtttgcacaaaggtattcatagtgtccttaaatggtcttttgtatttctgtggtgccagccataatgtctccatttccgtttctatttgagctaatttgaattttctctcttcttggttaatctagctaatggtctatcgattttatttattttttcaaagaaccaacttttatattttgatcttttgtttcgatttcatttagttctgctctgatctttgttatttcttttcttttgctagctttgggtttggcttgttcttcttgagacagggtcgtgctgtgtcacctaggctggtgtgcagtggcacgatcactgcagccttgaccttcctgggctgaagtgatcctcccatctcagcctcccaagtagctgggactacaggcatgcaccaccatgcctgactaattttttaatattttgtagagacagtatttcaccgtgtcgcccgggctggtctcaaacttttgggctaagcaatcctcctgcctttgcctcccaaagtgttgggattacagttgtaagccaccacacctggcctagttggttctgtttctctagttctttgaggtatgatgttagattgtcaacttgtggtctttcagacttttcgatgtaggcatttagcactgtaaactttccttttagcactgcttttgctgtatcccagaagttttgataaattatatctctgttatcatttattttgaataacttttaaatgtccgtcttgatttcattgttaacccccaaatcatgcaggagcagcttgtttaatttccgtgtatttatgtagttttgagggttccttttggaattgatttctagttttattctattgtggtctgagaagatacttgatatagttctgtctgtctgtctatctatctatatctatctatctatctatctatctatctatctatctatctatctgagactgagtctcgctctgttgcccaggctggggtgcagtggcacgatcttggcttactgtaacctctgcctcctgggttcaagtgattcttccgcctcagcctcctgagtagctggattacaggcccctgccaccacggctggctagttgtttttgtatttttagtagagatggggtttcaccatgttggccaggctggtctcgaatgcccgatctcaggtgatcccccatcctcggcctcccaaagtactgggatttcaggtgtgagccaccacacccagccaatatattttgatttttaaaaaaataaattgagacttgctttgtggcctgccatgtggtctgtcttttcttaggtctagtaactgttttgtgaatctgggagcttcagagttaggtgcatatatatttaggattataatatcttcctgttggatcgatccttttatcatcatataatgaccttctttgtcttttttttactgttgttgctttaaagtctattttatctgacataagagctgttctgcttgctttcggtttccatttgcatgaaatatctttttccaccccctttactttgattctgtaagattccttatgttttaggtgagtctcttgaagacagcaggtatttggtttgtgatttttttttttaatccattctgccaatctgtatcttttaagtggagcatttagatgatttatattcaatgttaatactgagatgtgaggtactatcccagccatcatgttgattgttacctggatattttgtgttctccattgtgttactgttttataggtgctgtgcattttgtgctttcaagaggttccatgctggtgcctgtcgaccttttatttcaagctttagaacttttagcctcaatttatttttaaagattatatataaataagggaaaacagaaattctctaatactgtgctcaactgagtggaccgtgtattagttttattttggattaattattgtcacaagaaatctgacgttttaggagttttgagaattgctaaggtctgtaggtgatttttccagactgatgatatttcccatcatttggccacagtacaggaagcgtttgctatagttttatttcttacttgaagcagtaaataatttaaatttttttcttggtaagaaatgttccatgcctaatttgagtgtatttacccttatttgctaataagcagtttagatgttcgtaccctgtcttctatagaaattagaattatacgtataatcccaaatcaaaatgtaattttgagcaaatgtgctaattgatttatgctagacagattgacctatgtgtgattcatttttcctaggagaaggaaagagatggttgaaaagaaatatttatttggtaacttatatattgatgtaaaaatggcacagtcttggtcttcagatttgtgtttgtgtaaactaaaataaatagtaaagtttcacagtaaagactaccaaatgagtggttaaagcacctggctcagggcacagattgaatcctagcttagactctcagtggttttgtgacactggacaagttaattaacctcaccaagccttatttacccacctttaatgtgaaactaatggcagtacctgcctcatggagtttttgtgaggattaagtgatacaatgtgtgtaacatgcttagctccgtagaaaatggtgaatgaatgttagcccgtttcactttgctgttgctagtgtcgtcgatgtgttcatacaaaaaactgagcatgtctaaaatgtccaattattttaatgttgaaagtaatggacataaaaggtgcattaagcaattctagtttctgtggccaagacacatcaaagaaatgaagaatttaaaaaataggtgattgatgaagattaactttattcatgtttttcctagctagacattagaagcaaggtaaggaatttaaaataataatattcccttaaagttgctttcctaggtatttttagcattgtataatttaagtattatagattcatgcagaaatcctttatgttttacagagttacactgttagaccttatgatagccaagataacgagtgatgagccactcaccaaggatgacatccctgtgtttttgcggcatgctgagttgattgcaagcacctttgtggatcagtgcaagactgtgctcaagctggcctctgaggagcctcctgatgatgaggtaagggaggcagatttcccaatctcgggtaaaagagaatggacagattttctaactcagccaagtcctgtatgagaattcttttttaaaagctttaaaaaatattatgtaagtaatgtatccatatatgagaatagttggaaaatttagataagggaaaacagtgtccttattcctaccatccagagtcaatgacttaggcaaattctggttaattttctagacagatgacatcagatacatgcacacagacgtagacatgtgcacatatgtatctattaaaagtggagcctttctgtgccttctgtttgcaggttcccattttttcttcggaatgtaagctctaggagggcagaaattttgactgttgtgtccatagtactatgtatatggtaggcactgaacaagtatttgctgaatgaataaataaataatacattgtaaatgtctttttaaataaatgccaacataggctgggcacggtgcctcacacctgtaaccccacttctttgggaggccaaggcgggaggatcgcttgagcccaggaattccagatcaccctgggcaacatggtgaaaccccatctctgtaaaaaatacaaaaattaactggacatggtggcacatgcctatagacccagctacttgggaggctgaggtgggagggtcacttgagcccaggaggttgaggctgcggtgagccatgattgccccactgccctccagctcgggtgatgcagtgagacccttgtctcaaaaaaaaaaaaaaaaaaagccaacataacatttcaagtaaagaatttcctatttatttgtccaaatccctgtagttggacatttaggttgtttgtttgtttgttttgagacaaagccttgctctgtcgcccaagctggagcacagtggcacaatcttgactcactgcaacctctgcctcctgggttcagtcaattctcctgtcttggctacccaaataactgggattataggtgcacaccaccaccatgcccagataatttttgtatttttggtagagacggggtttcggcatattggccaggctggtcttgaactcctgacttcatgtgatctgcctgcctcggcctgccaaggtgctgggattactggcataagccaccacatctggcagtaggttgttcttatttctacttattttagataatactgtagtacatgcctttatagttacatctttgcacatttccacagctgttatcctaggacataatcttagaagtgaaattgctatgtataaggatatcacatgtttaaagctcttgatacatacttccaaactgctttctagacagtttgcttcttctcttctttataggagattcctagtggtatactgtcctggttaattatttaaactattttttattctccttaagcctaccttagatcattcaggtcttgttttatcagggcgtggaagggagcttatgttaattctctatcccttgtctttacttcagaacttcctgtttttatctattctccctttcttctgtcataaagttagaattgttctttctctggaccactcagctgtaaaaagggatgcacttgtgatacaacagggaagaatctcagaagtgctgagggagagaagccagacagactagaaaacatgctggctgattccatttccgtgggattctgtagcaggccagatatatcggtcatgacagaaaatagatcagatgtcacctgggtctggaaatgaatgagtggaattgattgcaggggaacacgagggaactttctggatagtagaatgtggcacttagctgtataccttgacacaactttgtactgtatgcttaagatgggtgtatttcattgcatgtatattatacctcaataaagctgatttaaacaataaaagatgatagagagttcctttgtatgctgatatgaatggtcaggtagagagggagtaattgatgctggaatcactgttggcaaatgggcaacactggaggagagggattggaatccagagtggatactcatccactgtccacaggcgggaatgtagagaatgtgatccgatactgtgaaactgttaactcctgttgtaaatgcagctcatggctatgactgctcgcccacgagagtgtatttccttttttgtgaatatactttcgttcaggaccattttgatattgattttctgtgctttgtcatatagaccatgttagatcttactaatcatttcgttaactttagttctcattttctgtgataggaaagaaaggtctttattcaggggcttgcgtttactttctggagatagatttgcctttgtttccagcaggaggagcagtgagtcatgcttaagaaaagttttaaaaattctctaagagacagagaaaagacagatcacagctttaaacttttcagggcacttctgtttaaaatataggtgatttcagtattgtagtgagaaattcctggtgtaacttttcatatttaggaaaacttctatttttcctttggacttttttctctaagatgggaagtatttttatatattaatggaatggaaagttgtagactgggaacagtggctcatgcccgtaatcccaatactttgggacgccaaggcgtgggaggattgcttaagcccaggagttggagaccagcctgggcaacataaggagactccatctgtacaaaaaaaaaacacaaagaattagctgggtgtggtggtgtgtgcctgtgttcctagccaccggtgaggctgaggtgggaggcttgcctaagcccagaagattgaggctgcagtgagctgtgattgcgctactgcattccagcctggggaagagtgagatcctgtctccaaaaaaaaagaaaaaattgtaggcagttttcttttgcaaagccaaattaatttacttttggaagtttattgagctatacatttatgacttgtgcgtattaatgcacatatgtcatactttttttttttttttaaaagaggaccactttgccagtatttaaatatgccaaagaccaagtgctatactggagctggcctgtggtgacttctaagagttgattattaagtgcttagaaatttgtgagctgattgttaaattgttggtaccttgaaatcatccatggtggaagtagttgtgccatggaaaccagcaaatgctacaaatcagggttttccacctgcctcttccaccccagccattcttctgccaaaccactgcatttactcattggtgatctttttaggacaagatagatattcagtaaagttctcaatgctatgactgaaaagtgagaatggaaacagttgtatttatagcatgtgttttttaatttatgtaattgtttggctttaaaatcccaaggttttcttcatacgtttctttataaaaatagttttgggttctcatgttaatgtacttattcctgtcttttgatatattttgtatacttgtttccagtttttgatatatttttgtcagttcagaatcttgttcacttgtagcaagccttgccttttctctgaaagctcaaaaaacattccttttagctttgtattttctgatatccatatattacaataattgttgccaggttgtgggatttgcattctgttttaatctttgcaaccccaggttaggccatactgtagtacctgttatgcagtaggtattacatatttaattacataatacatatttaatacatattctacaataaatagtgtattttttccacatattaagggcttaaatttttgtattacgcaaataatgcttgctttgttgttaaaaattatttaagctgaagtcagtgaaacataaagttacaaagtttcagccaggcgtggtggctcatacctgtaatcccagcactttaggaggtcgaggtgggcagattgcctgaggtcaggagtttgagaccagcctgactaacatggtgagacccccgtctctactaaaaatacaaaaattagccgggtgtggtggcggatgcctgtaatcccagctactcgggaggctgtcccagctactcgggaggcggaggcagagaatcacgtgaacccgggaggcggaggttgctgtgaactgagattgtgccattgcacttcagcctgggcgacagagcaagactcccatcttaaaaaaaaaaaaaagttacaaagttttcccctttttgcccagcctccatttgttttctatagatctgcatatccttttttttttgttttcttttcaaaggtctttttttgtatatacacacctatatgttttttgttttcattttttgcactattcttcaacttgctgtttttacttatgatgtaacttgtacatctttgcactttagcatgtgtatattcattgtatgtttttaatagttgaataatatttaactatatagactcatcataattttttcatttgttccctatagactttccagctgctttcaggttgctttttttttcttttaacctttacaaataatgttatagtgaacatccttgtacaaatttcggttaagtaaatcaaatccaggttataaattcctggagttgaattgctgggttgaagaattatgtgtatttaaaaactttagagagatttctaagttgcacatcagtgcaacacaagattgcacgagttgccttttgcagatctgatttaattactatttctcgttaatgtttttcagtgaccattatgtttgtttttgcatattaggttactctttaaaatgcatttattaaaaagcattttctggaaattagtctttctgtcatacatacagtaaactattgtttacgtaatttttgtttgaatttatttctgatgttctgttagccttgtagtcgttttttgtttgtgtttaatctagttgaggttatcaattttatccttctggcctctggatttttttttttttttttgacaactgacagccaagaagatttttgtttgtttgtttgttttttaagtaaattctccacttagattgtggaaatacaaacctacatagtctagttctttcagtacttagttctcattttttatttatctagaatttatttttgagtaaggagtgagttatggatccaaatgaattatttatgtcttttgactatccaagattataaaatcttttggtgtgagactgactgggtttgaatcttgatttcttctgttacaggcatatgatcttggaaaagttacttagcctctctctgcccttctttttcttgaaatgggttatattattattattattattattattattattttgagatagagtcttgctctgttgcccaggctggaatgcagaggtgtggtcttggctcactgcaacctccgtctcccaggttcaagcgattctcctgcctcagcctcctgtgtagctgcaggcacccaccaccatgtccggctaatttttgtatttttagtagagatggggtttcgccttgttggccaggctggtcttgaactcccgactttgggtgatccacccgcctcgggctcccaaagtgctaggattataggcatgggccaccgtgcccggccaggttgtattttaatataaacatttaatatacagattggtacatagttaatgttccctaaatgttatctgttattatttcagtaccatttagtgaataatcttatcctttccactaattttttttttttaattgagacagggtctcgccctgttccccaggctggagcgtagtggtgcagtcgtagcttgctatattctccaactcctgggcttgaggatcctcccacctacctatatcatatcctaaattcttttatttatttggatcaattactggttccctccaaacaaattggagggaaccagtaagatgttaacaactggagaagggagaattcagagaggtatgtgtttatatgccataaaggaacactgaaatgaacacacaaaaaaatgcagaaactgatctatcaacaaagtagttgcagtccaggcagatataactaatttgcattttaatggacaggaataattctgtattaatataagttttctgtaacttacaaagctgtaaaattgctcaaagatacgaaatgacagtgttaactgagacaggtgagctagacaggagactaatctttttttttttgctcacttcaaaatctttcacgatgttcccttcatttgcttgtctttttttttttttttttttttttgccctagtgcctgatttaattaatattagtttcataagacttttaaatatctggaagggcattttactcattaatcttattttttaagacagtaatttttcctggctgttctttcgttactaatttccagatgctcattagaaacactttcttaataaaatgattttaatgagtaaaattgtgaatgtgttaggtggggatagattaattttcttttaggtttattttagttaatatcatagaatttaagagctggaaggagacttccagttcatctcttccaacctctaattttatttctgtcattttaacgtggaaaatttcaaacatagactaagaagaaagtgtacttatactccatatgccatcccctggcttcagcagcttccccttcatcaccattcttctttcctccacagttccactcattcttatgccagttgccgtggactgaatcaaagctccaacatatttcatcagttactctaaaagataaggagttttcagacacaagtataatatgaagaaaacatctaaaataactaataataacatttattatcaaataaatagtattcagatttcccccattgtctaataatctttttcaagtttattttgttgaaacaccttacagataagggccaccttatctgtaacaccttacagataagggcaagtgattgacataactttactccagtgtataggttcccctttcctcttctttttttcctctttgctacttatttgttggagaaactgggttgtttttcctgtagacttttctagattttagattttgatgagtatgtcttcagggtggcacttaacatattcttctttaccttgcatttcctgtgaatgaaaattcgttccagaggcatattcagatttgggttagttttttttgtttattttttgcagtagtgtttcgctgttgatgatactactttcgtcaagaagcacatgaggcttggttgtctctgtgatattagcagtcattaatgatcacctagatccatgaattctttaggggttgcaaaatggtggcattttaacattattgttcattttttgtttattagcaggaatattttttaaagagaaactttccctaaccaattcttaggttctgtgaggtacactggatgaagaaaggcaggataagtgctcgattgttttccctcttgattaccaatcttcagaataatgagttggttttgtggcatcattcaaagatgaccagtgagttggtttgttttgttttattttcattatgaagccatagctgtaaaaccgcttgatttgttttcagtccgttaccgttgtaattctttctgatgtttaatgtgccactgctggccggtgggagcctcatcaagttgtttctgattccgaatttctgacatgaccctagtagcctgtaatagcgtctttgttgtctgctatgacaagatgtccagggttaccttttgcatgggctgtcccaggtctgttcttgaaggagcagtggtatctcacgataacaatctgggcagctacacctttaacaaaagaggttgatgaagctttgtgaaattgatggagttggtcaagactcgttttaacatggtactactaatctagacttctaatctagattttcccacttaactctttagcaaaagaaggctatgatataaaattaaagatccaagacattaaaaatatgagttgttttttgctatttattttgagatttcagaatactatattaatgtattacctttaaatctcttaattagaaaacagtaaatacacatttagaactaacaaggaagtaatttgtctttcttttgaagaatgttatctcttttttttttttttttttttttgtttgaggcagagtcttgctctgttgcccaggctacagtccagtggcgtgatcttggctcactgcaacctctgcctcctaggttgaaacgattctactgcctcagcctccctagtagctgggattacaggcacccaccaccaagcgtggctaatttttatatttttttttactagagacgggatttcaccatattgaccaggctgatcttgagctcttgacctcaagtgatcttctggcctcggcctcccaatgtgaagaatgttatctttatggactaactttataatctctgccacattttgtcaaatgatgggtactttaaaaatggggttcaaaatctatacaaaagttacatttaaaatttttgtatagactacttaatgctatgcagttggtactgggtagtttcttggtcatgcagtgtatttgataaattatttagtagctatgtgaagtagcattttcaaacagtactgtctttctaatctaccaagatattgcatagaagttcatatttacccagaaattatgcaagttcttaaagccagagttttttcaaccacagcattttacaggatttctgtggacaagaaattaatgtattttatgggatatttgtatctttaaagtggaatttgcatgctgggaatgctttaaaaagaaagtatttgcataaatgtcatgtacatagctagtaattttgaacatttattccactgttggaatgtctttttgcttgaataagaacttttctgactctttgctccaagaagacacataatgacacataatcttgcattcttgatggcagatgtctgctgttagtgaaaatgatgagtcgtgtacatatttcatacttctgttttgttcttcatagttttgtttttctctttgacttattacaagcacagactctttaaatttattgaaatattttattctcttacagttatttataacagttaaataatttctcttaaaatatgctaaaaagttatgttttcttttctttctaggaggcactggctacaattaggcttctcgacgtcctgtgcgaaatgactgtgaatactgagctgctcggctatctgcaggttttccctggcttgctggaaagagtgattggtgagtgaaatatcacacattgtatttttagctaagaaatctttggcttgtcatactgtaatataaatccaaatacaaatccttaattttcagtgtactttgggaattttgtgaatatatttttttgagaggaatcacagtgttgtaacagttcaggcaggccagataaacctgagcccatgtgtttgttcagccacttcccttctgttaactgaagattccttctcagtaatgtgaggataacaatgcctgttatgcatatagtagatgtttcatcaatataggatgtgatgaagaaggtggggcaggcaggtttgcgatgatgattgtggttttatattactatagctttgtaaaatgtggcagtaaatttttcccatttacatttagtgaacacatagaatggtgttttatacatattatatatacaaatcttatgagaaaaaggttttaaacaagaaaccattgttaaaagtattaccaaccttgctaaaaagctgtttgcaaaataattcaagtagaacctgttccttgtggctagccatgcttaggtttgctgttcattatttgcaattttttcctttaaaaagatgatacttactctggagaccagtgtcctgagaaagatgactttgtgtctagcagtatagatgagctagcagtcagctgtagaggaagatccttagaattcctcatcagtgttgtattttgagtacattgcttttagtgataatttaaataaaacaccacaaacctagcacacttgagtgattatggaaggagcctgagtttggagccagggtcgatgtgggttgccatcccagctctgccaggtgccaacttttctgagcctgttgttttcttcattataaaattgggaaagtgataccttcctgtataggtttgttgagagggttaaatgagataatgtggaaacactgaaatgcagttcctggaagattgtctgttttcattggctgcctggaggtgctcatagagtagagcagtggtaagttctttctcctgaatgtagctggagtgaagtatagagaacatatgctggcttctgatgatttggccagttggatgagggaaaaataagcactcttcttggtttctgtcatatgcatcattatggatagatattgtgttttagacttcattgactgaagttattagaaaagttctttcataaagaagttgagattggaaacctttttgtaagaaggatgctagcaaacttttagctaactttttttgtagataaatagaaactctgagttggggtagtcattatggcttatctccccaaaactagagtcaaaaaatttaaagcaaaggcagaagagccttctaatcattttttgaagcaaaggcagaagagccttgtaatcattatttaaataaagctttctgtgctctacctttagcctattacaataaattagatttgtctatggaaaactattagtacaacatactaaaagttacttttctgtggaaaatgaagtttactcttttggttatagatcttttgcgggtgattcatgtagctggaaaagaaaccacaaacatcttcagtaattgtggttgcgtgagagcagaaggtgacatctccaatgtggccaatgggtttaagtctcatctcattcgtctgattggaaatctgtgttacaagaataaagataaccaagacaaggtaagaggatttcttagtatgtattatacatgtatggcttcatttagaatatagtccttggaagacattcactcttttggagtgaaagcttgaggtgcttagaaagtagcttggatagagagatatatattttatatgaatacacacacacacacacacacacacacacacacacacacacatatatatacacacacacacgtgtgtgtgtgtgtgtatatatatatatgtatatgttaatatataggctctttggagcctagacaaatttctaacacacagtagatatttaataaacactagttattattgcctattatcttaaaaaacaaagcttagatctatatcctatgtttatggacgatagcatcataagccttttcttctagatgttttaaaatggatataaaaggaatataatatttaagtatgaagtctttgaggacctagtaggctgcttttagaaacctcttatgtgcagaagagcttaaaggtagttatattgagaatgtgagagaatggtaagaaagatctcagggcagttggaccacatgcttcagattgatctcgcctttctgtatttttctggagttttacttcgggtggcatttgatttgcttagttaaatattaattaaatttctgccagattatatttttctaagatggtggcagaatgtcttgcattgtacatgtgtgtctgcagtatgactttgccactcccctgtcgagggttggcatctatttctccatccacttgaatctgggcaggccctgtggctgctgtgagcaatcaaatatgtgatcctataccatttgtagcatagcccttaactggtctagctgattctatttctggcttcttagaagcccgtcactatgtaagaagtatagattcccagagatcaccttgctgcgagttgctgaatacacatggaaaagccctggaagataagatacaatgaggagagaggaaaggtctggtgaaggaacatcaaggcatgagatgtgtgcgagaaaccatcttgggagtagatccatcctcagtttcttacttgcccagctgatgccacatagatcagggcccccctactgggcatagtccttcctgaatttatgacccatagtattatgagaaaaagtaaaaaatagaaaaaaaaaataagggatataggtcctgcttcagttagtagcccagtcagttactgttggactgatccttcttcaaatagcaattataaactttggacaaaaaatagccatgtgaagacactcgaatttgacacaaacgggcagattctggagtgaaattgatgcttggaagaagggaatgacacagtgtgtggcatgcagggcagtgaaaagtcagttacaaaatcttccgtctttctagcttgaagaatcaaagaacagtttgagggcaaccatggcattggaaagtgaggggggaattgtggaaagtagaaaacagaccccaaactctgggtgtcagctacctaaatctctgctaatggctgaatcacacgtgtggggcaggctccaggcagctaagctaaggatgaagtcattgtattgagatttgagctcccaccctagagtttatagtattaagtccaacttacactgtagataattaataattgccctctaaaaaaaaaaatcaacactctttagaggaatataatataatccagaattgccacagcataatgtatcctgtaatgtccaggatacagtttacaattgcttgacgttcaggaaaatgtgacctgttctcaattgaaaagatgatcagcggagactgactgtgagaggacacagatactgggcttagcagacaaggattttaaagtaccaaatgtaaccgtgctcaaggatgtaaaggagatacgcttcataagagtgaaaaggtgggatatctcagcagagaaatagaaactataaaaaagaaccaaatggaaatcctagaactgaaaaatacagtatctaaaataaaaaaaaaaaaataccgaatgtgcttaacctcaagaaagatcacagaggaaagagccagtacactttaagatacatcagtagaaatcatctagtctgaaaaacaaaagcggggagaaagattgaaaataaaacggccgctttaggatgctaaatgttagggtaatttgttatgtagccgttgatagctggaataattcctgtgagacatggcgcagaaccaaacgctagacaacttgcacttttagtatatgggcgcaccattttggcaatcctcatcttcaggagagtgagactactgattccccccttgggaaattactggactgatttttgcaaaagaaagttgatagcgaataaagcactttacctttttaatgaccaggactgcctttcttgagcacaaaagaggtggtttttcttgtgtttaactattcttttgttgctaatttggactggcctcttataggaacaaaatgcagtaacccttaaaaggcttgcgaaataactcactgaagtcaggatcagattgcaccataagtaaatatggagtgtgcccaagtgctgctgtgcagaggtcactggggcgcacaggaagtcgatggtgtgtcctgtcacttgtgcagttgctaatagcactgctgatttctcagcaaacagtttagagggtatgaaggagttcattctttgagtatcaactcaaatgccctctgtttctctcagtttcttacgtgtgtcaacaaaaggcctgaacctgaaagcattacctctgggatttttttcctccttccaaagaccgacacaacgccgaaatcttgttctggatgtgctagagtgttctttattcttgtagccaaatccttgttccagctgggtgttacagatatttgccttgctcattgttgcctcaagggatggaattcactcgcactcagatgactttggttatagttttgggaaaatggaatggatggttatgtagcaggtctttatcacgggaccagtaattctcagtgttttgtcttgatggattgtctcacttctaacccagctagggctttaagggaaatttggctctgtctctgctccaagactaaagatctgagttgggagggatttcgtatcatctagcctaatttgggttcctcctttgcccagaagacaaaagggactgatgatttattgtttagtgtttactatgtccttgcattgtgcttagtgaattacatatattatcaactttaatctttgcatcagccttgcaaagcaggttctggtaaccacattttaaggagaggccatccagttaggtgcagagcccagggtagaatttggatttgtttgcctattgagttcccaggcctgtgctcacttcctgccccatggtgagaacttgccaaaaggttggagaaaagggtttaaaatagacttcctgcaggacttcaggctggaggctggtcagtctgcgtctcctaggccagccaggccccttagactccctcctggttgaagttgggagctcttgggggtcctcttatccttgtttctgattcacccattcatcaaatacgaatgtttgctggcttggggatcctttgacgggtaattcaggcaaggtattaatatcttctgtggagcttccattctggcatcatctggggaccatgcttgcctctttgaatcagaatctcaaaactactcatgacacagattttcctaaaatctttgtgtactgcctgattcctctgaattttgagcaagactctttcaagcccaactgtgtctgtgttgtctgtgtaacttcatccattgcagtgagtatggtgcccacctgctggatggccctcttacacttgtgtggcactttccattttccagagctcttttcatctgctttagtttgttggagccttatgatacctctgtggaaagggctgaaaagatatttccaccatcattttctaaatgaagaaaccaaggccccgagaccaagtgtgatttaactcagctagcacttgctgagtgagaattgccgtgtgctgcatgctctggagaagacagtcgctttagtggtggaatgacacatgtccactaggagctgtagcaaaagtccgtgtggtgaggcctgtcagaaaggaacaggggggtgatgtgtcctctgggctggctgtgccaggagcatttctctctaaggacaggcactggactgccaggagcatggtatcaactggaaggatggtcatctttctttgagatacttgtctttgggcaagatttaagagaatcaaggtacgttgcctcagattgaaaatctgcacagaaatgtattttatcccaaattctcatgagtctttaatgcttaagtctgtacacgtgatagatgtagtgtttcctgaattgtaaaggaattgctagacttccctttacctcgtcatggtagggaggtgtcaaatccttactgacttctattcttaccttgtttttttgttctcgacttgtgtagtatttccttgctacaactgtagtgattagtttacttctaaacttttgtggacctaaatggagattctgttttggtttctattgtaagaagcacaaagatactaatgctataaacatgaagaaagcattcttcagcttcttctttgttagaataaggaatgtatggtttacctttttcttccctattcttcttcttttcactattgtcataacctctttaagtgaatctttattagaagaaaaaccaaacgtttatttcataaagctaagtgcatttttcaaatcggacagacagatgatctagtttatctaccttccgcccgccaaggaaattgtattgactaggatgggccatatatccgttctgctaaaggttatggaactgctattcagtttcttctcctcctccttcctcctccctgatttaaaatattcccagcagtcacatacttgatgatcccatgtcaaatatatgtgcctataaatcttttactataagcataccttaattttaaagtaagtctgtactgtatgaaaaagttcaacatgtaaagacaaactttatttggccccttcagttctcaattttgaaggcaggttcatttatatacataaaataatctttgtaatacatttttcgttaactttgtgttgctcatcatgttactcccagcatctaaattgtacctggcacatagtaggcattcagtaaatttttctaatttttcttgaatgacaatttatttgtaaaataaattgaatgttgaatgtttactacatatcaagtgcacttttaggttctgaagatacacagcaagtaagacagttcttttcaaggagtgtaaatattactatacaattttctgactaaatttacaaagactagtaaaaatagataacttttcaaatgaaaattaatgttcctttaaattctgagttctgtatttttgaaagtctttttttatgtttgaatatattctaatttactgtaatttgccatcgttttatttgatccaaatcatatatattttagattataagaacatctgtattgtataatatttgcaagtaattaaaaaatattttttaaatcctaggtttaggcttcgtagatctgaatgcggttttttcattaatcttaaataaaatttaagactgaatttacagttgttaaacattcataacatgatcaatttttagtgggttttttggtggggtgtactattttccaccctttttgtatctagttgcaaggagccaagaacaggcaaattattaactcctttattatttcctcctgtctgaaatgttttcaagcagcgtatttgtctgttaaatcatgaaaaactgaaaaaaaaagtctatggctatttcctaatgattttatttaggttgttgctcttaatgaggattagtacctgttttgtacatcagtactggctgacttgtcagttactcggataattgatcgagtgattgctctgcagagaaataaataaatgcttaactaatatgtgttagtgtttttctttttgcaactgtaaaataggccggggtggcatggcccttggtgctcaggcagggccagcttctatattctcagcctatactagcactgtgtggacttcccaaccttcatactttccctgagtgaccttaacttggccttcagaactcaaggtcacaggtaccctgttgacctgtgcagaaacactttctcttctacgctcctcactatactcttctgccctctgctcaccccctgacttacactctacctataatcagtttctgtgggtaaataggttatgggttgttgattctgatgcatatttcagtatacgtgtgctgttgtttttggttttacttaataagtgtttagtgtgatacacatacgtaaactgatcaccagcagaactgtgacatatgaaacactttatttgggtatcactcaattttactgtagcagcctccatcccttcttagttataccaccgttaccaccacttttgtccttgctcctcccttgatgttttgtctttcatgaaacccatctcccaaggtctttctggatgataatggcttaattcactctctttcccagatacatgtttttccttctttataggaacctaactctgcctgtctaattggggaattccaggcagggtattgaaaatgtctggggggccgggtgcagtggctcaagcttgtaaacccagcaagcacattggaaggctgaggcgggagattgtttgagctcagaagttggagaccagccagacaacataataagactccatccctacaaaatatttaaaaattagctgagtatgttgatgcatgtttgtagtcccagctgtttgggagactaaggtaggaggattgcttgagcccaggaggtcgaggctgcagtgcaccgtgattgtgccactgtgttctagcctcggtgagggtgtgagaccctgtttaaaaaaaaagaaacagaaaatgtctgagcagtgggttctcctgtcactgacttttctgtcattgcttggcttgtaacattggatccacgtgtgtgctgtttatagaggaaccttacaacaggcagagagcttatgagactttagagttcagtaaactcagagttgcctcttagttgaccatctattaactgtttaaatttggacaagtgtctcaacctttctgaatctcagcttcttcatgtataaaataggggcagttacacctccttgtggggttgggaggattaaatgtgatcatgtataggaagtatctcatgtctgtaatcctagtactttcggaagccgaggcaggaggatcacttgagcccaggagtttgagagcagcctgggcaacatagtaagacctcccatctctaaaaaaataaaataaatagccggtatttccagttacttggtggggccaaggcaggaggatcgcttgagcccaggagtttgagaccagcctgggcaacgtaataagaccgtttctctaaaaaaattaaaaaattagccagtgctcccaggtgcttggggggctgaggtgggacggttgattgagctcagtaggtcgaggctacagggagccgtgatcgtgccactgcactctagcctgggcaacagagcgagactctgtctttaaaaaaaaaaaaaagtatataatggattgccttatgtctctaactataatacttccgtgtccctcctcttaccctccctaccagtccctttggaattgaaaagatctagttcattccagtgtctccccattatatgtatttacatagaaatttgtagacaacatttcacaaggatttgcaaagttcaaagtaaacctcatattctgcattctgtgtgtattactttttctaatagatggggctttatggaggaagtaaaatgaaaacaaatatgagaactttctttaggatgagagtaattttgattcttgtcataaatgttttctgacttgaatttctcttatgttattatctagtaaagagctgaagtgttttccgcgtgaattccaaaatctgttctagctcaattctgaaagtatgttaaggaacttttaaattacagggcatatgtcttacctcaattggattgtgcgtttttcctgtgtttttcctcttgtcagaagcaagttgcaccaaatctcagcttattgatttgaagattgaatgtataggcaagatctggcttgcttagaattccacttctttgtaatgtaatcccagatcaagaaatatgtcaaaattcataaatcaaactgtcaccattagttccctgaacttacagttcctgtaacagtaaatgaaattaaaattcctatctagaggaaacctatcatggtttaggttgttgcagctgtaaaattttttttaaaagactaaaggatggtctaccatttgactccaaaaaccccttttctatgtcttgttctacaataattgacttattctcttccaggaaatgcataacattatttaaaaagaagaatgatactaattatataattgcaatgtaacagcgtactattgtcgataaccattactattgcaaactaactaggctccaggcccttgacctgtgcttcatcgtggaattcctaccactgcatattcctccctaggctttaagcgtgaaggcagacacatcatatttggcttaacacctgccgtaacactgggtacatagtgtagtgaaattaatggacgctggatgactttgcttgctttactggtgagtcaagcgtagagtagttacttgcttggagcgatagcaggccaaattctgactccagagcccatacttttcctgttaccatccactgcttccaccgtcaccacaaaagaagatgtttgagactggtcctttgaaatctatgaccaaatttgtgtgactctttgaggtggcaggacattgtattacagctttttccacaattcttactgaacttttttcattatcatctaatgtctagtgttttagtaaatgtagtttcttttttctttccctttctttttttcttttttaagaggtggggtcttgctctgttgctcaggctggagtgcagtggtgtgattatagctcattttagccttgagctcatgggctcaggcagttctcctacctcagcctcccacataactgggactgcaggcatgtgccaccatgcccgactactaaaaatttttttttggtagaaaaacagggtcttactgtgttgcccaggctggtctcaaactcctggcctcaggcagtcctccttccttgacctcccaaagtgctcggattacaggtttgagtcaccttacctggcctgaatatggtttctttaaggttcatgttgagggctacatttcaggcacatgcgtatttccgagaagcataatttaccccatactgtagacacagaaagggagacattggggaagtaatgtgctgcccatgatgattccgcagtttgtaaaagtcatgaatccagttttcctaactgctactcagttttctttacttacgccatatgatcaatttttagataacagacgttttaatttaatttaattttatttttgagacagggtcttgcttttgtcacccaggctggagtgcagtggtgtgatcacagctcaccgcagttctgtgctcaagtgatcctcccgcctcagccacccaagtagctggtactagaggtatgtcaccacacctggcaaatttttgtatttttttttgtagaggtgggattttcccatgttccccaggctggtcttgaactcctgagcttgagcagtctgtccaccttggcctcccaaagtgctaggattacaggtgtgagtcaccacgcccggccgacaacagtgattttaaatggatttgtgtttaacagtaaaaaacaattatttcacagtatccaaaaagaagaatatctgagacttgggtgaggggaaaaccagctgtataaactgagagctgtaccttgttcctgtatggaagtatggaatatgggaaagatattagttatttttaaactgatttttattactagaccaattaaaatcccactgtgaaaaataagccataattttgactataaaatgaaaataattgaggaattgtcatatcaatattaaaatatactttaaggctaaaataatcaaaacaatttacaaaagtttataggttagtggaggcagacatagtttccaaacagacccaggagaagttatacgaatttaccatgtgataaggataatccagcaacccggggagaaaaggaaagcttattacaaaagcttgtaaaaaagcttatgtaaagagtttttctccatgataagaagagaacatgctccgttcattagtgattgtagtaattctttctttcttctactttcctgtttttttttgagacagagtcttgctttgttgcccaggctggagtgcagtggtgtgatctcagctcactgcaacctctgcctcctgagtttgagtgattctcctgcctcagcctcctgagtagctgggattacaggcatgtgccaccatgcctggctaattattgtatttttagtagagacggggtttcaccatgttgcccaggctggtcttgaattcctgacctcaagtgatctgcctgcagcggcctcccaaagtgctgggattacaggtgtgagccaccatgcccagcctctttgttcttcttttatactttgtacacctcttaacccttctttggccaagatctgggggctttagcaatgacaatttcaattatactttcagttgaaagatttttaaaagtaaaacgttagcattggatctggagaattttgctaactgagataattaatagctgggctggtggtgatagggtttgtgtgtttttgagagagagagagagagagagaggaagagacagacagagatggaaatataaagatcattcttccactgttatatgtgttttttcccctttaaaggaataggcatttgaatttcctctctgttgtcaggtgttctgacttgggtacatcagctcttactgagtgcttgaatgttcaggatttctatgacatatctcaatctaatgaaaatctgactgtgaaatgtctatatatctccccaggcttcgttttcttggttaaatgagaaaagtgctcttatttcaaatgttggaaagtagctctacctttttctggaaaaaaaaaaaaaataaaaaaaaaataataataataataataataataagatgggaaatgtctgtcccacatctaaagcagttttgatctttagcatatttagtttttttttttttttttttcctggcagcagctgaaaattaagaggatcaaagttatgttcctataaaagacttttttcctgtcagtgcttgaaggcattgtctgactccccccacccccacgttttaaaagctgattgcttatcttattcaggtagaatttaatttcatgcccatcatattctaatagaacaaaaatgatacttagtttcagactgtggattttagtttgaattcaaacctactgctatattgcagttaaagttgggaatattttttactccaaatagaaatgaacgtgctattttggcatagtggtaagagcttgtagttcaattcaacaagtatgtgtttgccatatgctgtgtaccagccagtattctagacactgggaatgcagaaatggatttggcctactgttctctcgaggaattcacagtgtaaagaaggagacagatgtagaaactatcatctcagtatcatagaataagtggtgtgtgacaggattgagagccagtagaaaagtacctaagtgcttggtataaatggctctacttggaacttcaggaagaacctcctggatccaggccttgaaggatgaatgagaaagagttaggcagttagaggagtaggtcagccttgcaggcagtgggtgagcaggtgtgtgggacagtgcaggacccagtggcacctgaggggttggggttggggttggggttggggttggggctggggctggggctggggctggggctgtgccagagagctggccccttggctgcacgatgggctctgcactcactgtgggaactaagggttaggccattttcagcgttagtagattccttattgtagctctcatttctgaggattattttgtggttctttttcagatccacttcttttttttttttgagacggagttttgctcttgttgccaaggctggagtgcaatggtgcgatctcgacgcaacctccgcctcccaggttcaagtgattctcctgcgtcagcctcccgagtagctgggattacaggcatgcgccaccatgcccagctaatttttgtatttttagtagaggtggggttttcccatgttggtcagggtggtcttgaactcccgacctcaggtaatctgcccacctcggcctcccaaagtgctgggattacaggcgtaagctaccgtgcccggctgatcaacttattttttattgtgttgtccatcttcgtcttgagtcatttaagacacttattttctcttggagattgtttttatttctagtttttagggtatggtttttctcatttgttctctctcatttccctcttcccttaacccctcccctcctcctctccacccgcggtttcttttcccagtgattttttttttctgtcttttaacttgatctcatcttcttaggagaaacctttttcggcagaagtcccataggtcctggctgtggacttgtattcacagagcgatttgcttttgttttcatctcctcgggtcctagagggtccactcacctcttaccagcttttttttttttttttttttttttttttttttttttttttttttttttgagacagagtctcgctcttgcccaggctggagtgctatggtgtgatctgagctcactgcaacctccgcctcccgggattaagcgattctcttgcctccgccttcctagtagctgggattacaggtgtgcaccaccatgcccagctaattctttgtatttttagtagagatgcggtttcactatgttggccaggctggtctcgaactcctgacttcaggcaatccacccgccccagcctcccaaagtgctgggattacaggtgtgagccactgcgcccatctcagtttttatattaatataatttcttgacttgggattctagtaccacactgacaatgtgactctggatgcagtagctgcctgtgataatggtcttccctggtcccccactgagatgtcgaagcaacccaaaacctttttaactgctacacagagattttgatgatgtggcagcctgtgatggggtcccatcctagactagagtttttcattctttgtctctgccctttgtaagccaaaagccacctacttgtttgcagtcctgaaaactctagcctccaggaaccttgtcctagttggatcctgcatgcctccactcttgtctgcctctctgggttttatttctggcctctgagaatgatgctcacactgcccagtggcaggacgcaacctgggttcctgagccttatggggttaagtgcaaaagtgagtcctgtcagctaagcaggagctgctgagagacgacccacggaggtgggctccagcagcttggcacgtgtaccttcgtggtgcatgggaaattttgattcaggtgaaaaaacagtttaaattctaggatattcttgctttctacccaggcaacacctcacatgttgacttaacttgtgagtctccctttcttcatctgtaaagtagagatgattttacttccctcatacatttattgtgaggattaaattactattgatgacagcagtcacagtgaccttccatgaatgcctcctgcatgtgcttgagtgggatgtttcagaggtgtgttttgttttatctcatcctcttcagagcctgtgcttactgtgtcattctgcctctctaagttaaatgtgcaggaaaggcttcctcaaagccactcagtggtgggagtgctgtctcagtagtcccgcaagcctgtaatcccagcactttgggaggccgaggccagcggatcacctgaggtcaggagttcgagaccagtctgaccaacatggtgaaaccccgactctactaaaaatacaaaaaaattagccagatatggtggctcatgcctgtagtcccagctacttgggaggctgaggcaggaggatcgcttgaactctggaggcagaggttgcagtgagctgagatcgtgccactgcactccagcctgggcaacagagtgagactctgtctcaaaaaatgtcttggccctccttgcaacaggctcttgggcaggcagccaccatgaaggggtgccaagagtatgagaagcatgaggtccatgcctgttccttctctgcctgtgagctgcgagaccgtccctcaacacacaggactgactggctgtctctcacaagccagcatcctggtgctcaggaaagccaggtggcagggcatggggaaggagtaccacctgtggccctgtgctggtcacatgtgtggccctcagaggaaatctccaaccctccaaacgcttgttcaggacttcctgtgcctgcacagtgcttgtaaatcctgcagcagtggcccattcagatagtcagaggtgtggcctgatttctccatgaccctctatccttccgatattttcatcgtgataggaattccacttttaacttttcatttcctttagttcagatctatgtcaaaatgcaaacacaccttggaggggaaatgttttaagccctcatccttcttttacatacttgtatggatgtatttctaatcataacaaactctgattagggggcctcaagagaccaaggaggagcaagaagaggtgtgaaggttctctggccgttctgccttctcactgcctcccaggctctgctcctttccccttccctcctcctggccgcactaagttctggggttggttactgtcatcaatatcttgttggtgtttttcatgctactaatagtaataatttgtgtatatttggaagtacccctgtgtcttttgggggaaaggtattattaacttggtttcttctatagattggaaaaataaaattttgaaccttattcaagaccctgaaaaagtaaactgtttccaaaatgaataataatgaccagagtcaacagtagtgcaggggagcattttatagtgctcactgtgtgtcaggtactcttctgagcccttaaatatatcagtgcgttcatcctcatgatatttcctagatgggaacatattatccccatcatagaaatctgtgaactgagccacatcagggttcaatagcttgcctgaggtcacacacagccaatcaagggtgcaaccgcataagaacccaggtggcctggccccagacccatgctctgcaccactacatagccacccacccacctcctccttctgccatgtttggcacagacttggccttggccaagtctctgagagaggtgaccactgggcatgccattagccagagttttccatgttatcgtaaattaagtttaaaatggaattctctttgtttacctagactttttttttttttaaagagacaaggttgtgctttctcacccaggctggagtgcagtggtgtgaacgggctcactgtagccttaaactcctgggctcaagggatcctcccacctcaatctcctgagtagcttggactacaggtgtccaccaccatgcctggctaatgtttaaattttttgtagagatgaggtcttgctgtgttgcctaggctaatctcgagcccctgggctcgagtgatcttcctgccttgcctcccaaagcattggaattataggcatgagccaccacactcggccccagaccctttttaagtaatcaatattctgtgtacaggcttgaaagactgacatttccaaaaagatatatttattagaggaaattgtgtaccaactttaagcaagagaatatgtatgctttaatcatttgagaaaaatgaactattgcttgaaaagaaaagagctaaatatgttgaacttttcccagtccagctgaaactgcccttcagagtttactgtggggtggggatgggggttgtgattgtccttttcaggttgaactttttgtattattgtacatcttatgttacaaatccttctacaagctgcacttagctcatattactctcagacattgaataattggtttaatgtgagactactttctgggaatgattcattggtatttatttgacatgttttagtgataatattgaatatatccactggaaaaatccaagaggaacctttaaatgaaatcatttccatggcagagttgggggcaagagagggagttggagttgatttctcatcgtgtgaatcccactccatcagcacgtggaaactgaggaagagggaaggagtggagaagaaccagacgagagacacggttccagatgctttcccaagtggctgtgccctcctcctatttgcggaggaatggctttggtctgcacctgcagctctggacggactgcctggggctggggctgtggaggcggacgactggggagtctgatggggaggtgggtggcgggggtgttgacaggaaaaatccgactggcggccttggagcagttcgaagagagggcgtgtcctttgcctgttggaattccaaccctggcgactttcagctacaccctcctccctcccctagccccacacaaaacaaaaatgcctcagagcttcagtgtaactggagcaataccagctgattctaacagtgtggcccagcagcgcctgctggctgggagcagggacagaaaatgcctgaggctccgaggtgggagcccaggctgggattcaggatttcgctgctccccgttcaaggcctctggagaatgttccaaagggaggtgtggatgtttcattcagtactttggagggagaaagaaatgggttctttctctgtattctctaagatagatttgttcttaatcttgaaaaatcatttctagccattttagaaaaaaaaaaacattagtacagtattagtaaatatggatgggataaaattttttttacatacacataggattcaatacatttttcatatgctgaccttataagtcatattgttttgaaattatatttattaaaaatgtgattagagttatattcattcatgtttgattctcttttaagaattattctctattagtacttttcttacatgattcaacttggacttattagagaaataaactctggcacactttctccagtcatattcgttgagcctgtatttataaaattggcatttattggacctctgctgtggatactatttacttcttttgaaatttgtaaaagaagaaaaaaagttgagcttttgtgatgacacacaaattcaaactaaatttgatgcttccaaagtatatggcagagacggatgcaactattcgttaccagaacagtggcgtcaggaagccccgtgcagtgggtaggggacacctggtgctgcctccacaccctgcccctgccagcccctgttgtcctgagcttccgcagctcccgcctgacgtttggctcagagtcgtccacactgctcgtgtccctcggctgtggagcagggccacagtctccctgcagggttgtttggagttagctgagccagcgtgtggaaagcataggtacttgacagaccaccagtgcctccatggagcaccaccattgttaactgcaggcttctctagccatttagaatacatatgaagactcagaaaaaccagttttacttttaggaaattacatattcatggcttgagctatagccactgactttgtgcttggaacaaaatacataattctttttggttcaaaagattagattcaaattattggtcatcagaaactgaagtttcctaaggcatatcacacgtaattcaaggttgctttgatgtgttattctgctaatccacaaccatggaagttcctggttagtgcaatgtttcatgctctgacagctatctttaagatgttgtttttgggttgccaggtgttcatttaaacacactggccatgtgtttgcacacgcacatgtgcatacacatagccactgcggagcgccaggagctgtaactgaacgtggacttgatagagcagtatgcgatgtttttgtcttcagggcaagctcttgatgcatagcttcatgtgacatctcgtttataacagcctgaggcatcagtaatctttatagcaagaattctagtgctgtgttatgcataccaagcttaccgtttattctgcccagtaaatacatggcttttatggagtcataaatcatgacagtaggagtcatacctctccaaaaaagaagagatttaaatctttagagttaacaagatttaatgtaatttagacattattcttacttagaagtaccattcttatttaaaggcagtatatctcatatctttaaagataactttagaaacttactgccagagaaacaaatattgattaagagcacactgtgtgccaagcattatgcgaggtgctggagagaaggaaggggaagaaaaggtcctcaccctcaagtaacttgaagcttagagggacaatgataaatagtaaaagattctagagtccgggcatggtggttcacacctgtaatcccaacactttgggaggctgaggtgggcggatcacctgaggtcaggagttcaagaccagcctggctaacatggtgaaaccctgtctctactaaaaatacaaaaagtagccgggcgtggtggcgcatgcctgtaatcccagctactcgggaggctgaggcgggagaatcacctgaactcgggaggcagaggttgcagtgagccgagatagcatcactgcactccagcctgggcagagcaagactccgtgtcaaacaaacaaacaaaaaagattctagagcagtctgatcagggtgagggttccgtactcttcttgtgccatgaagcaggaggaaaggcctcctgagggagctgaggctgcacgaggatgagcaaggtttcataatgtcctccagaggccagtttaccaagctgcatcagctcctccctcccagccaccctgcccttcataaagctctagttttgtaggggatggggtgggatggggtcacacctcagctgccggcatgagctaagggaccatataacagtcagcactgtccatcgcttgcttctctctctttctaatttacatacagctaaacacagatttttaatgaatggctgataagttttgacagatgtctgcacctgtgtaattatcaccccagtcaaggtacagagagcacctctatcccctcagaaagttttttccatgctggctgttgtgtgccagtgtgccaggagagcatggggcaggggaatgatggccctaagaaaggaaggaggaacagggggaatcttgaattacattctttccccacgtggagatagatttgtgctaattccacaacgtggaacatcctccttcgtttgcttagacttccctgggagcagtagcccatgtactggtggcctagctcaactgtggcttggttctgggcctgtaaagccatctttcccacctacagatgacattccctatcttcatcatgtgcttttagtcaggtttcctgcgggccagatgcatctgagagtgtgccctcattaatatgggactctgtgtatgtccagcacatgtggggtttattcacgtaccagtgattattattcaacatcgttccctttagtgcagcaagcactttctgagtgcttaccatgtgccactttctgtgaacctctgcagttcaacagtggagtcagaggcagtccttgttctcaagtagctcatgatctactgtgggagacagatggctagatgatagggtgtagtcatatcccattatttctgataccccaaatcttgatcagaagccttgatcagaagctaggaaggcttctgatcaagatttgtggtgtcaagaataacaacgattacagcaatagtagttgcttattgagtgtgtcctgtgtcctaggcacagttctgagtattcgtctcttacctcatttaatgatgatacctctcccatgttgcagatgaggagactgagggccagaatggttcagtagtgtacccaaggccacacagctgttaagtggcatgagaaagaaagaaactttcattttaagcctcttagatttttgtggattgtttgttactgcagcacgaaccagcccatcctcactgataagagccccagtgtgcggagtggattcctgagccagttaaaaggttgctacagcagtggaggcctggttggagggtggtgataagcctggaaataaaaggacatatgtgagagacagtaatttgataaagagtaatgaaagaggaagctttctttcaggtagcttattctgtttcattattgttgttttccttttgggaaagaagttgaattttcattgttggcttatgttttcaagggtgacctcagtattttattttattttatttttttgagacggagtcttgctctgtcgccaggttggaatgcagtggcgtgatttcggctcactgcaacctccacctcccaggttcaggcgattccccagcctcagcctcccaagtagctgggactttaatgtttttatattggtgattttgagcagagactgtattaccatctaaaacactacaagcctagcatgtaagctccatgtctgtttgctcctcattctctccagggcccctggcacagttccgggcccacagtgagtgctctgtaaacttttagggatgaacaaatgaatatttttaaatctgttcattgttttcacagttaaacttttctaagcacttatgtaatactgtgtttacttaattttcatttctcaccaacctttatggaagactaggtgataactggttaaattgtaatacagtatcataggtataatctcgaaaaggtaaaaatcaaatgtaacgaagcattataatccagtgactggaacattttatgcaagcctttgctctttatttatctatttttttatcatacacttcttcccagtttttgcttagtccttgttagcagttacattaaaatctgttttaagttccacctcagggaatatcaaaagttggttacttttctaaatgggcctttaattaaaattttaaaaaattagaccattgtgttagattttttaaaatgttggctaaaacagaaaaggttgatttcagtgcagttgggctgaaactatacttaaatagattaaagtataatctggcttttaaaaaaaacacatctgactgggatgaagtagttgtggtcttaactgaagcaggtgaatggaccatattcgcctttaagagccttctgactcccaggttttctgatttttaaaaacttcctatttagtcatatgtttttacttcactttatggtttaagtgagccaaccaacaaaagttactcataaaagatagtattttacttgtaacaattgcagaaaaagtgaaaagcttgacattacaggtagaaaggaagtcagtctctgtcccctgtgcgtttccgagactgtgtttctatttatttgccctttgtctgtttcccctgaccagcgtgcgtttctttctggaggcgcagggacctcggcttatttttctctgtctttgcattgcttgacagagggcctgacccagggtaggcactcccgcttcatgactacatctcattttttatttatctttgttatgatagatagcagataaagcagttgatttcagtcagaagcagaccacagcagcaggattctttccacggtgcatgttctggctgagtgttggtgggctccaccctagccgaacctgtgtctgcacacctgttgtgtcttcctgggaggctcccaggcatgctcctgtctggccagggtgcttcctcctcgctctccagctggctgaagggaagctgggcaagagtgtatgtgtttaggccacagggagagcacagactcccagagcatgaaccaaggggcttccaggcctcagggactgcctcctggtcccccagaggccacctcactcttactcctgtctccaggctggtgacctcacatggccccagccatctctccacatcctcccctccctgctgtggagcccccactgacagatgccttccccctgtgttttggctccaaattccaagtgagagtaattgcgtggcttcccttgggtctgtctccatccctgttgtagtccctcacagcccagactgtggactgcagaggcatcacctaggggcttgtctgagatgcagagtctcaggctctaccccagcatccggaatcagaccatcctcaggggattggaatgcacagaagcatttaagaagcgctttgtaaagccatggcctctcctgcgcaaagaactgcgtggtcccttttcctggagtaggaggctgtggctacagcattttcatctggaaggaggcctaggaaatgatgtttctgtggccttcctaccccctctccctcaccctggtgactctcagttggggagggctgccgggcagtgttctgggggcagggaggtggtgggagaatctggagagctggagagagtgaggtggtgaggtgggcctggcgtgttcaaggcagagaaggaaggaacgagggaactggctggagagacttggagggctcctcagagatgaggctgagtgggagtgaaggtttcgtcaaggttacgaaaggcctttgagttcaagctgaggcctttggacttggcccctcgctcgctttgccaggagacaggcggctccttgcctgagcctctgtgcttgcgctcctctccccagccccaggtctgcagagtgtgtggctgctgcaccctcaggtgtttgctcatctcctcacaggtctttcctgccccctacctgttaaaagtcggaccccaccacgccccccacctctctgtccctgctctttgggcccttccttttccccaggttgggctcttgcctttttctctgttccttcactgccacaggtcagactgtcttcatatgcatgcatttacaggcacatttgtggttggttttgtctgctctgctcttcgcaaccctagaatgtaagtacaaggaggataggcagggaccatttgtctcttcaccattctggtgctgggaacagcatagcatggtggtggagtgggctcactgagtgagctggtgagcatgggctgtcttgaggtgccggctgtgttaggctcttacccccacctcccccagtgtcttccaggcccccttcttatctaaggctgctacgtgttattggagaaaattataatacctgacttgtgagttccattccagaattcggccagccagtttctccccggcctctccggcagcctctctgcttctccctgatcctgcagcgtgtgcttgaaatccttcctcacggtgcacactcatcttcaatactgcagcatctgaccctgacttcatacgcttgcttgctaagtccacattctctgcaggaatcatcttctccctcccccatcgcaggggagttccctctctgcagggttagatccaccgctaccccccagcccccacccccactcccactcaggcaagccttgttgccccaggcccagacctctcagattccctcctgtcacactgccttcctgctcagcattaccagggctcctggtaagtttccgtggaagggtttcccttagcaaggcttctgttctataaaatgtttacaactcccctcccttccccatgagtttgagtctcaactctcaaaagacatctcccttgcgtctggctaatccgggtttgtttggcctcatcctttcagacttcagaatccaactcgctcttcatgagcctttgtcttttaccagtggtagtttcgttgactttttaccccatcatcctttgtgggtagattgaagctaagatagagttttctcttttttggtatcaaacccttgcatgctttggtgaagtggagcaaagcaaaatttgaacacccaaagaatttattcagaacggtgtaaaatgagactctctggatggaacaaataacaacattcgtaaaccacgtgtatatttagtaagctgcggagttattggaaattcacaggcgcttctgctccacacacattctgttgaattctcagcatcagacagctaggatgtcagtgctgtctgctagtgtccttgtgactgtggggacatttgtctgttttaaattgttgtgaggtttttattctgaaccttttcacatcttcagtatatgctcttcatttttcaatcagttaattcccaacagtcattgtcaccagtaatcttatattttacagtttaaaggattatatgataaactttccattttataaatggtaaaaatccctttcaggatttctggtgaagcacgtttgaagaaacatactggttggaaagcagcgtgaagtatgcccctgtggaaacactaccgggagccaaggagattgccctctcatcgcggggccagtcctagaagccacttcttccccaaggcaatggcaggaggaaagatttgacttagtgtggggatgataaagatcaggaggttgcagcacatcatcataggaagatacagagaggctgtgaggagcaagacaagtctgaaagccaccaagagggagacagtactagggagacttggcagggtttgtagtaaagcgaaactttgccagtcattagaaattagtttagaggcattaaaatgctgcccaaatcttggaagataaacttgtgctctggtgaattattcctctctctctccctaattcctaattgcaagaagttgctctagaatcagctgggactgaggggttgattgtggtggatttgctcccctcctccacctgcaccttggcattacctaagttcccccttattgggtgctcatatctttagtgcaaatattttaaaagcccctccatgtcataaatcactcctcaaatataaagtacttcctgaaaattgcaaatcttactcttgctgttcaaaatattggttgttctcatgaagaccctactgagatggaagcagcctacctgaaaattgtccctattcgtaccatgtgcttaggtaaaaagactcaatttcattcagatggcatttctccttacattaatttacaaatttaatatgatcccagtaataccctcaggttttttttgagctagattgattctaaatttatttagataaataaatgagcagtaatagccaggaaattccctgaaaaagaaaaataacagctagttctaccagatactaaaaatgttatacagcttccactgttcaaaacaacctggcattggcacgtgaaggggctgacaggctaatggggcacagtagaaaaatgcagaaatagattcaaatgtttttggaaatgtagtgtatgataaagctggcatctcagatcactgggaggaaaagaaggaatatttaataaaaagtatggggacaaggatatccgctacctttagatcaggggttccccaatccctggtccgtggactggtactggtccatggcctgttaggaaccaggccacacagctgagctctgcctctagtcaggtcagaggtggcattagagtctcacaggagcgtgaatactgttgtgaactgtgcatgcgagggatctaggttgcaagctgtctatgagaatctaatgcctaatgatctgaggtggaacagtttcatcctgaagtcttccccgcaacccctcttcccccgagtctgtggaaaaattgccttccatgaaatcagtccctggtgccaaaatggttgggaactcctcctttagataaaactggatacatcccttataacatagacatcagtttgaataaactgtaaatggcacaggtgtaaatgtaacagcacctgaacccatgcaagtattaggagaaaacatgaatgagttccgttatataacctccgagtctggaagcaataagagaaaaggttgataaatttaagtacatttttaaaaagttggatgacaagaagcaaataagcacataaaatgataaagaaaaaatagtggaaaagatttgcaacttaaatcacaaacagaaagcctaatatccataatacaaagagtttccaaaaataaaggaaaaaaccaatagccctacagaaaaatggataaaagatatgaatagacagtttacagaaaaacgcaaaggtgaaacagtgctcaactttgctcataaaaagaaaaatgcacattaaactactcactgagataccatttttcacctgtgtgatatcaaatgtagttggcaagaccatagggcaacaaatattctcttgctgtggtggaaatgcaaaatggagccgtcttcgtagataggaatttggtagttctggtaaaattcatatgcatttgctttttgactcagcagtcttgcttttaggactctatactagaaactagttcaagaccattaattgcaacattatttcttattccaaggagttagaaacaaaccaggtgtccatcaggaggggatttctggtatgtccatgtaatgaaatacaatgcattgtaaaaatgaatgaagtagacctgtatatattctgcagagtgatctgagtgatgtattattatgtggaaatagcaatcgcaaaacatttttatagtatactatatcttttatgtaatacagagggagaaatatgaatatatgtacatattcatatatttatatacacatatgtatataaatatacatacacacacacacacacaccacacattttttctatataatttaaaaaagaaaccatggaagaataaactaaaaactcattttaaacatggttagctttaagaggagaggccagggtggaatagacagggatagaaactaaaattctttgagtgtgcctgttttatagaattactttgaaatcaggtatatgttttacttaattaaaaattaaaaaggaaatacaaatacaatctcttgaaagaaagaaaaaaaagggagagggttggaggaaggaagaaggagaaaaggaaggaaggaatctatgtatatctcacagagaggatatttgaactgattttaaaacatcgtattttgacaatgtaattctagtggggtatagcctaggaacagaagagccacagagaaattataaactgcattctgttagtagcaacgttggtattgttactctgaaatacttacactgtgtgtatgtgtacacactgttttatatgtgtgtgctacatactttattttagaatagagaaaactgattatgttaaagctgttagacagcaagaatttcagcataatagagatacaaagataaaagcaaagaggtgaagtttaaaacccttaaagtttgagttggaaatagcagtatgaaatcatggttagtatttttctttccagaaagtgcctatttcctacccttattcactgaaaagaactaaaatcgttgagccctggtatcatccaaattgtgctttcttaataccatttttctctataaggaaccagggctccttggagatatggctggttttaggtggggcaggaaatggggaaggtggacctcggacatatagatgtacaagaaagttgccaaagtccccctgcagctatgtcacaaggacacaagacccttaaagtgttgtccattgtccaaagcagggatggtttgaggatgaaaaaaaaaaatgcagtggattgaaacacatagaaaacacaactggtttgtgtaaaaaacacaaaaatcccatagttcgtaatgatgctaagaatgtatgcagtaagtataataccacgtgtgaagttttcttgctaaaacaaattaattgcaaccaaatcaaacctctagatctaactgtcagtttagagaaaatacaggcatgagagagaagggcatgttaaagaaaacgtagtcaccaaatccagagggcattaaaaagaatttacaagacaaacagccagcttgctcagtgacagatggcttgaaaggagtggggaggaacatacctttacagattaaaactatttaggaggcacagcaagcagatgctctgtgttgactttgttggagtgctgatttgaacaaaccagttgtaaaggacatttttgagatgttcatggagagatgtccatggatatttgaacgtggactggctcttaggtaatattaagaaattgtaattaatctttctaggcaaaacaatggcaatctggttatttttgttaaggtgctgtctgttagaaataccaaggtattagctggtgaaatgagttgctgagatttattttaaatactcttggtgggaaaaagtgtgggaagaagacagatgaaacaagttgacaacatggtggtttctgaagccgaatgttgggtgtgtgagtatgtattatacctccctctctctgtactttgtggtgtgtttggaaattttcatttaaaaaaatggttaaaaatttttaaagagttgttattgttgttgacccgaggttgagagctcttggtgggtaggggactcatcatggaatctgaaaggcagctttatcaaaagagtaacgtgtgcagatgggcgccgttcatcccctctcccccatacagacacatttttgttgttatattcatagacacaacagacatttctacaggatc

SEQ ID NO: 333 - DNA, 37322 bp, Homo sapiens
gatctataaatgtgaaaaagaagtggctgtagaccttggtgggtttcatttcagtggtggggtgggggaacaaagcgccattagatgagcaatgaggactgaggtggaggaatgtgagttgagtattgagaattcttcatagaactttggttacaatggagagaatatatgtaaagagaaccgtaactgtggatgtagagaggggtccagggtattaaattatgttttaaaattatcaatgataagagaccctttcaggttgaatattaagaggaaggggccatctctttttagatctacaaactgaattcaccacgcccctatttccacactttacttccttgtttctattctggggaagcctaaaacttcacaaaagggatcgtgtagagtttggccttaatgtctattaactgcaaggatggatggatggatggatggatggatggatggatggatggatggatgcaagatgtgtcaaacagctgctggtaatttatggtattttatctctcaggacagagttctcacacaagtgactgaatctgtggcattggtggctgagagcaggcaatttttcaggtctctgcaagatgggagcacccagcttcagtgttcagaagcagatttaggccgacttccgtaccttacatcctggagggatccaccctgacttgagcaggtgaggtcacagacaggcttgctttccacaatggggaaaagattacagcctgctcagaagcgtgttgtggtccagctcctgtgtcattcaaaaagactccataaagtgcagatccagatcctctccaaacttgaactcaaccaatgtcatggagagacattcttaatccccttctatgaaaacagtgtcattagaagcacccagaggccacacacacaccctggaaatgtaatgccagcagtagctctagaacctgcagactcaagtgcctgttgctcattgtttttaggctacatgtgaaaatggaccattttgcaataaaaacataatgcaatgatgattattagagcattttgtatactagggatttttttaagttatctgaacatcaaattaaatataatgacaatgaaagaatttccacctgtcatatcatcaaagtataaaaagaaaccattcaggattccagtaaggtgggcacatgcagggaagtctaccctgtttcatattggtggtggggatgtcatttagtacaacctctttccaggttgatttggtaatttctattaaagactctatgcatccccgatctgcatgtgtttagggcctgctccttcaagtattcatcctcagcatgacccctgtccctctgagagtgcatattcttcctgatacaggaactgtctgcggactccagtttctaaagcaatggcccagacacactcccttgtctacagagtaggaaatttaggtctgacaaggctgtctttcagaagagagacagaactgggagcttggcttcagagctgaagatacagatttcagtagtggcctgggtcagcaggaaagcaagatttgcttggttatggtgtgatgtgcagctcagcgtcacagtctgcatgggggcatatagggtgccggtccctgcttttccacttagtggtaggatgctccccagccaggttgcttaacctgcaaacatcactgtttcttaagctacaggatggtacagagattatatcctctacctcccaggaatgttgtgggaaattcatgagatagaaaagtaccagagttcaggaagggtgagtccccaaggctccctgaggccagaggtactgcccttctgcgggactttatgttacaatcaacctatgacaatgcacaaataaatggtcattcaattacaaaagagtacaaggacttatatttactcagttcatccaatatcaattataataacccacagtgtaaactggaaagtaactacatggaaatcacttctccttccttcccatctaaggtctcagaagtgctttcccagatgtgatctcattaacctctatatcgatctgagaggtgttaaccaaaactggccagcacaggggaaattactcacctaaggccttataatgggcctggccccccgtgttctattgcattgtttttctgcaaagcctaatcttgcagggttacattatacatatttttctttctttttcttttcgttttaccaaaagataaaaatatatacttttttattgttaagaaacattttcataaataagtacttatttcattccttactgaaatggcttttttcttactgacccattgaaaccatgttggctatgttcaacataactagagatatctttggcgttttcctcccttagcttcatatcttgtagaacatcttgtacaaaaaagtagatttacagaaaaacatacatataaatcacttattaatctccaaatgtagtaaaataacatagcaaaaactttatcaaatccatttcgtgcacaaactggacagatctgttacgtataatctctatatgcatctgcagtgttttataaattggtgctttgacatcaaaaaggaggtttacaaaaagtcccctctagtaatatcaatgactcggaatgatctcactatcattgcatctcaaattcccttgaatttatactcatcactgtcatatcaccattcttacaaaagcggttattttaaggaaaaagatgcagtgtgattatgatataagtaacattcaaaatttcatgttatcaagagttaagcagagtactaatttcccctttataaacacatgcacatccacgtagaaattcaaagtcaaactgcgtaaagtgcttttattgacagaaggcatcacacacattcccaagcagcattgttcccatgagaaactgaaaacgtatttctttgaatctagaatgcatcttccctcttccaggtgtaaccattcagagtttttcctggagcgattccagcttgtttccttttggtgccttccttaagaaattttgcagctgtttctggtgcagtttttgggtgggctctggggtgggcagacgatcttcactttgcagaggctgctccttttgtgagtggagctggtggtgagggagtaggagaggcctcgcatcatcctggcattcaggcccttagccatggagaaggacttgaggtggcttcttaaggcaatggggagcgggagcttgtccaccagatgcacaggtgtgcaggacacgatggtgcggcagcagaggtcttgcaagctcagtaccttgctcggcctcccgagccagttcaacctgtgccgcagcagcactatcctggccagctccgtgaaagactctatgatgttgaaattgcacagagggctgacctcaaagaaggtcacgcccaggcgctcggcgtaggcctgggcctgctccctgggcacctgcctcttgaatgccagatgtaggcgattccccaccaggattttagggacaccaggggcatgttcctcaatcttcttaatccatcgatccataccctcgaaagaccagcggtttgcaatgtcgtagaccaggatcactccttgtgcaccacgagagtaggagcggaatatggtacaaaatcttccctgccccgacgtatcccagagcttcagcttcacccgctggccgtccagcaggatggtggtcgtcttgtagtcgattccccccaggtgactgtacggggactcggccgtgccgtcctgcaggctctccaggatctcactcttgcctacgtccctgtcgcccaccagcaggaacttgagcaggaagtcgtaggcctggtcggggctgcccggggcgctcatcgtgctggccccgccccccgcctgggccagaccagcaaggttgtgcgcagaggcggtgccgggcctatttttcttgagaaattagcatagaacataaaaaatgggatggggaagtctacgaaataaagtgaaatgaggtggtggctttgatggttttcttttacaaaccctgggaaaccggttcagcgattgttttcctttttcttacccagcacagagtagtgacacagcagttaattcatcatggaaacctatacatttcccttaaaactttcatgtgatcgttatggaaccatgccttttggattatgtcaaaggaatctcctttaaaggaaggacgggtatgagataggaagcagactaagatgtgttgagtaccgtatgtaccctacgctgtgtatgacgcttaaaataatttgttcttttacttctcagaacaattgtctttggtagctatgattgttttcattttacaaatgagaaaaggcaaactcagaaatgttacgtaatttttaaaaatcttgccgttagtatagagatcacagaaatcacaatcctgagccagtgctctccttatataatgccccacacatcctttctactctgtggccatgccgggtttaggagtaagtgtgaactgtctgtgcatgtgatccttgacaagccacgcatgtttgcatgggcactaacacattttttgctgcagggggacatctcccataaatataagagccaagatctcagaagaaacatctaggatatggatttttctagagtgtctcataaataatattcagccaagaaagatgtgttgaaataacgcatgcatagatcaatgaagggttttagatttaacacacgtacagatcctataacaaaacagcaaaactgacaaaatatataaatggttcatggatgatgaaatgcaaatggccaataatcataagaaaatgcattctagctcactaatatataaggaatgcaaatgcaactatctaaatatacttttatcacctatcgtttgacaaaatttcaatgtagaaaaaactgaataagaatttttttttaatttgcaaaagaaaaaggtaaaagtggctctgtgtgtgtctgtgtatgggggcaggatgagggaccaaatacatcaaggaaatggaaacacacttctcagttataaatgcatttaaatattgtaactacaacaggtataaagatggttaaaggaatgagaatgctcagacacatataagggagtttaaattattgaaatcaagccccaagggatagatgtgtaagcatgtaatggatgaaacatttttcacatgtacaaaatagccaggtaagaggttatttgctacagtattgctgaaatctttttaaaaaggaaaaaatgagaagcattctaaatactcatcaatacagaacaaacaataacaaagttgtctccctaatttacacaaactcccctaaagacatcgccatgatctgaatggtggaatctgaccatttcttaagccttggaagtgcatcttctaaaagggaggtgctctcagggtcctctagggagggtgagggatagaacctcattccaatcctgccacttacctcaagaggcgacttaggttctgtgagcctgagcttggtcatctgtgaaatgggactgactataccatcctcacggagttattcccaggcataaatgggaaaacctgtccagggtatatggcatggaatgggaggcttcaatggccctttaaatattgagacatagcagtaggggttagctgaacctcaaggccaaggcaggcatcgtgaaaaatcattactcattgtttctcctaatgaaaacacagacatccatataaagaaggcaaatctccctgatacaccttgatttcagagttttagagatggagttctctacattcttgtgtgtttcataatctcacgaaaactgttcaacatcatgcctccgagaagacacaaaaccagttccccatgctggtaagaaaaaaactgatcggtgtaaatgtaaaaacatatgctccagggcatccacaaaatgaaacaccaggtagcagtgacggggctgtagaaaggtgacggagagaggtcggaggcactggagcagcatctggggaactgtgtctatagtgtcctggagaggggaagactgaaagagagtgtgagaaggtctgagaagcctgtacagggatagagttatggagagtgaatgccttgctctctggagggacccctcctcccccgcccccgcccccgccccctccgacagtgtggacacttcaacctacactgagaagggaagagatgataaatcagtgaatgcgatgtagatttaggggtcaacagcaaatggacctgctttaatatacatgtgaattttccaaacagaactggaatcaaagtaaacaagtcattttgaaacatgttactctgcaaaatgtacaaaaacagagatagctctgatgcctcctagtggccagagacagaaacgcagctctgataatctcaaaccagggactcaggaagagggaggcatggaggttggaggttagctccaatgtatcagccacagttttctggaattattcacctaatggtagcaatttccatgtatccatcatgttccagaatatatgaaactgatattggttccaatccccgctggaactaaagttgcatccatgattttgtatttggggtggtagagctagaggacacacccacacaaacacccacacacacacacaaaacctctgtcaattggacttgttatttacttctttcacaataaaatagaatataaggaatgctttttcaaattaatggacattatgtacaccttaactttgacaatttgttccaaagtattttgtgtgttcaaattttcatcagaatacttttattcccaaataccagtttttgaacagtacacaagagcatattgataaatcaaaattaacctgagctctcactggtcaactcccactccttaaccccaaggggtctgctgttcctaggatggtgcatactctccagacatgtccctgaaggtgaggtacacatcaacacgttcacctacacacacacattgtcttctccaaaagtgcaatcatggtacttatcttttgcatcttgtcattataaattctcaagattttaaaatatttgcattttattagttcttgtggggttggcgtattttagtatgtttattgttcatgtacatttcatttaaattctctgttgaaatagttgccattttgttactatgtttcacaaatcatggatactaacccaattaaacttcaaaatttgactttaaaattacacagatcttaaatttcaaagaaaaaacattgaaaaacacctggggagcaggtactgccagcctggagggagattagagcattcagggccctggaggaatgaagagaaatgataaaagtctagagtattacagagtttgtgcttatcaggaaacaacaaagttgtctccctgatttacgtaaactcctctaaaggcagcagcctaatttgaataatggtgataatgaccttgggtagcagttaagattaaaggagatgaggtgtaaagtgcatttgcttacagtaattcagtgcatgtttctttccttctctgcagctcacctgtcccaaggccaacacctgagcttctgcctgagcccacttgccactttaaggatcagccctctcatgtggccctacaaccagatctcatggcacaaagcacaggatttcacttcccctgtcatcttcagaggagttgttgagtgggaacccatgggactacaatagcaggggagtggaatctgaccatttctcaaaccctggaaagccatcttctaaaagggggtgctcagggtcctctagggaaggtgagggatggaacctcattccaatcctgccacttacttggaaaagtgatttaggctctgtgagcctgagcttggttagctgtgaaatgggattgactataccaaccttacagagcagtcctgaggggtaaatgagaaaatctgttgagaatatacagcagggagtggcctttaagtattggtacacagcatgaggggctggctgagcctcaaggctaaggtagtcatcatgaaaaaatcacttctcattgtttcgcctaatgacaacacaaacatcgtgaagaaagaagcaatctctctctgaaatgccttaagttcaaagttttagagaccaaaggtctctgcattcttaggtgcttgaaagttcctaagagctattcaacatcatgcctctgagcagacccaaatccacttccccatagtggtaggacaggagcgtttgtgaactcacctggtgagctccacgacagatcacatcagggacacaaggagtggcaattatctaatgagtgctccagcactgctcagtattttaatatgtttataggaatcctgtagaccggttctgcagtaaacagtgcaaggttcccagatcacacattatccagctacattacaagaggatttcagctatccgctgcctccttgagaggcaaaaatctaggaattacaagaatttctataacagacaattttctattctttcattaggtaataactgaaagtgtattgagctttaaaagcatactagtctactggaggtgtctcattaactaaagtggaaagagggtaagaattcaaatgaatatatgggtaacttcatggttcacatttgagaggagatggtttcttcaaattaactttaaactttctcaaactccaaagaattgaaaattcttttttgttttaaaaatccttttttgttcctcatcacctgatacagttcgaatatatgtccctgccaaatttcatgttgaattataatccccagtgttggaggttgggcctggtgtgaggtgtttgggtcatgggggcagatctctcaaggcttggtactgtcctcatgatagtgagtctcctgagatctggttaagtgtgtggcacccccccgcccccccaccgctcccaccgccactttctctctcctgctttcaccatgtgacatacatacttcagcttcacgttccatcatgagtaaaagctccctgaggccttctcagaagctaaacagatgttggtgccatgtttgtaagcctgcagaaccatgagccaattaaacatctattctttataaattacccagtcttaggcatttctttatagcaatgcaagaatggcctaatacatcatcaattcaattcagccacaggatatctttcttttctcctctcccctcttctctctcccctcctctccctttcctttcccctccccctcccctccctctctccctctttgactctgtcttttccttctccttcaaaaaattttctaattttctacattctctattaacattatttcccatttactctttatcccactgcgctgtggcttctgtccccaggattgcaatgaacatgatctcgccaaggttacaatcccctttttggtcactaggttcagttttttgtttacatatataaccatactgagtattgctttcaatgaactcataaaatatgcatgcttgtccagtcgtttctttaaatttaacacaaatctgtgacaggctctggagcatgaggtactggacacaaatccaagctgtcccactccctaactatgcagtatcaagcaaagtctttattctctctgtcattcagtttttcatctataaaataaggattagtcacagtatctaccttgtaaaacagctgtgagcactgactgactcaatacattaaaagcatacagttcataagaaatgttagtcattttaaattctttttacatatcttactggcattagtatcactgtagacatgaaaagtaggatatcagccaatgaatagtttcctagggccaccataacaaattatcacgaactttgcacatttaaacaacagaatttcattatctcatggttcagaagtataaaaccaaagcccaaagtacaaaaccaaggtgtaggcaggaccacactgcctccaaaagctttaggggagaatcctttcttagctcttccagctcctcctttatttggcttgaggcagcataactccaatctctacttcaatcttcacatggccttcttccttgcatgtgtcaaatctccctctgctttcttttatatagacaccagtcattggagttaggcatcaacctacattcaggatatttacttctggagatctttcacttaattatatctacatagaccctatttccaaataaagtttgggtgggttaggtttgggacatgttttgagggggacataattctacccactacagttaaacacgcaagttacactacaaatgttagataaggtagcttttatatgttaatatataaatgctgtatgcatatttaatctaggtttttatcctctgtgtatgaagtactcttaaacaacagagataggtcaattatatcaagagacaatgcaataaaaaccaatattaatctccccaaaacacttgtagacacacacacacaaaatgaaaaagaatcagatttggacaatcaacaaagtcataaattataatgtagtatatggttccattgtgaaaaaatatatatatctatctctctctacatgggtttatatgtatgtgtgtgtggctaaaaataagttagtgtactacatggagagaaaaaagatctggagaatagatacgaataaattaatacaggccatctttgtattatggagatggagaagatttagacagaatatttttaatttctaatatacatttcaattatgtttcatatggcttaaacaataaaaaaagttaataatgtgacaaagtcattaagataatgttttgtaaatcaggaaaatctgtgaccctagtcacaaaatgatagtgtagaaatacatttattgactaagaatcacattcatatgctgtggtataaaaatagtatattaaaaagatttatttaataaatcagtatatttgccttggagggagatagaggatatttgttttataaatttgcaattccctagtgttttaaatgtggaaatttcattgttcaaaatgttaaaaacaaaaaacactgtaattgtgacctgattatatttatgatgcccacatattcattgctctggaaacatgcatatagaaaattccagaaagctttgttctctacaattctatacaatagaatacatgtgcctcccttactccactcaaatctcctacccctttccaagctcttggttgactttaatttctgcaattctgactctgggcaccaggtgagagcattctgtatttcttccaatgaaaaggcataatttgtataaacagaaacaaaattttcctcaaagtagataatgaaacaataagtacagcatgaccacaactctctttgaaaaattcatgtttacaaaaagatggacaggtcatatacatagttttgtttccttgcatactcctatgtctacatctaattagtttattaaataggttttgggtgtctacttcagaggttcaaacatcttatgatgaaatgctactggaaattttataatggatggatcagggtgacaacactgaaatacagtgatcaatttcaagcttacaggaggagagacaaccagacccaatgaacctactaatttgacactttagtaataaaggacaccacttctgaggtactcttgctgaataagctgaatttgatcaaacttctaaatctaattaccaatttaaaagaaataagagaggctagaggaaattaataaacaacacaataagaatccaatcagcaaaatccataatgcaccctccaaaggatgaaagatccagttttctaagcaaataaatagaaaggtttttttttttaaacaacagatagcttttaagagacaacacttcaaggagagttaaagagaaagtaaaattaaaatcacaaggagatactatcacatgtctaccagaaagagaaaaatgaaaaagatagaaaataccaagtgttggtgaggatgtggagcagtagaagtctcaacattgctagtgggaatatagattggaacaaccactttgaacaactgtttgacagtatccactgagctgaagatacacatgtcatatgactcagaaatgccactctttggtgcatccctaggagaaatggcctcacccatcaaaggaaatcagaccagccctgcctttcaaccagttgaaggatagaaaccagaataaatgtgatttccatgtgtaaaagcactcggagttcctgaaagggaatagaattaactgtagaagtccaaggaattatttcaacagccaggttgtctaaggaaaacttaactgtgatgattattacctttttaaaaataattatacttttgtttttacattatcttgtttgtttttcttaaataaatatcatctggtacatggaagaaaggctactgaaggatagttatcactcaaagacatatggtcctgtctaccatcaaccaccattggctgacatggtttggcaaatgtcttttcctcttttctaagtatactggttaggagtgttggctgtggagacagactagggcccaaccctgcttcttaaatttgtgggactttgaatacatttgcttcagcttgcagtagctcaaatgcttcatctgtaaaacaaggataatagagtactgacctaagaagacaaaatatttttaaacaaatattgccttgccattttggtcaggaatcccataattttaaaaattctactgcggagatatcagcataactggctctctgtgaccttgtgagagtaacagaattactctatacttcagttgtctttaaggtacaatggggaaaacaattatccccacctcatgggttgttgttttgagaattacttgagttgaggcacaaaagcccttagaacagtggttggcacatagtaaactgctcattaaatgtgagtttgcatgttgagatttttcaagttctaaaagtttgacagtttgcacgtgtcttcaataaagtttaatacaacagaatcttaatcatcaactgatgcattttaaaataacttcttttcactacaaccacgtttggatgacctaattaccttgagaatatctcaagagcaaatggaaggactgctctcagaaaacggtgtcatttctccacatggctatacaaaaaactgaggggtcatccttgactgtgccttatccccatgcaccctacacgcacagccacttcaagttctgcctgctgtacctccaaacacgccctgtccaggttcactcctccctacctgcacacagctgcagccctggtcccatccacctgtgcctcttccctggacttctgcaatattttcctaatggttatccccactccctatcttgtccctttccagtccattccccacacagcagtcagagtcgccttctgacaacaggaatcgcaatcaacggcacatttacaaattgtaattcacctgaatctctcactagccctactccaacctctgacccaagggatctgttgtcctaaggatgttgcatactcttcagatgtgtccctgtaggtgaggtgcacatgaatacattcacccgattcacatagtcttctccaaaagtacaatcacagtcctcatcttctgttgcaatttttttccactttatataaattctcaggatttttaagtatttgcattttattagtacttttggttttggcatatttaacaagattattgttcatgtttattttatgtaaattttctgttgaaatgaattaccaatatctttgtcattagtgtgtgttacaaattacggatactaatcctatatatggtacagtttgcaaatactttctccaatgttttaagataattcttaattttattactatcgaaattgattttcaatttcaaaaatattatgacttaaaaactttacagatcatttttttttttaagaaaaatttgaatgctcccattggaatggcagcccccagggaaattagatcattcagggaccaggaggcatgaagacaaaatgaggaaaactttagaataactaaaaactagttgctgatagggattttatctcctctatcatcttcatcaccttgagaggttgaagagtgagcacctcacctctggggccacaatagcaagagagtggaatatgaccatttctcaagtcctggaagcccaacttctaaaagaaaggtgctcaggatcctctagggagggtgagggatggaacctcattccaatcctgccacttacctagggaggtgacttagactctgtgagcctgagcttagtcatctgtgaaatggaactgattatacaattgttacagagctgtccccaggcataaatgagaaacgttgtccaaagtatatggaatggagtgggacttcaatggcctttaaatgttgagacatagcagtaagggctggctgagcctcagggctcaggagacattgtgaaaaatcatttctcattgtttctcctaataagaacacaaacatctagaagaaagaagcaaatatctctctgatatgccttgagttcaaagtttttgagatagaaggttttctatattcttaggtattatcagaaggtcacaggagtcattcaatatcatgcctcttagcagactcagatcaagttcccccacactggaatgacaaacatatttgtgaactcacctgaagagctctgtgatagattgcatgaggaaagcaaagtatggtgtttgcttaatagctgcttctggacagtttggtatgttaatatgtttataggaaaaatctgaacctgtccaccagtcaccagggcaagggtcctcagatcatgcatgatccagtcacatcacaccaggatttcagccatcctctacctccctgagaggcaaaaatccagaaattactagcatttctgtgacacacagttgtccgttctttcctcatctagtaactatatttgtattgagctcaaaacatatactagtccattggagacatctcatgagctctaaagtggaaataggagagtaagaaacaaaataatatataggaaaattcaagggttaaatacgagatgaaatgggttcttcacattagcttttaaacttactgaaatttcaagaaattgaagatttttaaaaattcttcctttaacccctcaccgcctattcagccacaggattggatatctttcctcccccaacttttttttctctctttccttttttccaaccaaagttaaagctctaaaacgagttttctgcacttcctacaaaactacaatgagatatcatctcactccagttaaaatggctttctgcaaaagacaggcaataacacatgctggcaaagatgtggagaaaagggaaccctcatacactgttgatgggaatgtaaattagtacaaccactgtggagaacagtacggagggtcctcaaaatctaaaaatagagctgccatatgacccagcaatcccactgctggttatacatccaaaagaaagaaaatcagtatatcgaagagtatcttcactcccatgtttgttgcaacattattcataatggccaagatttggaagcaacctaagtgtccatcaacagattaatggaaaaagaaaatgtggtacatatacagaatggagtactattcagccataaaaataaagagattctgtcatttgcaacaacatggatggaacaggtggtcattacattaagtgaagtaagccaggcacagaaagacaaatatcacatgttctcacttatctgtgggaccaaaactcaaaaaataattgaacccatggagatagagggtagaaggatggttaccagagtctgggtagaggcggggaggtgagggagaggtggggatggttaatgagtacaaaaaatagaatgaatgaataaggcctagtatttgatagcactacagggtgactacaatcaataataatttaattgtacattttaaaataactaaaataatataattggattgtttgtaacacaaaggaaaaatgcttgaggggatggataccccattttccatgatgtgactattatgcattgcatgcatgtatcaaaatatctcatgtaccccataaatatatacacctatcacccacaaaaattaaaaattaaaaaaaagcttaaaggatattgagtgttgatttttctctccttccccaaacactattggaaggttaaaaaaaaaatttcctgaaatcataaaacacgtgttttcctgtgtctggctgtgttcaaccaacataatatatatgtgatttacattttgttgtctgtagttgtagatagtcattttcattgatggatggtatacatggtatggatatttcttttcttttgagatggagtccagctctgttccccaggctggagtgcagtggtgtgatcttggctcactgcaacctccatctcccgggttcaagctattctcctgcctcagcctcccgagtagctgggattacaggtgcccaccaccatgcccagctacgttttgtatttttagtagagatggggtttcattgtgttggccaggttggtctcaaactcctgacctcaggtgatctgcccgcctcagcctcccaaagtgctgagattacaagcgtgagccaccgcacccggcctgtatggatatttcacgacatatgtatctggtatgaaggtttgcaaattttgacctactatgaataatggtgctttgaacattcttgtacatatcttttagatggacgtttatttttactttacttcgacatatatgattgagtggcatttctgagttagggtatatgtatgttcagctcactagacactgccagtttttcaaagtgttccaatccgtattcccaccagcagtgttgagagttccactgctccacatcctcaccaacacttcacttggcattttcaatcttttttatttcttgtgggtctatggtggtatctaattatggttttaaatgtaatttctttgatttaatttctctttaatttaactctgaaatgtttcgtctcatttaatctaaagtgggttccaccgcatttttttttaaccttctaatttatttgcttaaaatctggatctttagtcttgtggaatgctgatgctgttaaatacctttctgcatatggaggtgatcatataattatttccttggctgtatcaatatactagattatagtaatagttttattgatattgaaacatgtttatatatataaaagccccataaggtcatgacctgtattttatgtcctcttttgtttactaatattttatttaagaacattagttcatattctgtgatgagattattctggaatttcatttctcctgcagtttttggcatgtttcagaatcaactttatgtacttgcttcattgtttcatatattccctatgcccttcgactattttaaatagtattggtattatcataccttgaaagttttgctagaattctctttgggaaagctctgggtctggtgctttttgaaggcagataatttaaccaaattcactatgtcttgtatgcaattggtctgttaagactttttgtgtttcttgaggccagtctgggtaagttgtgtttttctagaaaattactgattttatctgtttccaaatgtatttgaatagaattatgcaaatttttcagttaagagacttgaaatttccttcgttttgaagaccttgtcaccgtttctgtttcaaaattgtgtatttgtgttttcttcaattttcttgaatactttacccagtgacttttcatgtttttggtatctcctcaaataaatcttccttacttttacatataaattatactgtagtttgcctttttaacccatttatttctgttttaacctttaactattcaactgcattcttttagtttatgttgtggttctttatctggctttttgaattgattgttcaattcctttttattgatatagctatgtaatgcataaaaatattatctgaccactgctctagctgtaaattctgaatatgttctgtttttattttcattactctcattgcattctacaattttaatctgtatttgcatttgggcccaagcttaacagcctcagatattagtatgatttttcatatatctcattgctgcttctgcagttttcctctataaaactacatttttggctgggtgtggtggctcacacctgcaatcccaacacttttggaggccgaggcgggtggagcacctgaggtcaggagttcaagaccagcctggccaagatggtgaaaccccatctctactaaattagctgggcatggtggcaggcgcctgtaatcccagctactcaggagactgaggcagagaattgcttgaaaccgggagggagaggttgcagtgagccaagattgcgccactgcactccagcctgggcgacagagtgagactccacctaaacaaacaaacaaaaaaacccaaacaaacaaataaacaaaaaaactacatttgtgttgtgtgactaggtacacaagtattaatacataatgtattcctagtgaattttaacctttactattattaggtgtgcttttttatcttttaaaatccattttgttctcaattctgccctcttaaaaattaagattgtgaaaaatattccatgctcatggataggaagaatcaatattgttaaaatggtcatactgcccaaagcaatttacagattcaatgctattctattaaactactagcaatgtttttcacagaactagaataaaaattctaaaattcacttggaaccaaaagagagcctgaataaccaaagcaatcctaaatgaaaagtgcaaagatggaggcatcacactacctgacttcaaactataatacaaggctatagtaattaaaacagcatggtactggtacaaaacagacacgcagacaaatggaacataataaagaacacagaaataaagccacacacctacaaccatctgatcttcaacaaagttaacaataacaagcaatggggaaaggacttcctattcaataaatggtgctagaataactggctagacatatgcagaagattgaaacttcacctttacccttcaaaaatcaactcaaaatgcattaaagacttaaatgtaaaacataaaactataaataccctagaagaaaacttaggaaataccattctagacatcagccctggcaaagacttcatgatgaagacaccaaaagcaactgtagtaaaaacaaatattgacaagcaggacctaatgaaactaaagagcttctgcacagcaaaagaaactatcaacagagcagacagacaacctacagaatgggagaaaacatctgtaaactatgcatcttccaaaggtctaatatccaggatctataaggaactaaatcaacaagcagaaaaacaaccccattaaaaaatgggcaaaggacatgaacagacactactcaaaagaagatatacacatgaccaacaagcatatgaaaaaatgttcaatatcactaatcattagggaaatgcaaatcgaaaccacaataagataccatctcacaacagtcaaaatgtctattatgcaaaagttaaaaagtaacagatgttggtgagcttacagtgaaaaggggatgcttatacactgctggtaggaatgtatattagttcagccactgtggaaagcagtctagagatttcccaagtaacttaaaatagaactacaattcaacccagaaatcccattactgggtatattcccaaatgaatataaatcgttctaccataaagacacatgcatgtgtatgtttatcacagcactattcacaatagcaaagacatggaatcaacctagatgcccatcaacagtggactggataaagaaaatgtggtacacatacaccatggaatactacagattcataaaaaagaatgagatcatgtcctttgcagcaacatggatagagcttgaggccattatcctaagcaaattacttttactttgatgttcttttgtgccatcttctttcaccttctatttggacaccgaaatagcagcctctccttgaggaccagaaagcagacagcatagagtaacagaacatgaagatgaatctgctgtacaacagactgaaatcaggagacctgggtcctcaatagcagatttagctttgtgtaaaaaagaccatgagaagtcagctggcctgatctggcctcatccctttcacaggaaaagactgacattctcaggggttaaggacacgagcctcggagtcagagtgagtacaatatttcggcatacttaattactggttttatgatatttaggaaatgttgagtctccagacaaatgaaacccatatgtaatggatatatattaagtatgcctgcatagagaacaaagtgggaggaactatacaaaaaggacaatttatcaaaaattaataagtgggaggggtcagggattatttatttatttctgagcttgactatgctttccacaatttataaattagcatggagctttttaaaagtcagaatttttgctcatagaaacagtatttgttataaaatagttcagacatacaaaaattatagaatgtgagaactttctatgtaaccatgctaacatataaaatagtatataggcaatcgatagtcacattgaagtctgattgtattagcctcctacttcctcagagataatcactatacagaatttggatttttcatttttaagacattaccttataattacacatgtacatacctgtatgtaaaatatgatattgttttgtagcatggttttctctctaaatacctggctacctcattgaagaagaagaagtaagaaacctgaggagaacaaacatgcattcatatctcaacagtgggacctgctatatatatatgtctccaagtcgtgtgtattatcttttagactactaaaacagacacatccaggtctcagtttatatgctatagagagcggtaaaacattctacagttactattttcaaactcttcttttatctgatatgttcaatgtctcagttttcctgtggctaacttgcctaaaacaatctcagtgtatcttgaatgcaagacattttctcatttgtctggggctaattttctacctttctttcaaactgttactaatttaggcctgtcctttataaccagaacctaatctagaccatcctgctgaaagaagacagtattttctgggagttagttttcatgtgttcagactactgcccaaatcccttagatggtatagggatgcattccatttagaacttgatttgacatctattacaagtgctgggcatgtgtatattttccttttataacttttaattacataaggaaggtacttgtgtaattatacatcatagtcaagatgtagaattgacctaaaagttcatcagtggatacacaggtaatgaaaacatggtgtattaattcacatttgttgattgctcctgggaccctgggctgaatgagactatgactatacttctaccccgaatcccgctgtgtcagggttcccctctccttatcctccccattcccccactgaagctgtaatgctgaactctgagtgatttcatgaagaccatcccgctttcccgtctctgtggcagtcactgcttggctaactaggtgggataagcaggcagtaggaagtgaagaatgttaacaaggactggagaaaggtcttttaggtagtttaaatttgaaggagaagagagagacccagagataggacatagaggtggagggggcaggagacagagagagagagagagagaggaggggaggggaggggacgggagggagaggggaggggaggagaggggaggggaggagaggggaggggaggagacaggaggggagaggaaaggagaggtatcaatcctgtggctaaatgtgtattgaggggtccaagaggaatttttgaaaatctttcatttcttaaaagttgatcaagtttaaaaattaatgtgaaggagcataccatcttaaaactaatctttgaagttagtgatatattattttcattcttactctattatttccattttagagatcatgagatgcctttagttatacaggtattgagcttaatatatatttagttattaatgaatgaaggaatggacaattgtgtgtatagaaatggtagtaactcttggatttttgtgtttcaagaggtagaagatggttaaaatactgctgtgatgtggctggataatgcataatctgagggtcaccgccctggtggctgtgaaacagtctagaattttcctgttttacatatatgtgtgtgtgtgtgtgtgtgtgtgtgtgtgtgtgtgtgtgtgtgtgtataaaactttttctttttttgagacagtgtttcactctgtcgcccagactggaatgcagtggcccgatctcagctcactgcaacctccgcctcccgggttcaagcgattctcctgcctcagcatcctgagtagctgggattacaggcgcgcatcaccatgcccggctactttttgtatttttagtagagacggagttttgccatgttggccaggctggtctcgaactcctgacctcaagtgatccgcccacctcagcctcccacggtgctgggattacaggcatgagccactgcaccctgctttcctataatatattaatataccaaacagtccaggaacaaccattaggcaaactccacactttgcttacctggtgttatctatcactgagatcaccaggtgagttcaaagacatgcctatcttcccagcatgaggaactgaatttgggtcagctcagggacttgatgctgaacagctcttatgagcttctgataacacccaagaactagagaaacagctgtccataaatctttcaactcaaggtatatcacagggacatttgctttcttcaactagatgtgtatttttctcaaaaggggaaacagtaagaaatgatttttcacactgcctccttagccctgaggtctgccaacccctacttctgtgtcccaacatttaaagaccactaaagtttcactctatgccatatagtctgggcaggttttctcatttacccctcaggaaagctctggtattgtcagttacatttcacagatgactaagttcaggctcacagagcctaagtcacttccccagataaatggcaggattggaatgaggctgatcccattaatcaagctcccaactccatccctcccttccctatgctgaaccctgcctcccctgcaacctggtctactctcagagctgcaaccttggctctggctaccagaaggcacatcatagctatctcaatttttgtttttaaattaaaagcagcttattttgcatagagtaacaaatattacaagttttctgtggttgtttggaaaattcacatgtatatgaaaacagttccattatctgttgaccccaaatctacattgcattcattgatttttcacttccctccttggtgcaggttgcagtgtccacattgcaggagggtgggtagggggtccttttcagacagcagggcattcagcctcctccattaccccacccctatacaggcttcccagatttcctcccaccttctctctgtcattcccttttcaggacactatgggcacagctgcccagaccctgctcctgtgccctcatcctctctctgtcaccgcccactgccccacactgccctatggctgcccgcctaggatagccaaggatgtcctgcagtttatttttttttccgtcttcttttaaacacatcagtatctttctgacagaatcattctgtacctgggttcataaggtgggtcgtaaggaggtattgtagtttttgctccttgcggacacttctttgctgaaaagtttgataatggtggtaccgtggtgccctttcccgacacaaatctgcattgcagctagaacaggaaggtgggaaggagagattgtggcccaagcccaccctataaagctttctggaaatcttggtggaaaagtgagcattcccagtgtataggggtactgaaggactccagacaaaaattgctgccttttactatgccgagaagagagctctatgtgagaggaagacaaaatattttaatttttattctttgacccctggataaatagagacctatataagaaaaaagggatccaggctacttgttatctttgtaaccctctttacatctttattactatcttttcatggaaatacatttctatgataacatttgaaattacaacataatatcaatattttttatggacccagtgtttcatttatatgatatcctaaagtttatttccacagtaacctagtggtgaaaatttagttcccttaccatagtttctattacagacaatggtatatataacactcttgctcatatgtacaaatatttcagtaataatttctttataagtttttgaaagagtatctttaagccccagacacttaaaaattttatatcaagatgatgaaatcaaaatacttttactttttttaatttttttttatctaaataggtttttggggaacaggtggtgtttgtttacatcaataagttattcagcggtgatttctgagatttcggcacacccttcacccaagcagtgtacactgtacccaatgtatagtcttttatccctcaacactccccactgtttcccctgagtccccaaagaccaatgtatcattcttatgcctttgcgtcctcatagcttagctcccacatgagtgagaacatacactgtttggttttccattcctgagttacttcacttagaataataatctccaattccatccaggttgctgcgaatgccattatttcttttttttatggcttagtagtattcatatatatatatataatatatatatatatatctcacattttctttatccactcattgattgatgggcatttgggttggttccatatttttgcaattgcaaattgtgctgctataaacgtgtgtgcaagtatcttttttgtataatgacttattttcttctgggtagatacccagtagtgggattgctggatcaaacgggagatctacttttagttctttaacgaatcgccacactgttttccacagtggttgtattagtttacactcccaccagcagtgtaaaagtgttcccttttcaccccaccttactcaaacatctattatttttttatttttttattatggccattcttgcagttataagatggtgttgcattgtggttttgatatgcatttccctgatcactagtgatgttgagcatttttccatatgcttgctggccatttgtatatcttcttttgagaattgtctattcatgtccttagcccactttttgatatttttattttgttttgttttgttttttcttgttgatttgagttatttgtagattctggataatagtcctttgtcagatgtatagattgtgaagattttctcccactctgtaggttgtctgttaactctgctgattatttcttttgctgtgcagaagctttgtagtttaattaagtcccatctatttattcttgtttttgttgcatttgcttttgggttcttggtcatgaagtctttgcctaagccaatgtctagaagggtttttctaatattatcttctagaatctttatgggtgttagatttaagtctttgatccatcttgagttgatttttgtataaggtgagagatgaggatccagtttcattcttctacatgtggcttgccaattatcccagcaccatttgttgaatagggtgtcctttctccacttcatgtttttgtttgctttgttaaagatcagttggctgtatttggctttatttttgggttctctattctgttccattggtctatgcgcctattttttttttttttttgtcttgctttggctatttgggctcttttttggttccatatgtacccatccatgagcatgggatgcgtttccctttgtttgtgttgtagatggcttttattactctaaggtatgtcccctttatgccgattttgctgagggttttaatcataaagggatgctggattttgtcaaatgcttttttctgcatctattgagatgatcatgtgatttttgttttaaatctgtgtatgtgctctatcacatttattacttgtgtatattaaatcatccctgcattaatggcatgaaacccacttgatcatggtggattttctttttgatatgttgttgaatttggttcattagtattttcttgaggatttttgcatctatgttcatcagggatattggtctgtagctttcttttttgttatgtccttccctggttttgatattatggtgaaactggcttcatagaatgatttgggggaggattctctctttttctatcttttggaatagtgtcaataggattggtaccaattctttgaatgtctgatagaattcagctgtgaatctgtctggttctgaacttattttttagttattggcaatctttgtattactatttcaatctcttcctggtttaatctaggagggttgtatatttccaggaatttatccatctcttgtaagttttctagtttatgcacataaacgtgttcatagtagccttgaataatcttttgtatttctgtgatatcagttgtaatatctcccatttcatttctaattgagcttatttgaaacttctctcttcttggttaatcttgctaatggtctatcagttttatttatcttttcaaagaaccagctttttgtttcatttatcttttgtattgtttttgtttgtttcaatttcatttagttctgctctgatcttcgttatttcttttcttctcctgggtttgggtttagattgttcttgtttctctagttccatgaggtatgatcttagattgtctatttgtgctctttcagactttttgatgtaggcattcaatgctatgaactatcctgttagcactgcttttgctgtatctcagaggttttgataggttgtgtcactattatctttcaattcaaagaatttttaaatttccatcttgatttcattgttgacacaacgatcactcaggagcaagttatttaatttccatgtatttgcatggtttttaaggttccttttggagttgatttccaattttattccattgtggtctgagagagtactcgatataatttcgattttcttaaatttactgagacttgttttgtggcctttcatgtggtctatctcggagaatgttccatgtactgatgaatagaatatatattctgtagttgttgggtagactgttctgtaaatatctgttaagtccatttgttataaggtatagtttaagtacattgtttctttgttgactttctgtcttgatgacctgtctagtgctgtcagtgaagtattaaagtctcccacttttattgtgttgccgtttatttcatttcttaggtctagtagtaactgttttataaatcaaaaggtccagtgttaggtgcatatatattcagaattgtgatattttcctgttggactagtccttttatcattatataatgtccctctgtcttttttaactgctgttgccttaaagtttgttttgtctgatgtgagaatagctactcttgctcacttttggtgtccatttgcatggaatatatttttctatccctttaccttaagtttatgtgagtccttatgtgttacgtgaatctcctgaagacagcagaaactaggttggtgaattcttatccattctgccattctgtatcttttaagtggagcatttaggctatttacattcaatgttagtactgagatgaagtactattttattcattgtgctatttgttgcctgcatatatatatacatacatacatatattttggactgtgttattgtcatataggtcctgtgagatttatgctttagggagattctattttggtatattttaaggatttattttaatatttagagctctttttagcagttcttgtactgctggcttagtagtagtgaattctctcagcatttgtttgtctgggaaagactgtatctttccttcatttatgaagcttagtttctctctggatacaaaattcgtggctgataattgttttgcttaaggaggctaaaaataggacccaaattcattctagcttgtagggtttctgctgaaaaatctgctgttaatctgataggttttcctttatagattacctgatgcttttgcctcatagctcttaggattctttcctttgtcttgactttagataacttgatgactatgtgcctaggcaatgatcttttttgcaatgaatttcccaggtgttctttgaacttcttgtatttctccagatctctagcaaggccagggaagttttctttgattattccctcaaatacgttttccaaacttttagatttctcttcttccttaggaacactaattattcttaggtttcgacatttaacatagtctcaaacttcttggatgctttagtcattttttttacaattctttttttttttttttttttttgagacggagttttgctctgtcgcccaggctagagtgcagtagcgcgatcttggctcactgcaagctccacctcccgggttcacgccattctcctgcctcagcctcctgagtagctgggactacaggcacctgccactatgacggctaattttttttttttttgtatttttagtagagacagggtttcaccgtgtttgccaggatggtctcgatctcctgacctcgtgatccacctgcctcggcctcccaaagtgctgggattacaggcgtgagccaccacacccagcctaaaattcttttttctttgtctttgatggattgggttaatttgaaagcctgtctttgagctctgaagttctttcttctgcttgttcgattgattgctgagactttccagtgcgttttgcatttctctatatgttccccgatttctcgaaattgtaattgttttttttttaatttatgctgtttcactgaataattttcctttcatatcctgcatcacgtttttgatttatttaagttggacttcatctttctctgctgcctcttttattagcttaataatcaaccttctgaattctttttctggctattccaagatttcatcttagtttggatccattgctggtgagctagtgcaatgtttcgggggtgttaaagaaacttgttttgtcgtattagcagaaatttttttctcgctctttctcatttgggtagactatgtcagagggaagatctggaattcaagagctgctgttcagattcttttgtcccatggggtgctcccttgatgtggtgttctcccccttcccctataaatgcggcttcctgagggccaaagtgtcatgattgtttttgctcttctgggtctagccacccagtggagctactgggctccgggctggtactggggagtgtctgcaaagagtcctgtgatgtgatccatcttcaggttttgcagccagtggaggtagcaggggagtgaagtggactctgtaagggtccttggttgtattttggtttagtgtgctagttttgtgttggttggcctccagctaggaggtggtgatttcaagagtgcatcagttgtggtcctgcagagaggatgccaactttccctagggacagctggttaagtattcagatttctcaggcggtgggcagggccatagaactcccaagagattatgaccttggtctttgtctaccagggtgtgtagagaaagaccacccggtaggggcagggataggcatggctgagctcagcctctccttgggtgtggcttgctgtgactgctgtgggggatgggggtgtggtgtctggtccaatggagttatattcccagggggattatggctgcttctgctgaaccatacagtttgccagcaagtgggggaaagtcagcggtcatgggcctcaccctgctcccatgcagcctgcagccctaaaggctggtgtcattcccactgtgccctacaacagcaccgagtctatttcagggcaaccagtgaccagggctgagaacttgtcccagaccaccagcttccccactgacaaagcaagcagactcacagtttttcggcatctcagggggcctgcaacagtgatccagtttcttcaaagggtctgtggattctctcagctttcctggtatgttcctgcagtacttcttggagcaaaggtttacagtacgagtctccacatgctgctctgtccatctcagcaggagctgcaagctggtcctgcctcctatctgccatcttgcccccatgcatttatctgaaatcaaaatacttttaataaaagcattatactactaatattccagtgtgaaagttcctttctgctcatattagaaataatgtgaatctttactaatctgataggcaaaaaaaatcatctctcatcattgtttcaatataactcatttttgctctcttctgaaatttcatactgtggatgtgacataatcaattttcacaaccccatattattcagagtgttccaatattccctattatctacacgacatggatagcatcttttcagagtctgtgcactggtagtggttgtaatccagggcagagttcccatggctatttgctctggtgagctgaatgggtccccttggagcccaacaactatgttgagagaattgtagtattgtgataacagaacctggttgatgtaggagtgagtgtgtgtgtgtgagagagagagtgtgagtgtatgtgtgtgctgacaaccacatttccctttacttccttctggcttgtgtctttgcatctcatttcgtctccctttctaaattcaagcccaaaagtgaaaaaagggaaatatcaggatggcagtacttgtaaccagattttaatcaacattcttcactaagtcctgaagataaacatataaaaggaaatgctagcacaaagcgtgtgtgcctatgtaggccttgataagtattgctctacagacactcataaagtagtgccatttagactccccaagtatagggaggtgagaaaggctacagaggaatgaagaaagtactgacgctgacaaggtgttgcagaggaaaggccctggactctgtggtggacacacatattggtcatttgtctattttcggttttgttgtctgtgcttttaaggtcttagccataaaatatttgcctagaccaatgtactaaagtgtttcccccaggtttttgtctagtacttttatagtttcagatcttacatttaagtctttaattgatcttgagttgatgtctgtatatgatgagagacagagatgcagtttcattcttctgcatatgcatatccaattttcccaataccatttattgaggaggatgtcctttctccaacgtacgttcttggtgcctttgttgaaaatcagttttgtctgtaaacatgtggatttatttctgcgttctctattctgttccattggtctttgtgtctgttttcataccaataccatgctgttttgattaccatagccttgtaatatattttgaagtcaagtagtgtgatgcctccagctttgttctttttggtctggattggtttggttatccgggttcctttgtggttgcatatcaattttaggattgttttttctatttctgcaaaaaatgtcattggtactttgataaggattgcattgaatctgcagattacctttgacagtatggtcattttaactatattaattcttccaggccatgagcataggatatctttccatttgcttgtgtcctcttcaatttctttcatcagtgttgtgtagttttccttgtagaggtctttcacctacttggttaaatttattcctaggttttttttttggtagctatttcaagtaggcatgcctttttaatttctttctccactatttcatcatcagctatttcgtcattggtgcatacaaacactactgatttttgtatattgatgttctatcctaaaactatattgtatttatcaaatttgggagggttttgatggagtcattaggtttttctagatataaaattatatcatttgcaaagaggaacaaatgtaaagatatccaacttggatatctgttatttctcttgtctgattgctctggctaggtcttccagtactatgttgaatagtagtgatgaaggtgaaaaaacaagacccttgtcttgttccagttcttagatgaaatggtttcagcttttccccattcattatgatgttagccctgagtttatcatatatggtttttattattttgagttacgttcttttgatgcctagtttcttgagagtttttatcatgaagggatgatgaattttatcaaatgctttttatggattggttgagataatcatatggtttttgtccttcattctgttgatgtaatgtattatgtttgttgatttgcatatgttgaaccatctttgcatccctggtataaatcccacttgatcacggcatattatctttttgatgtgctgttggattcaggttgctagtattttgttgagaacttttgcatctattttcatcagggttattggcctgtagttttttgttgttgttgagtccttgtctggtttttaatatcataataatgctgccctcataaaatgagttagggagaattctctcctcttcaattttttttcagtagtttgaatataacttttgttagttctcctttgaaggtttggtagaattcatcagagaaaccatccaggtctgggcttttctctgttggaaaatttttattactgattcaatctcattacttactattggtctgttcaggttttctatttcttcctgattcaatcttggtaggtggtatacgtccaggaatttatctatttcctctaggctttccaatttggtggtatataattgtttataatagtctctgatgattatttgtatttccatgttatcagttgtagtgtctcctttttcatttctgatgttgtttatttgtgtcttctctcttttttttcttggttagtctagctgatggtttatcaattttttatcttttcagaaatctaactttttgtttcattaaaattttgtatatttttagtttctattttgtttagtttggctctgacctttactgtttccttccttctactcatttgggatttggtttttccttttttagttccttgaggtgaacagttagattggttatttggaatctttttacttttttgatgtaggcatctattgctacaaatttttctctaagcactgcttttgctgtatcccatagattttggtatgttgtgtttccattttcatttgtttcaaataactttttgatatcctccatattttttttcttgactcagtggtcattctggagcatgctgtttgtttattttccacatatttgtacagtttcccaggttcctcttgttattgatttctacttttattacatttttgtctgagaacatacttgatatgattttgattttttaaatttgttgagacttgttttgtgtccttctacttaactacttccttcaccattaaatagaatacagtaatagctatttcaaattaatgaacataatacacattacttttgtcaatctgtgcaaatgtatgttatgttgtgtctaaatattcatcaaaatatttttattcctgaataccaaatttcagacaatatacaaaagcacatatatgaattgtaattaatcttcacctctcagtagctcaactcctacctcctgacccaaaaggtctgttgtccatagaatggtgcacactttccagacatgtttctgtggatgaggtgcacatgaccatgttcacctacatatgcacgtaatctttgccaaaaagtgcaaccacattaatcatctccttttgcaagctgtcttttccacttaatattcttctgaggatttatattagcatcttattagttcttatagttttagcataatcaacaagttccttgttcatgtctatatctattggaattctatgtcaaaattagttgccaactgttttgttactgagtttgccctataaattatggatactaatccaacatctgagatgtagtttgaaaatgtttccccgttattttacagacattcttagtgttattttcatttagaatgtgttttcaacttcaataatatgaataagatatatatagattgtaatttaaaaagaaatactagtgaagaacaccttagggcgtgtgtactgtcggccttgagaaaaattcaagcattgagagtcctggagatatcaagaaaaaaatggaaaaatacttaaaaatacttaaaagtaattctagagttagctgctgaactggagagaaaagagtttattccctgctttacataaactttcctaaagtaccctgatttgaataattgtcaaagtgataggtaccttgaatagcagttaagattaaaggagatgaaatataaagtgcattttcttacagtagtttagtgtatgttactttccttctctccagctcacctgtcccaaggccaacacttgagcttctgcctgagcccactcaccacttcgagaagcaaccaactcatgtggccctacacccaggtctcttggcataaatggtgggatttaatcttctctatcttcttcatcacccagaggggttgtggagtgaggacgcattggtccacaatagcaggggggtggaatctgaccatttctcaagccctggaagcccatcttctaaaagggaggctactcagggctgtctatggatgatgagggatggaacctcatttcaatcctaccacctatctggagaagtgacttaggctctgaaagcctgagtttggtcatctatgaaatgggactgaccacaccatccttacagtgctgtcctgaggggtaaatgagaaaacctgtacagagtatatggcatagagtgggacttcaacggcctttaaatgttgggacacagcactaggggatggctgagcctcagggctaacgaggcattgtgaaaaaccatttctcattgtttctctttatgagaaaacagatatctagttgaagaaagcaaatgtccctgtgatatgccttgagttcaaagatttgtagacagttgtttctgtacttcctgggcactatcagaagctcataagagctgttcaacatcatgcgcctgagctgacccaaatccagctccccatgctggaaagacaggcatatctttgaattcacctgttgagttcagaaatcggtaacaccagggtagcaaaaagttgtttgcctaatggctattcctggactagtcagtatggttttgggctctttttttgtttttgttaaggaaaaatttggacccataccgcagccaccagtgcagtcttcagatcatgcggtattcagccacatcactccaggttttcggtcatctgctgcctcccttagagacaaaaatccaatagttactagcaagtctttgacacacgatagagtttggctgtgtccccacccaaatctcaccttgaattgtaataatcaccacatgtcaagcacagggcgaggtggagataattgaatcatgagggcagtttacaccatactgttctcatagtagtgaataagtctcacaagatctgatagttttataaatgggagtttccctgcacaagctctcttgcctgccaccatgtaagatgtgtttttgccttctgctatgattgtggggcctccccagccatgtggaactgtaagtcaattaaacctctttcctttataaattacctagtctcagttatgtctttattagcagcatgagaacagactaatacaacacacaattatccagtttttaattagctaacaactaaatatttacagagcccagaattcatgctattccattggaggtacctcatgaactctaaagtcgaattaactgggcaagaaaggaaattaatatatgggtgacttcattgcttaaatctgagatgagatggttcttctcattaatttttaaacttgatcaggtttcaaaaaattgatgattttcaaaaatccctccttggacctctcatcacctattcaaccacatgatagagataccactcctctccctctctccctctctctctctggcgctctccctccagcgctctctctccctctctctctctctctgtgtgtatgtgtgtgtgtgtatgtgtgtatatgtatgtgtgtatgtgtatgtgtcctcccccactggattctctcttcttcaaattcaaagttccacaaagagttttacacattccttgttaatactctccacttttcactgactctttatcccattacactatggattctgtccccaggatcatcaattaacacatacaaattaaaactcttttgaaataccttccttgtgcaatcaaaaataacaaatggaaagcaaaatatactcatgctgagcaattgtgatacaaaatcagatcaagctctaaatgacatgcatccctgaactaatcaatggatttgggtagtagcctggacatatgaaaatcaactcagggaatcactgtcttctttcaccagcatgacccagtttagattctagatagacagggtaagcctacatgaattacagtttggatgaaagatagaaaattaggtctggacaaatggaaggtatttcatgtcaggatacactgagatattattttaggatagttagcttcagggaaactctaagattttgaattcatcagggaataaagacgcttggaaaatggtatctgcagattttgttggagctccccacagcatataaactgagaaaatgggtgtgtctgcttcagtgagtctgaaagagagtataaatgacaaataggcatatatggtaggtccctctattaagatgcgaatgtgtgtttgttctcctcatgtttcttcctttctcctatttcatgaggtagccaggtatttagagatgaaaccatgtcagaaaacaataccatatttcacttacaggtatatgcatatgtaataaaagtatagaaaaatgtcttgaaaacgtaaaacctaaattctgcatcatggtcacctgtgggaaagaaggcagctgaggtaataagagaagactttaaagtgtgtttgactcacctatgaaagttttatatgttgacatgaatatgtagaagtctgttgtattctataattttttgtgttactttaatatttcataacaaccactatttctctgagacttaattctgattttaaaaagatc

SEQ ID NO: 334 - DNA, 478 bp, Homo sapiens
  misc_feature (1)..(478): n=a,t,g or c
ttataaaataataaaatttattcagcctcacaattactttgtgaactggaaataacaatgagttgtcattttatccaaatctaaaaaaaaacatacatacagtatcaagttctggttaaagtagtagatgaactttacgtggtacataagagtatctatacagtttgtgggctgcatcttgctagaatatattacattataaaatgcaccatttatttactctgcgatcaaacccccaacttgccccaagtggaggaaccctcagacatttgcagaggagtcagtgtgctaagtaagcagcattctttacaaatctatgaacatcaaggtctccttggaacagatgctctgtgaacaatttataaaactccctcctgttagacacttaggttgantccatttttaaatcaattactgaataaaacacactccatcgtgtggatgaaatgctaccttaanttgtcaaagctatcatttt

SEQ ID NO: 335 - DNA, 431 bp, Homo sapiens
ggtctggaaggcgcagaaatggagcaagagccacaaaatggagaacctgctgaaattaagatcatcagagaagcatataagaaggcctttttatttgttaacaaaggtctgaatacagatgaattaggtcagaaggaagaagcaaagaactactataagcaaggaataggacacctgctcagagggatcagcatttcatcaaaagagtctgaacacacaggtcctgggtgggaatctgctagacagatgcaacagaaaatgaaagaaactctacagaatgtacgcaccaggctggaaattctagagaagggtcttgccacttctctgcagaatgatcttccaggaggtgcccaagttatatccagaatttcccaccttaaagacattgtgttgaaaaattaccagagcctcagtcttttaggttcagctcc

SEQ ID NO: 336 - DNA, 452 bp, Homo sapiens
  misc_feature (1)..(452): n=a,t,g or c
tctcagtaaacattcatttatttcctgccagcaggtgcagtggggccccactgggnagggggactggtgttctaacaggagcgagaaaatgaaggaggcctggcttaagaccagacatttgaagaaggctccaggcagggaaaggaaaggagaggccaggccacactgtcccctccctgcccccacgtctccagcaacacaaggcggccagtggaccgtgaaccatttatttccaaactataaagaaacctgctctctgagaaaagacactgcccaggtgatgaagctccagcccctggaggtccaaaacccagtccaaactcagtccctttagaaagctgctgtgcctttggaaatgagtctcggctgtcagagcctgggaagtggtgggaagaaccagcccactcccctctcctgctgcgattccagcgcagtttggggcccagctctgg

SEQ ID NO: 337 - DNA, 245 bp, Homo sapiens
  misc_feature (1)..(245): n=a,t,g or c
taaaaccccatgagatatttatataaagttactcagatttgggccgacatggcttatctgaagagtgcatgccgggtaaattcagggtggcttttttctcagggtctggaagtgtgagagtttctggggcagactttttccggggccgatctttgggaacggacagaaattcgggtgcgtctgtggagagaggggtggatggagcactagaaggcgcactgcggacngaaaaaaggccccccccg

SEQ ID NO: 338 - DNA, 480 bp, Homo sapiens
  misc_feature (1)..(480): n=a,t,g or c
tttttgcaatgaagtcaggtttaattttgagattcctgtgccctcactcacgcaaggaggaagtcacctggctccagtgaacacgtgtggaacagaaatcagggccactgaaaagccaccacccacttgagagggcttgttctcaacaaacctgactcagatgggcccactttggcttntagtcagatttagagaaaacccccggctcatccaatcaatgtgcaatcaatttctacaccatggcagaggtaggaaaagccagtcacatgtccaaatgatgagtgaaaatcaaggcatcgtggagccacctcctccagagggggagccacaatctcaggaccccgaagagcagacattttcaagtggctcctttacattaagcaaaatgtggtcctctcattcgggtctgaagcatcatttgtgtgtgagcccggcccactggggacctctggctgccaggtggagagcctcctggtgcag

SEQ ID NO: 339 - DNA, 452 bp, Homo sapiens
ttttgctagtgcggagttttattggctacaaaatagatgcaaaatgatgagaatctgaaggctgcagtaggaaagtagagctttaccctcataaactcgcactttgattagaaaagtgcaatatattaagagcattatgagaagtctggtgagactgttacagaaaaaaaaaataaaagtttctgagtctgataattccaagggtatcttttagaactcactcactggtgtctgtgcaaggactttccttgggggaaaatagattttacaacaggcggaaactttcattggtctcatgcgtgcttttggatttcattcacttgacaaagaactaatcttccgttgatggtctcctgggttatggccttgatctttggagttgcagacactttcatgctcgactttgattcttcccgtgtcccttcactctctccctcccaggagccgtcggg

SEQ ID NO: 340 - DNA, 392 bp, Homo sapiens
gaacaagttttgtctgtttatttaaaaacagaatatcattttatgtacaaatatgcacatatttacataaaatgtacatgttaggatcttagatcttcaggctccacattcgaagtcctaggctggctggggaacgaaggatgggagcctctcccttaggccagaaatccagcagatttcagactaagaagagtttgggtactaaatctaggtattctggctgagtgtatctgggtgggccagctaaaaataaacctcattgaactccagccccaacccagagaaacatccagaagagccttgaattagtgatccaaaacccagggggaaaggcgacattctcacccccagcacctccttcacctcacctcaactcctactctctcggtctc

SEQ ID NO: 341 - DNA, 353 bp, Homo sapiens
tttatttcataattctcctttattaggcacaggtaaacatacatactcatggtatccaaaacctagagtatggacctgggattgtggaccccaagtgtccccagaagagtcccacctgggactttccaggtggccacaggacagaccctgcctaatcctgtccctcaaccttggtgctcaggtcagaagcccccatggttgacaggcctggccctcattccagaacagtcttgagttagacaagaactagcctcatagtttggattcttatctctggcccaaatcccaggcttaggctggaaaggagaatctcttaatcaagaggacagagatgctggggaacacagttccca

SEQ ID NO: 342 - DNA, 439 bp, Homo sapiens
  misc_feature (1)..(439): n=a,t,g or c
tttttttttttttagtcttttaatgttagccttttaatattttccaataagtgctttcaactcagcaatatacatatcatgctttcctcattattattgatccatcaataaatatacaaaaaccagaggaagggtgtgctctgaaaagtcaaagtaacaataacagtggtcattgtacagcacaagaatgaacaatgggctattctttgaaaactcaaaacaaatgatttacacaaagacatatctataacataaaggtgaatggaccatgttattcttattcttaagtacattttgcttttccagataagtcaaatgtttcctctctcctactcctctgatataacagtattgaatgaatgttggctacaaaatcaattcttggtgttgttatgaatctcaatataaaacttttggaaaggttctgctagaaaagccn

SEQ ID NO: 343 - DNA, 521 bp, Homo sapiens
cgtttaattgaaaaacctggagaatccactccatgaaaagaccaaacgccccccacccctacattacttcatagccacttcgaatactcttcaccagacagcaggagaagataattcccaagacctccacaaaagcaatgcccagggccgctgcagccaccagcagtatgttcttccttagccatattgctatagtctccacgcagccctgggtatggatagtggattccttgaaatcattcccacagcccacagttatgttgatgcagcaagaatcggggactctgtccttggccatgccggggatgttttcccagtctgtgtagttagaagctccacagcagttattttctttctgcaatttgtccaaaatagtggctgttttgttgtctttaaggtaattctggcatctgctggctgggaagctttttattaaactctgacttcacctggtctctaaacacatagccagcaatgggcacagccacctccacaagcatgataagagacaggaagatggg

SEQ ID NO: 344 - DNA, 426 bp, Homo sapiens
  misc_feature (1)..(426): n=a,t,g or c
agccttagatccaaggacagtccaaggaagtcctaagaccatggagttggtgatctgggatctgggtttgctgatatttctcaccgtgaatctcttggtggtgtttgtgggcacgagaggggcagagaatggagagtgaggctaccacatgaagcgtcaccagagctgctccctgctgcctgctcagagcaccccggatccactgttcaatctgcacaagattcggggtccagacatgggagacttcagctgcctcagaggaccgtggacagggaaggccagcctcgcatccctctgtccatgcctggaaatgactttaattaacccaagagtttttaatttttggaantttgtaagctgtcggttcacntttttaacccacccattcaattaaaccnttacaggaattggcnaaaaaaaaaaaaa

SEQ ID NO: 345 - DNA, 345 bp, Homo sapiens
gtgaaagtacgtagttgtctttcgtaagttaaaatgataattgggccgaaacttactgccttacctaaaaggcagcgcagtcaggatattggtaggtcgggggcggctttggaaacccttaagtttacaagcatgcgcggacttgagtgctcattaggtcgccgggcgtccacgtgcagccctggaccctgaaccccggcgtgcgtgggccgtgggctccggggaaaggttccgtgcactcggggactccggtgaagcctgttcagccgtctgtgtatgtgccatcttgagtctactctgtcgctcttgtgccctagaccccgagaaccgtagtttagcaaatga

SEQ ID NO: 346 - DNA, 374 bp, Homo sapiens
gaaggccagaaacctccagagggcttcatggcccccaaggctggactgtgctggtagagtactacaagtccttagagaaagcctaactgctgagctgggcactctgcctgggacgcatggctgagtaacagaggggaccacgcagccaccgacagcccttctctgcggttgtctgactggacacacttcctgaaatcaggccgtttccctccgcgtgcattggttttggtctgtctttcagttctgtttcaaactagtgtaacaccacgctggctctaatgtatcttttccacttattgttaatattcttataatacgattttaaaaatctcgcctttttatattgtatttatgcttctgtcttacaatttttc

SEQ ID NO: 347 - DNA, 447 bp, Homo sapiens
ttaaattctgcacccagtctggcaaacatttattgactgctttctctgcatagaacaaccggccagcccctggactccagaggcccaccatcattgttaagagacctacatgcatgaaccaatcacacacgtgctatgagaatagagaaaagaaataagtaattctcacagacactgacaaactggaaaaaacttctttcatcccaggtactttatggctgggatcaaaggggtgactcacttgtttgcacaggaaacaaaaggcaaaaggaagtgttggcatcagttttccatctgcacatataacccccattcctccatgaattgcatgagataggtttcattttctcctggtggcctgtctggaagccgggctcctcatagagtctagatagaagaccctcctctccgagcccatccccctcagaaggctcgcaggcctctgaa

SEQ ID NO: 348 - DNA, 367 bp, Homo sapiens
gtctgaaactttttccttttaatatggtttacattctatctccagagaaaacacacttaacagaagacagaaaacatttaacaaatccaaagcaattaaaaatagccacaaaaaaagagaataacctagactgacagctcacagagcaaggaggtggcagagacctgcccaggtgagcttggctgttgcccccagctcaatcttcctcctctcctctctctgtcccttcacctctgatcagtcccagcctgattcccgttccctgatgcctcaccttcttgctgccagatgcctctaggaactagggtccttcagactccagatgccctggcctgggcttaggacatcttgacttccccagtggaca

SEQ ID NO: 349 - DNA, 434 bp, Homo sapiens
  misc_feature (1)..(434): n=a,t,g or c
ttgcttataaaaaccattttaaattaaaaaagggaggaagcatcagtgcacacagatggggacacaggggcagagggccagcccaaagtacagtgtggtcaccccacagcccagtggacccagggcagactcccctcgcagcacagacagctgaggcccgggtgctggttcctctaggtacagctttggtccttgtgggctcagaggtctgcctttcggaaacttgctctgttcaaggagttcctgaggccgggtggggtgggtgccatcagctggggcaggcgctgggtaagcaggggctgcaganctcccgcagcggcagtagttgcgctccagctcacggtggtactccttctggtccggcccaatcagggctttatttttccgcagcgcatcctcacatttcttgcagaagtccttgaagccctcgtgcc

SEQ ID NO: 350 - DNA, 416 bp, Homo sapiens
ttactgagtgaagaaacacacaaattttatttagaaaatgaatgaccatgtttgcaataaactcccaaaatatccgccataagatggccataatattctgatgatcaaggagcacacatatacaaaagttattggattactgcaattctcagaggcacaaaacctgacatggtgtgatatagtatataatcagtcacgggggggaaaagaacattaagtctttaaaaaggcttaggaagacataaacagtaaatctttgtttttctaccttcctttggacagtgttatatttcactttcttctttgcaaaatgtttccaaattcatttgctcaggatttatttaagataataacttaaaaccactaacagttggtttatgctatatgcatatcatgcatggttcctactgggttcc

SEQ ID NO: 351 - DNA, 282 bp, Homo sapiens
  misc_feature (1)..(282): n=a,t,g or c
ttttttttttttcaagagtataatattttttattcactgataaactaaaagccaatttcttggtatttctcatgtatacttcatttattttattaataagcaaagccctgtaaggggagcctttgcctagtcctccgactcngattcatcttcatcttgactaatctggaagtaacgaagttcgtaggtctccttgtcagatgcaaccactcgaagccaatcacgaagattgttcttcttaaggtatttcttggtaaggtatttcaaataccttttagagaa

SEQ ID NO: 352 - DNA, 515 bp, Homo sapiens
  misc_feature (1)..(515): n=a,t,g or c
ttttgtttaaagataatttattctatagagtgcattcttgcactctataggtgacagaaaaacaaactgtgctttaaataccaaacaagtaaatcagaaagcttattttctatttnnnntatatctaagacacacttntataanaagaaaacagaccctcctaacatgtancattaccgttcgtggcaattgttctcaacctttcactctccttttgaccttngcattaagctcctttgctcacttctgagctctcagttacagttcttgaggtggcatcctaaccaatttgcactatctttcaggtgaagcgctggatatttaccagataattgaactcaccaaaggctccttggaaaaacgaagccagcctgggaccatagcactgcctgggnggctctgtatttgctcccgtggagcttcatcggggggtggtncaggctccccaaactcaaggcntttcaggctggtgncttttttgcaaaaaggggccttgccttaagggccagcccatt

SEQ ID NO: 353 - DNA, 292 bp, Homo sapiens
  misc_feature (1)..(292): n=a,t,g or c
ggatttaccaacacgtaggcttttatttcttcccattacatctgtttagccacagaaagcattgggccatactcactgcagaagataagacttcctcagaatcttattcgtttagtgcactcaattttacttcactgtctcatcacttgagagactggttaaggcaagaaacccatttcttaacattttttttattttcaaacatttgaaaagcaacaccaaaacgtatgcagttaattcctcaattctttcccttagnatagcactttttaaattacaaaaccacacttac

SEQ ID NO: 354 - DNA, 446 bp, Homo sapiens
  misc_feature (1)..(446): n=a,t,g or c
ggtgggtacatgggtatttatttcattgttattaattatagcttactcatgttataaatattatttggttagtaaacagcacttaattaaaaaaaacaatgtaaaagacatggattttaagattaattagaaactattgagcctgagaagcatgaaagagaaaagaatccttcgtgctgccaagtcgatctctaggggagaataactcccacggctgcagcgtatgcagtgcacacagaagagggctgctctgcccagtccatgtgggtggaagataactggggggagtaccagaggctgctgtccacttggacactggccttgagcaactcagctgctgcagccagagcgccaatgctgcatggccctgaggcaagccctggcaaatgggctgcccaggtangcttggnccacgttaaaaacagacccacggcaagccctgctga

SEQ ID NO: 355 - DNA, 454 bp, Homo sapiens
  misc_feature (1)..(454): n=a,t,g or c
ttttttttttacttgaaaattgcttctcaagatttaatctagttttcagaaaatttttaaatttacattctcatgtacaaataaattgtatgctttccggataagtgacatgtttatatggtgataaagggaattataatgctcttaactcttatgtagtatgttctcatcaaaatcaccaagcatgagaacactgtttagtctcattcatcactcagcacagcctctttctgtccacttcagggccaagtctttgccatggccccacataacgtgtaaattagcttcagggatcaaaaatctttgaaaacccagtttgctgagccttgaaggaagcctttagacccagcttcaatgaagtcacagctccctgagggtcctggtggactggaggcggcctcccaagcctgggagctgtgtgcctggatggtctcactggggtgatgacncaagn

SEQ ID NO: 356 - DNA, 491 bp, Homo sapiens
  misc_feature (1)..(491): n=a,t,g or c
tttttttttttttttgaaacaggagtgctttatggtctgagtggagtgtttgggaggagtgcctcccggctcctgccttcgggctcacctgagcgggggcgcantgaggccactgtgggaaacacaacccccactcccaggagaggcctcacatgctgccttcggtctcgccagccttctagcgtggggcctgggcgccctttaggtgagtctgcacacccgtgttcagggctcccggccggaagcggaaccataggcatgctgcggccccagatgagcgcggagggcaagcaggtgccggggnagcgcacaccccacagccaagcggcccctgcccagcctctntaaacagaccctcacaggtccctcctgggcctcagtcacatccctnagaaanactggcggctctgcccgagangccagggtntccaccgagcctggctgaagcagctgtcccctcccttnttgcagagaggctcaaatgggcctga

SEQ ID NO: 357 - DNA, 177 bp, Homo sapiens
  misc_feature (1)..(177): n=a,t,g or c
ttatttttaaaaaagactttattctctagacaagacaatgaaacccatcttccttgtatagagggcaaggaaagtttgcataaacgcagaatgtttcagcagctttgggttcactccatggctcattttcttcttagcaatcagncatggtgaacttggaggacccaaaagncatta

SEQ ID NO: 358 - DNA, 476 bp, Homo sapiens
tcacatttgtatgtgtcatttatttcggttgcgctggggaaagagaacgcagtttctctccccgcctcctcctcgctgggtagaactaactctaaaacaccaatatctcaacactgaaccctcccaaatcgcaagagttttcttttccccttccttgtttttctttttaagctgattggcttttgtctatcttgctctttccttttctttttcgtctctcccccgcctgtgttggggtattttgtggggtttttgtttttcccctggctgtgctgaggcagcaggctgggtagggtttaggactgctccttgtcggttttctctttattcatctttttcatcttcatccttcgattctgaaaccagattttgacctgccgctcggtgagattgagaacccgggccacctcataccgacggtccctggttaaatacatattgaagagaaactccttctccagttccagcgtcaggta

SEQ ID NO: 359 - DNA, 264 bp, Homo sapiens
aagatttttttgtttatttggtatggggtcttctgtagctcacacaaaattattgggaaaataaataacccaggggagccccctttgcccacggttcctaggtcgcggagtcacagcagccccaaaggcgagggacctgggaatccgaggggtcccggccctggcggtcacttgcccagcaggaggccggcgcgcacacgcggggcacgcggcggatggtcagcgagacccgggtgccgcgcacaggcaggctcccggccgcgc

SEQ ID NO: 360 - DNA, 419 bp, Homo sapiens
gaattacaaattgataatttattaacctgtgcagcaacaaataagatttttcaaaactcaacaaagtgctcaaagttgacattacttgcttcaaagttagtttaaggcaagtaaatactaactactgcgaggtggaaaattgcatgaagaccctgcaacgtcattcactgaggatcttctcatccttttcttttttatctcgtgccccttgtctatttcaaatcatcaggcacattcatttaataatttcccaagcaatttttaaaaagacgtttgggagtgtgtaaaagtttagtgactttcacactaaaacttgttgtcagaggtacatggtgactatctccacacaggcagagctgggacccaacttactaaaccttcacgtgagaatcttctatttttaaggctgaaggatggca

SEQ ID NO: 361 - DNA, 472 bp, Homo sapiens
ttttgtgaacatagcagaggaggtttaataggataagtcagctacatttttaatgttatcaacttatcattaatgtgtatacattagcgccctactgaaaggaagtaccagtctttgggcaaaacttaagagattccttgaggaacctacggcctgaaccttaaaaaaaaaatctctaaagaccttacagtctgctgctttaccatttcattttaattatcaacactggagttgcaattggctaagttgtcaactgtattttaggagtctaccaatgtggcactcagaatcggagtgaccatcagtgacctaaagaggtaagatttgtggaatactttagtccaaaagctttaaaaaactattagaccatatattctatgtttttaaagtgaattatgcataaaagtctgtgcaaactacaacatgattgcagtaacattctcaagaaaaaaaaaaccctagtatactttag

SEQ ID NO: 362 - DNA, 314 bp, Homo sapiens
tcgtgtgtaataaagtggttcaaccatgattaggaactgaaatttagtagaagagggaaaaggagttaatgtaacaaattattttagctacaaaccccggtaatagagcacttgggggatgggatggggtgggttggtgagacaatcagaatggtaaattgattaaatgctcctaaccctgtaattttgtgcatagagcaccctatgctgtggaaataactgttcttagatttcattgtaactggactgttcaggttgcccagaggaatagaacattcctaattctaataaaataaacttttattttgttattc

SEQ ID NO: 363 - DNA, 454 bp, Homo sapiens
tttttttttttttctcagagaattatttaataatagaattaccatacttttggcgcaaatgtgtccaacaccaatgtgacaagtacatatatcagaatcactctttcctcagagaatcacaccttcccttggctctgcatgtggatccaaatcaagcctgggtgtgtctgacaataccagggcacggtttgcttcccggccctccatctctactgtttggctacagcttgagttcactaggcatcggctcccctctcaggccagccagcaagttgttagctgccaacaaggacatggtgttgcgggttctgtgggtggcactgccaatgtggggcagaatcacacagttcttcagggtcaggagagggtggtttgtaggcagtggttctgggctcgtcacatccagtccagcagctgcaatcttaccactgggcaaggcctggtacaggtcgtc

SEQ ID NO: 364 - DNA, 425 bp, Homo sapiens
tgaagcccaacatttaggttttaaaaatcaagcgtataaatacagaaggtggagggaacttgttttagacacagttcaggtgaagaaagacctggaaacttctgttaactataagctcagtaggggctaaaagcatgttaatcggcataaaaaggcaatgagatcttagggcacacagctccccacccctcttctgcccttcatccttctttcaatcagcagggaccgtgcactctcttggagccaccacagaaaacagagccctggactcatgaacgaatccatgccaggcaccagtctcagccacagtcacatccctttaaactggatccacacagtaagaggactctgaactcccctgcagactgcgaagtcagcctcattcactgctaagtctctagcacctgggatggggcctgatgtgt

SEQ ID NO: 365 - DNA, 411 bp, Homo sapiens
tttttttggaaataaacaagctttattttcagtttcaacaggtaaggcgatacctgcttcatcgtgtgcttttatgtaaatgccaaatagcaaaataacagctagaaaataaacagtttgtcagtttggagatcaagtactttatctatcttgagtgttatctatcttggaatttagccaggcctaaaagtagcggaagtgtcaggaaatgctatagagagccaatctccagctgcaggttggtgggcctggcactgaccagatgcgggtagctcaaagcaccgagcgatgcaggcgccgtttctgcattgcctgcagcctcttctgcctctcggcaaagttgttcttcggggtctgcttcagtgcgggcaggatggcacgctccgccacaggtgggctcagaagcaggca

SEQ ID NO: 366 - DNA, 261 bp, Homo sapiens
gcctagaacagctaagaccacagggttcagcaggttccccaaaaggctgcccagccttacagcagatgctgaaggcagagcagctgagggaggggcgctggccacatgtcactgatggtcaaattccaaagtcctttctttatactgttggtggacaatctcagctgggtcaataagggcaggtggttcagcgagccacgcagccccctgtatctggattgtaatgtgaatctttagggtaattcctccagtgccctttaa

SEQ ID NO: 367 - DNA, 388 bp, Homo sapiens
caattcctatgtattttattttatgcatttaaaaaacattattctaggccgggctcagtggctcatgcctgtaatcccagcactttgggattacaggtgtgagccacacgcccgggttaagaagagttcttgaggctgtgataagcttttctcaaattgtttttaaagccagctcatttcctgtgtgctcatagtatcatagtataatcagtgcactatcctcatatcctctaattgaaggatttttacggaacatgaggtcttggcagaagccctgcatttgttcactgttgttttccaggagagatatttgcagccactgaggatggtcaagcgcattcaccagctctgaaagccctgacacaggggttccacatagatgcaggca

SEQ ID NO: 368 - DNA, 591 bp, Homo sapiens
gcggccgctgtgacgtgccggtaacgagctgcagccgccgccgccagatccacgctggctccgtgcgccatggtcacccacagcaagtttcccgccgccgggatgagccgccccctggacaccagcctgcgcctcaagaccttcagctccaagagcgagtaccagctggtggtgaacgcatggcaactgcaggagagcggcttctactggagcgcagtgaccggcggcgaggcgaacctgctgctcagtgccgagcccgccggcacgctttctgatccgcgacactacggaccagcgccacttcttcacgctcagcatcaagacccagtctgggaccaagaacctgcgcatccagtgtgaggggggcagcttctctctgcagagcgatccccggagcacgcagcccgtgccccgcttcgactgcgtgctcaagctggtgcaccactacatgccgccccctggagccccctccttcccctcgccacctactgaaccctcctccgaggtgcccgagcagccgtctgcccagccactccctgggagtccccccagaagagcctattacatctactccgggggcgagaagatccc

SEQ ID NO: 369 - DNA, 299 bp, Homo sapiens; identical to SEQ ID NO: 34
  misc_feature (1)..(299): n=a,t,g or c

SEQ ID NO: 370 - DNA, 203 bp, Homo sapiens
  misc_feature (1)..(203): n=a,t,g or c
aacagtttacttttttaatataaagattttncaatttacacttgtaggagtagaaaaaactaatatgctaagnctgtaagctacgcagcaaaaataatgatcttaatgaagccagaattctgtgaaaatgtgcaccacactgcatatatagtagctgagtaaatgtaaaccatgngcttattaactcttctatataaaatatt

SEQ ID NO: 371 - DNA, 545 bp, Homo sapiens
tttagcattaataatttatttattcattcatttcaacaaacatgtattagttatgttacatacttttggaagacctgaattgtaaagatcaaaaattatacacagaaagacttctgctttggggcaggatgtgataggccaatactcttacctgaacaaatggaaaatattaaaaaagtcattttcagaagcacctgagagctgtgaaagcaacgaagactaagtgaactaaaattccagagagagaaagagagaataatttcgaggtgatctgatgattgctggctatttttctctcaggacattttgttggttctgggagtactgatggtttgggcttgaccaggtagagggactctgctctgcttttgcagtgggtacaggcatcttttctgatccgggagtcagaatgacactaccagatcactgagcgttggtctctaggtgtgaccgtggtagaattgagtccttggcgatctctgattcttcatgtcaacagcttctgaaccaaattctagggcacactcatcagattagccaaggct

SEQ ID NO: 372 - DNA, 332 bp, Homo sapiens
caaatattaagtaaataatttaatgatagaacactgaaatttctttagacacagtattttcaagttatatttctgcctggagtacagatatgaaatagcacaaactgtactctgaattaagcaaacagaatgaataaaaaaaaaatattctcccaacctaagtttccgttcctcatttccacttgcctcagactctttctattgaacatatctagttaaatctctaatggacggcctgtgggaagatttactgccaacagggtatgactgacttctttccggacactgagcaggggactgtgggctctgaagcagtttacttcctgtggaag

SEQ ID NO: 373 - DNA, 142 bp, Homo sapiens
caaacctggcgtctataccaacatctgccgctacctggactggatcaagaagatcataggcagcaagggctgattctaggataagcactagatctcccttaataaactcacaactctctgaaaaaaaaaaaaaaaaaaaacc

SEQ ID NO: 374 - DNA, 414 bp, Homo sapiens
tggggtaaagtttaatggaaaagccgtggaaacgttgagttcacaaacaggacttcccgtgcaactgtccagccagacctggggcagctcctggggaccctgcccccttcacacacacccatcccatccatggtgcctgagaggccttcatcttcagttccctccaccagatcagttgggcatgttgggggcagagatggagggttgttgaatcacactaggctctgtaagctgagaagacgatcctgcacagggtggcgtaacagtctcctcctgccagggcacctgcagggcgagaagtcacatgccagactgaggcatgcttgcgaacactagcctggccccagcagcagggggtgctggaggagctgcagcttttccccatcttgctgaattattgatgggcctggcact

SEQ ID NO: 375 - DNA, 528 bp, Homo sapiens
gatatcattccaggctttaagtttcttaaggagcaaaacagcttccttggtcttcttgtagccttcaactttatcttcaactaccaaaggaagttcaggaacttcctcaatacgatgacctttagacatgaccagtgctggtagggctgaggcagccagggcagaacagatggcgtatcgtttttgggttgtgttcactctacgatgccaacggcgccaggttttggttggtgcaaacattcggccttcacgacacatgtttccaaaagcaccctggccagaacggtgagtcccacaacctcaaactctggggaattccgagcacagctctgccagtaccccaagacttagcactagtctgaagacctgctaattccatgacagcatagggctgtctggtgtttttgcgcaagttggtgtgaaccaagttcacaatatctggtccaataggaaccctgaatacagcaggcaaagtggcatttttgccaaatgacttccccttttcggagttcaccggtattagttggc

SEQ ID NO: 376 - DNA, 207 bp, Homo sapiens
tttttttttttttttgacggttcctatataacgtttatttctggaagttaaagtagatacagcaatataccaaaaaaaaaaaaaaaaaaaaaagacaaaaaacctcacaataatataaatttttacactatgaagtacacattggaatttgaatgcagtggccaggacagcagcttataaaccaccttataggtaggtaagcaaccc

SEQ ID NO: 377 - DNA, 278 bp, Homo sapiens
tttagcacttgaacttctgactttattatttttcttcaaatgaacaggtgataaaacactgtgtccaaagcaaaatgcatgactcccttttctcttctttcacagagtaccagaaaatgtaaacaatatttagcttgaacttctgagtcctcatcttttttttaacagcctttagaacaacattaatttgtttgtttatactagcattttacaacataaaaaataaaataagcagactgtctgagggggtttatataaggttttcagattctgataca

SEQ ID NO: 378 - DNA, 183 bp, Homo sapiens
tcaggggtatgaggctttattcaggaagagctcaagatgtgaggggagcccctggggtcccacatcttgtggcctcttgataccaaggctcatgggacgctaaaacctaatgactgcaggcatctgagcttccttggagtcatctgtggggggcacaggggcagcctcagagtcacccgtggg

SEQ ID NO: 379 - DNA, 438 bp, Homo sapiens
tttttttcaggcatattagctttaatgtaggtggcgatgagtttttaggccaaggaaggaataatgttttatgtaccaaagccttttgtccccattttccatcatacgaatagtattccctgttgctaagccgatgatacattacccttttcccataggtgtgagtggcggtctgaatggagaagttcaatagttctgattgcagatcctatgcagaagagataataaggaaaataatctttgtctcctggattaagctgaggctggcaaagagtgaaatgtcccaagccctctaacaacaaacaacatactttgtgttgtcctggatgctggtctggttgccaaatatgtggaactggccccatatgcgtgtactgttgtccatttcatgagagtaggcttgaggacaccatgggcaaggatctgatggttgccagc

SEQ ID NO: 380 - DNA, 465 bp, Homo sapiens
tttacctgttgaactcatttattactttttatggattctttagcattttctatatacaactatgtatcaactgtgaatacatatagtttcacttcttttgcagtataaacctcttttctttattagcttatttgatttttagatgttgaacaaaccttgaattcctaacctaactgctgtggctagaacttcaagtacaatgctgaatagaagtagtgccgagtgaacatccttgtccttcttcccaatcttaaggggaaaacattcagccttcagtctatcaccatgaagtataatgttaggtgtgggcttttcatagatgttatatttatcatatctaggaagattccttttattcctaagtttgttgagtgtttttatgaaagagttttggattttatcaaatgctgtaataagacaatctgtgtgggttttgtgctttattaaatatggtacagttgatcc

SEQ ID NO: 381 - DNA, 418 bp, Homo sapiens
gaaatgtaagtatacagattttaatttatttttaagaataattgtatattttaaaaacaggacacgtactgtatgagtaaacagcgtggctaacaccaagtccacactggtaagcttttgagaaccatttacactatgttgacagtagtactgctgcaggcagacagcggaagaataaataatagtgcttcaagaagagtagtgattgagaggataggtaaagagggcgcctcatcgtggaagctagagcaggaacacctccccagtagtgacatgtgcaaagttccagatctccacgacaaagacagctcaacccactggaacaaacagactcccaatgtggctggcaactgcgggggtagaagaactcaggcaaagtaggcacaggaatgggggagatgagagccaagggacaaac

SEQ ID NO: 382 - DNA, 359 bp, Homo sapiens
tttaacaaattgtattattacacattcctagttgctgcttgtaatagaacagatttcaatctcagaaatgtttatctgagagacatagatcaggtttacaaggacaagaggtcaaagtcatgccacagacgatccacaccacctatgtatgcactctctctcttgcacacacacacgcacacgcgcacacacacgctgagtctcatgtgcttacctcgtctgactgccgctggtgttatatgtagcttccatgcctggaagaggcacatatggtaacatggtgtggctaaagtaaagcaaaagtacaaaagcaataggtaagggcagtgggataacaggaaaggttttgatgttattgt

SEQ ID NO: 383 - DNA, 398 bp, Homo sapiens
gtatttctaaaaccattcaaggctccttcattaattggcttccccccaaaagaaagatttctttattaagaaataccagagagtgaaaaacccccaacacatacacatttgtaggctcacacaaaagtgcagagatttacatattaaattgcatttaaattagaaaatagatttaaaaacaaaatactttttttctccaacaaagtaaagagatttggtcagtaggaacgggtgctttatgggtaaaggcaggatggtcaggacagggagaatggaatttagctgctacggaatcagaatccacctctaacccaacctcactcctggggtaaaagcaaaggaggagatgatgatctcagctagggccaggaaggctcagagctgaatggacatgaaga

SEQ ID NO: 384 - DNA, 448 bp, Homo sapiens
catgaggcttatttattttgataccaaaaccagacattaacagtaccaaagaggaaaattataggcctaaatcacttgtaaacatagagacgaaaatcccaaatcaaaagcaatatggagctagtaataagtcttttaatataaccacatttccattgttatatctcaaaatactaccagtaattcaatatccagtatacaatcagtattcaaatatcaccgaatgttttccttttttctgtttatccacacaaggtttatatatatttaagatatctcttagtcactaaattaggcttagcgtggtgcctcacgcttgtgatctcagcagtttgggatcacagccgtgagccaccatgcctggccctctttttcttttcaatttatttgttgaaaaatgtggacttgtatttccagagtttcccctggtgaaattttgatgattgca

SEQ ID NO: 385 - DNA, 490 bp, Homo sapiens
ttttttttttttttagacaaaccacaactgtttattggtgaaagactcagcttcctcatgtgctcgctgcaaaataaataaaataccagatgctagtatcgtacactatttacaacctgcagctgaccaagcaggtcctgaagccttctctgtggaccagtactgcactcttctgaggctacgggagaggtccagcagccgggccagggactaaaaggaaacgaaggatctgttttatttcgagctcgggggcaggctgcacttctcgcagatctgaacgggcagcatgtgagtcaaggaagtactgtttatggccaccagcagctgcaacttgcccatacagtcctccagcgccgcctccgggtggtctcccagtcgcaagtccacgggccgcgagaccccagcatgctccgccagcgcaggcagcagatcgccggagggaaggggatagctggtgaaggatagtcggccaactcagtttgccaccccc

SEQ ID NO: 386 - DNA, 366 bp, Homo sapiens
atcttgtttttctgatcggagcatcactactgacctgttgtaggcagctatcttacagacgcatgaatgtaagagtaggaaggggtgggtgtcagggatcacttgggatctttgacacttgaaaaattacacctggcagctgcgtttaagccttcccccatcgtgtactgcagagttgagctggcaggggaggggctgagagggtgggggctggaacccctccccgggaggagtgccatctgggtcttccatctagaactgtttacatgaagataagatactcactgttcatgaatacacttgatgttcaagtattaagacctatgcaatattttttacttttctaataaacatgtttgttaaaac

SEQ ID NO: 387 - DNA, 412 bp, Homo sapiens
ttttttttctagtcaacaattttattttaaagtttttcaaaatacaaaagttagcaaaaagctgaatatttacaattatgtcataggttactattaacagtgcagaggatagagtatgtaagaaagactttgaagaggaaataatatacaaagtacaataaacagcaaggttacatgtcatcgttttgccaccgtacagaagtggaaagtgccgacctggagaggtcaccgttgtttcatttctctgtatccagaaaggaccgtctcttaaatccaccaggggaggaaacagcctcctgtggaaaatgctgtcttctcaggagcattgtatctgcacgtgccaatcacagttcctcctccgttcgcaggtactgggtacagttctgaaatctttttcagctgagcagcgttt

SEQ ID NO: 388 - DNA, 290 bp, Homo sapiens
aaatacaaatgttttattacgcaaaccacatgtaggtcccaggctcaggggcttaccctacagcccccactggtccctggctccaagcctgctccttgcccttgcccaccctggaaagccaggatctcctatggagtgtgtaggtgtccacgagtgtaccggtgtgcgggcctcctgggctgcaggcactcaggcatggtggcagcattgagggaaagacaggtgttggggagcggggtcccacctgcccaggctcaggagtcacaggggtctgcacagtcctttctgct

SEQ ID NO: 389 - DNA, 255 bp, Homo sapiens
ttttttttttgatttgtttacttttattatcattttttaaatgtggtcaggggttttatagtattttttgtttaatctttttggttattgaaaaaaatagaacagtccactgtccagcagaggctgcttcaactctattgctcgcagggctcattctgcatggatctgtgtttcaggatgctgcaaggacaactctgcgggcaggaaggcccttgacccaacgctgtagcataggtcctgctctgtggatgggga

SEQ ID NO: 390 - DNA, 338 bp, Homo sapiens
agcccaagcataggcaggcttctgactttattcctgtatctacctgcatatatacatggtaaaaaccatgggtttacacagataccttggagccaacccaacaccaagggctttccttggcctccctctggctctcactgtccgatgcagattagatttacctgtgtggtcaatcctcgtgtgtacatacatttcagaactgctggcctggacccatgtgaaaaacagtcaccatctacagcaggggtgtccaagcttttggcttccctgggccacactgaacaactgtattgcaccacacataaaatacactaacattaatgatgactgatgagtta

SEQ ID NO: 391 - DNA, 448 bp, Homo sapiens
ttttttagcacttgaacttctgactttattatttttcttcaaatgaacaggtgataaaacactgtgtccaaagcaaaatgcatgactcccttttctcttctttcacagagtaccagaaaatgtaaacaatatttagcttgaacttctgagtcctcatcttttttttaacagcctttagaacaacattaatttgtttgtttatactagcattttacaacataaaaaataaaataagcagactgtctgaggggtttatataaggttttcagattctgatacaggcttgcatctgcatcgtttttagtctgacaaagagaaacactgctttaggaagtgggtcatgtgggtgtataagtggttcgtggacaggccggataagccgtggttctggtcagagtaccacattgcctggaaatccacttgtgcattaaccagagctttagcaatc

SEQ ID NO: 392 - DNA, 490 bp, Homo sapiens
ttttttctgaatgaaagctaattccattcttttatttcctcataccacaaacatttcaatttatctgcctttttacaacctgatttacacaagcaaattgcaaacgaaaaccaggcattctttaatcatccaaaatgcatgtataaaatatagaacaaaccctagtatttaaacataaacagggttagctgaagcagctttattgcaatctcttcaagttagcatattacagtttaaatatttatgcctgtaaagatctgcataatctacaatacagagttatttcagaagcagttgacttaactagttgagaaaaaaaaacaacaaacttcaacgcaaagctataataatttatccgaaacttatttacaattaaacatttagggtcctgatttacaaaactcagtgcctttcatgatttattgatgagttttatagagaaagtaagcagtatgtagaatattccccaggtaaaatctggagtgaatgg

SEQ ID NO: 393 - DNA, 379 bp, Homo sapiens
ggaggaggcccctgtgagcccactctggaacccttcctggaaccctccctactctgtccccctacagacaaccaagcactaatccccttagtaccaagaaaggggagccaggatttagtcctggcccagcccagagctgggacctggagcacgatctgttgacttccctgggtaggacactgccacctctgggctcaggtcctcatgcctccaaatggcatctagagtttgagcagccttcttggctgaggcaggcctagcctgtggagcgggctagggccaggagcatttggtgcccctccatgttgcaatgcaaacaccttcaccactggggcagtggggagagatggctatattaataaaataacgtgtgtctttc

SEQ ID NO: 394 - DNA, 380 bp, Homo sapiens
ctttacttaaaattatttttccttttagaaagttcaccaggaaaccagctcccctcccaccacgccgggcaggcacagcatctttttaaaatccgcgctgattttccctcacacccccaaacaggaactcctcaggatggcctcagaaggctggagtctctccctgtctggcgggacaccctggtggcggtgaaggcccctctgccacaacggaggtttctgattgtgggacacagtctggtttttgttttcttcctgtcttctaattaaaaaagacattcctgggtgacaggcacagtgcaggagtgtgagctatcgaaacaacctggtgaagtctcgcaaggcccagcaaacttgtttacattcctcagcactagtga

SEQ ID NO: 395 - DNA, 400 bp, Homo sapiens
acagatgaggagcctgaggcatagagaggtttattaatttgtcaatcaaaaagttccaagtttcaaagctgggatgaaaagccaggtcttctgacttgcactctgtcacactggatttttcctctgatccagctgcagcctcccataagaagttcactcttaatttcatgtcccatgctttgtcttggtccctgtgaggaaaggggtcagctaaaggtaactgttctataaggatgggtaggtatcctggcaagatatttcctctgaaatagtaaacgtgaccttagaagttactgtctagggcactctcagctgaataaagtctcccaaggaaacactgaggtagagcagtctgcaagtgcaaaagcacaccttctgcagattccctacaaagtggggt

SEQ ID NO: 396 - DNA, 354 bp, Homo sapiens
ttttttttttttttttagagatcataaatacttttaatatcagataaatcattaagaaattgcattctgtacttgatgaccacacgggaaccttgctagagtcaagagaacttgtcactagtaattatgaagacacctttacggtgagcgttattaaaaccctactagaggttttgggtgggactcaagagcaaggggtggccacctgtggacgagggttccctgttgttaacagaacacgttgcccacctcgcaagtatgcagcccaatcagtccccagggtctcggttcccgttgcgcccttccccatggccactgcgctcattcatgagcctagggtgatcaggcctccgg

SEQ ID NO: 397 - DNA, 460 bp, Homo sapiens
agaaaagccggcataaagcacttttattgcaataataaaacttgagactcataaatggtgctgggggaagggtgcagcaacgatttctcaccaaatcactacacaggacagcaaaggggtgagaaggggctgagggaggaaaagccaggaaactgagatcagcagagggagccaagcatcaaaaaacaggagatgctgaagctgcgatgaccagcatcattttcttaagagaacattcaaggatttgtcatgatggctgggctttcactgggtgttaagtctacaaacagcaccttcaattgaaactgtcaattaaagttcttaagatttaggaagtggtggagcttggaaagttatgagattacaaaattcctggaagtccttatgaaaaccccagggttgaaaaaaaaaagggccccaagagggctccgaggtctctgctgtgcccggggcagatacc

SEQ ID NO: 398 - DNA, 404 bp, Homo sapiens
ttttttttttattttcacttttaatgatcttttacttaataataaaatgaaaaataagaatataggaatacatacaatctatatacatatatttattgcaaatacttaaaattcttatgtaaaatgattttctatatttgtgaaaaaatatgactttttaaatggtgttgacaccaacttctctgtacataccctcaattccaatgttaacaattcctttaaaaaggcaaaagacacaaaagtttagcatttaccaaaccagtctgtacaaaccttacagccagaagggaaaaaaatagcttgtggtaaataagtcaattttcttttaaaataaaaaataaaccccaaaactattccccttattgcatttttctgaaataatctgagtgtctttagagtaactt

SEQ ID NO: 399 - DNA, 435 bp, Homo sapiens
ttttttgaagggtatgtacttctattttttattttctacacaagtgaattcctgattagacattttattgagacagaaatgagtgtatataaaggaagaaattctaaaatatttgttcattaagcccagtgacttgaaaataacctcaagatcaattaaaatataggaagtagagggagccataagttgtggtatgagtttaaaagaccacatcacagaaaagaaaaagattttttttaaagtatcaacaatagaaattgttctagaagtttatgcgcaggaaaattgggaagcccatgcttcccaattttcattgtgttttaaaaagccatgcatacagctcttgctctttgattttcccaaaatgaatctggaagcctcgaattagcattaaatggaataatttgtaagtgccccctcccctcagacacttac

SEQ ID NO: 400 - DNA, 465 bp, Homo sapiens
ttttttttttttttagaaatatatattccactttattagttagaaaaaatcatttaagccacatggtgcgcacaatgtccataacttgagcaggctttggcatcccaccacccccttcagaccaatacacactatgttggaggaacgactttaaaatgtaaaatgagaaatgggcactgaacactccatcctcactcccaacagcccacccacacaacctcttcaactgctatccaaacatggaggagctcttgtggaagagaggctcaacaccaaataattgagcataagacattcaagactaaaggaaccccagacagatgtttaggaagtagggttgaaaatatcaccatctcccaacagctgaagttgggacatctaagagatgtcagagccatactgctgaggaaagcacagcatacaccagaccccggggtaagggcgagatcaacctatctcatagcc

SEQ ID NO: 401 - DNA, 397 bp, Homo sapiens
  misc_feature (1)..(397): n=a,t,g or c
ccagatgttgagtgaccagctctgtggccctgtgtcgtcagaggcttgtgattaactgtggcggcagacacnagcttgtccacagcttgggccaggcttcccctgtcctcccaccggtcggctgcttggcaaggctgttcaggacgtgcacttccccaagtcggcactgagtggcccagcaccgcctagccctgccaccccactgccctcctgggcttctgctggatgggcacctggggggttctggtttttacttttttaatgtaagtctcagtctttgtaattaattattgaattgtgagaacatttttgaacaatttacctgtcaataaagcagaagacggcagttttaaagttaaaaaaaaaaaaaaaaaaaaaaaaaaaaattaaaaaaaaa

SEQ ID NO: 402 - DNA, 337 bp, Homo sapiens
tatccaaccatttataatctttattctataattctccgccagtgctagaattttcttcccaaatggcctcaattcggacactgaataaacgataatgaattttttaaagctgtgcttaaatataaacaaaataaaccgctaagtttttctggctccaagcacgccatatgaagcacgccaatgtcacttatgtgccctgatcacattcaggcaaagtgttcttcactttaaatactcctgtgttccattattgtttaagtaaaatcctatttcaaatgcctttgataacagagaaaccgcctgtagacaaactctttgaaagtgactgaattaatgt

SEQ ID NO: 403 - DNA, 372 bp, Homo sapiens
ttcttttttttttttttttttctcatcaaaacatgatttattaattttaagcaagagtaagcatatgtgatagtggccagcttggggatagaactcttcctggttgatgcacagttcagcacctgttgggtcttggctgttgggatgataattcttttgggtgaggggaacagccgtggtcaaggctgcctgcacccccatccaggcacaggaccctgggcaaagtctcaaaagaggtagtgtttttactttcgcaccaacaatacaacataagtattgggtacaaaagaggagatttccttcccctctacctcaacgggcaaaaggccttccatcttcagaagaggcttgtgaggaccatcggttgatgac

SEQ ID NO: 404 - DNA, 280 bp, Homo sapiens
gaccagtttcaccatcttttttattggatacagagccataaattctctgatgcccatgtgagtccttttaaatacatacactcaggtacattcagcaaagggcatcttacgggtgacatggagcaaagtgctgggatggcgatgcctgggtggggcagagaagtgtggccagggaaggccccctgggcgctggaggtacaggcaccacttcagaaacaaaaataaaaccaaaaattgctctccacccctctgcctgtgcttggggctggggaagctaccc

SEQ ID NO: 405 - DNA, 467 bp, Homo sapiens
gctctgtcaggctggtggcgttttggtgtcttcgtttgttatggccgctgctgtcgctatggagacagatgatgctggaaatcgacttcggtttcagttggagttggaatttgtgcaatgtttagccaacccaaattaccttaattttcttgcccaaagaggttacttcaaagacaaagcttttgttaattatcttaaatacttgctttactggaaagacccagaatatgccaagtatctaaagtaccctcagtgtttacacatgttagagctgctccaatatgaacacttccgaaagagctggtgaatgctcagtgtgcgaaatttattgatgaacagcagattctacattggcagcactattcccggaagcggatgcgccttcagcaagccttggcagagcagcaacagcaaaataacacatcgggaaaatgaaaaactggatacaaacgaggcacttaatacat

SEQ ID NO: 406 - DNA, 448 bp, Homo sapiens
gtttgaaatatggcatttattttacaatgcacatattaggtcgaattgtaacaagcattattttccctactcttctagagtatgcacacaggttactctgaatgcaatgcaataagccttttccaccagctttaactcaccttctgtaccaaagggcaaacctaccactatggcttgtgatggcttacaaagaaaaactgaagcatagccttaagaaaaatgctgcaagatgtgtctatgaagagcactgcagtgagttgttagggcaaggggcacatggccttacataggctgtcccaggcaatgcccagcctcatcctgtaaggaagtcggaagtctccgctttggaaactagttagctcacactcttttcgggtttgttttcttctgggcactcctagttttaatgttcttcttgggactggctggtttgggagcaggagtcttt

SEQ ID NO: 407 - DNA, 308 bp, Homo sapiens
ttttttttttttttttttttttttttttttttttttttttttacatcccaaacaggtctttttatttaacataaggccaaagaagctatcaggcgttgctgaatactgtccactaactgtacaaaatattgactgcatgcctcgcaaacaccaaaatatccgctggaatgccatagaaataaataacttctgctataaacacatgaaaacatatcaaactgttatctctttaaacatattgtaaataaaaaaattaccagtacttctacacaataaatattaagaaaccattgacatagttgaaatgc

SEQ ID NO: 408 - DNA, 426 bp, Homo sapiens
ccatttatttaaaacttttattaacgcttgaagaaaaataatgcaatgtgacaatgtacaggtcctgttgcctaaatccgtagtagaaacagatattatcacttagcaagctcacgtggtgccaattctgagatcagacggggttgttcctccttaggaagtggccactggaagcattgtttttccatgctatttccgtgaagccttttgcttggttcgagtttaaatttctccctttgtgtgagtatgactatagttctggcctggtgttttctatttatttagttttagatgtcagcattttactatacttggtcctctcacttcagaataacagggctatttattgatacaaaggagaggtgttcagatcatcttgttaagatgcagagctcaaaataaacactaaatctttatttggagatc

SEQ ID NO: 409 - DNA, 1201 bp, Homo sapiens
agtcccagctcagagccgcaacctgcacagccatgcccgggcaagaactcaggacgctgaatggctctcagatgctcctggtgttgctggtgctctcgtggctgccgcatgggggcgccctgtctctggccgaggcgagccgcgcaagtttcccgggaccctcagagttgcacaccgaagactccagattccgagagttgcggaaacgctacgaggacctgctaaccaggctgcgggccaaccagagctgggaagattcgaacaccgacctcgtcccggcccctgcagtccggatactcacgccagaagtgcggctgggatccggcggccacctgcacctgcgtatctctcgggccgcccttcccgaggggctccccgaggcctcccgccttcaccgggctctgttccggctgtccccgacggcgtcaaggtcgtgggacgtgacacgacctctgcggcgtcagctcagccttgcaagaccccaggcgcccgcgctgcacctgcgactgtcgccgccgccgtcgcagtcggaccaactgctggcagaatcttcgtccgcacggccccagctggagttgcacttgcggccgcaagccgccagggggcgccgcagagcgcgtgcgcgcaacggggaccactgtccgctcgggcccgggcgttgctgccgtctgcacacggtccgcgcgtcgctggaagacctgggctgggccgattgggtgctgtcgccacgggaggtgcaagtgaccatgtgcatcggcgcgtgcccgagccagttccgggcggcaaacatgcacgcgcagatcaagacgagcctgcaccgcctgaagcccgacacggtgccagcgccctgctgcgtgcccgccagctacaatcccatggtgctcattcaaaagaccgacaccggggtgtcgctccagacctatgatgacttgttagccaaagactgccactgcatatgagcagtcctggtccttccactgtgcacctgcgcgggggaggcgacctcagttgtcctgccctgtggaatgggctcaaggttcctgagacacccgattcctgcccaaacagctgtatttatataagtctgttatttattattaatttattggggtgaccttcttggggactcgggggctggtctgatggaactgtgtatttatttaaaactctggtgataaaaataaagctgtctgaactgttc

SEQ ID NO: 410 - DNA, 513 bp, Homo sapiens
  misc_feature (1)..(513): n=a,t,g or c
ctagaagattaaatgtagcaagaagtggaagagaaacacagtttataagtcatttaataactataattgcatagaatttactcacttttcaaatacttattctgaatgaataccaaatttgtgaaacaaaatatattctatggtgcttagaatggttgttaaatggtgagttagtttnccaagtaaaaactttacgtgcattaacagaggggaatgcataataatcctatgaggtaggccctattatcctcattgaatagaagagaaaaggaggctcaaaaaaattaagtaacccacaaaaagtcacacagctgtgactgtcagtgtcctgctgggcactgcaaactaggccacttttaaagtaagatcattttaaattgagtacncctacttacaaatgaacccattaatgtgatattgacaaatattccnangccggacttataaaagtttaggaaaccaaataggatccaatccggtacccccttacctttttnaaanggtccccttgtc

SEQ ID NO: 411 - DNA, 145 bp, Homo sapiens
  misc_feature (1)..(145): n=a,t,g or c
gatccccatgctaagaaaatgcccaaaaaaataggcaaaacacgagaagagctagggtaagagaaggacgtaaacagaacctgacaccagctccttttccttctatacattatttaatacctattaaataaaatnatttttgaaa

SEQ ID NO: 412 - DNA, 204 bp, Homo sapiens
gttttttttttttttttttaagtacaatttccattttatttttctccagagaaatagcctgtcttcagtctttaagadctcagctccttacatkgggytttggtgggggacgtggggcagcacccgcagdtcctaaatcggggtgggggtgttcggtccttgcgggctccacgagatcgattcctgactactttgctgtgaatt

SEQ ID NO: 413 - DNA, 608 bp, Homo sapiens
accaaaaataagttatttattgctttaaaaaataaacatttataatagaataccaaattctatttaatctaatgtgttaacaaaagcataatatattccagtaaacaaggacttccaacttatcctataactaaaaagtcaactaaacagttggttttagctagagacaaacatcagtcactgccaccaaattccattatataaatttattttgcttcacatttaaggagaaacccagcagaggggtcgccctgctcttccccactagaaatgtactgaaaagtgacaagcccacagaaggaaaggctgtataaggaagtaggagcttcagtcaaatttctactttcattaccctgagggaggtgaaggagggtgttattttcatcaggtcaacatggatgacagtttgatcataaaaaacagcccacattaagatttcatttgtgaaatatggtgagcatgatcatgccctaatgatttcttagggtttggcagtgtctctggtcacatgcccatacttagggttgaaagaaatgctaatactgtaccctgggtcttcctcagatgccacagtggctcctgccctaggatgactaaaaatacggctc

SEQ ID NO: 414 - DNA, 1086 bp, Homo sapiens
cgcagccgcccgcccgcccgctcagcgcccggccccgggatgacggcggcccaggccgcgggtgaggaggcgccaccaggcgtgcggtccgtcaaggtggtcctggtgggcgacggcggctgcgggaagacgtcgctgctgatggtcttcgccgatggggccttccccgagagctacacccccacggtgtttgagcggtacatggtcaacctgcaagtgaaaggcaaacctgtgcacctccacatctgggacacagcagggcaagatgactatgaccgcctgcggcccctgttctaccctgacgccagcgtcctgctgctttgcttcgatgtcaccagcccgaacagctttgacaacatctttaaccggtggtacccagaagtgaatcatttctgcaagaaggtacccatcatcgtcgtgggctgcaagactgacctgcgcaaggacaaatcactggtgaacaagctccgaagaaacggattggagcctgtgacctaccacaggggccaggagatggcgaggtccgtgggcgcggtggcctacctcgagtgctcggctcggctccatgacaacgtccacgccgtcttccaggaggccgccgaggtggccctcagcagccgcggtcgcaacttctggcggcggattacccagggcttttgcgtggtgacctgagcggctcggggcgtcccagcgacgcgggaaggggcagggcgctgacctgctgctgagctggctgggctggacccggtccctaggctgtgaccgccgaactccactgcaacagacgggcgccaccaaagccaggccctgaggcctgggagtcctggactgagaaagggggttcctgggcccacctgctctgtgtagggctcgtcctgcggtgcccgagaatcactcgctaacccctatgcccggtcccggaccgacatcctggagccgcctgtgcagcctgatgccccctcgtggctgctcccagggctgcacctgccaggacctaatgttcttaggtccctctggccagaacccacacccggccccttcccacctgtcatactggtaactgtaacaagaaaaacgacatcactt

SEQ ID NO: 415 - DNA, 1885 bp, Homo sapiens
cgggcactcaccgtgtgtagttggcatctccgcgcgtccggacacccgatcccagcatccctgcctgcaggactgttcgtgttcagctcgcgtcctgcagctgtccgaggtgctccagttggaggctgaggttcccgggctctgtcgctgagtgggcggcggcaccggcggagatgcctgggaagaaggcgcgcaagaacgctcaaccgagccccgcgcgggctccagcagagctggaagtcgagtgtgctactcaactcaggagatttggagacaaactgaacttccggcagaaacttctgaatctgatatccaaactcttctgctcaggaacctgactgcatcaaaaacttgcatgaggggactccttcaaaagagttttctcaggaggtgcacgtttcatcaatttgaagaaagactgcattgtaattgagaggaatgtgaaggtgcattcatgggtgcccttggaaacggaagatggaatacatcaaagtgaatttctgttcaagttttcccagattatcattctttgggatgagagaacattataaaaccactttgtttattttaaagcaagaatggaagacccttgaaaataaagaagtaattattgacacatttcttttttacttagagaatcgttctagtgtttttgccgaagattaccgctggcctactgtgaaggtagatgacctgtgattagactgggcggctggggagaaacagttcagtgcattgttgttgttgctgtttttggtgttttgcttttcagtgccaactcagcacattgtatatgattcggtttatacatattaccttgttataatgaaaaaactcattctgagaacactgaaatgttatactcagtgttgatttcttcggtcactacacaacgtaaaatcatttgtttcttttgactcaaattgtattgcttctgttcagatgatctttcattcaatgtgttcctgttgggcgttactagaaactatggaaaactggaaaataactttgaaaaaattggataaagtataggagggttacttggggccagtaaatcagtagactgaacattcaatataataaaagaacatggggattttgtataaccagggataataaaaagaaaaagaagttaatttttaattgatgtttttgaaacttagtagaacaaatattcagaagtaacttgataagatatgaatgtttctaaagagtttctaaaggttcgaaatgctccttgtcacattagtgtgcatcctacaaaaagtgatctcttaatgtaaattaagaatattttcataattggaatatacttttcttaaaaaaaaggaacagttagttctcatctagaatgaaagttccatatatgcattggtgaatatatatgtatacacatacttacatacttatatgggtatctgtatagataatttgtattagagtattatatagcttcttagtagggtctcaagtaagttcattttttttatctgggctatatacagtcctcaaataaataatgtcttgattttatttcagcaggaataattttatttattttgcctatttataattaaagtatttttctttagtttgaaatgtgtattaaagttacatttttgagttacaagagtcttataactacttgaatttttagttaaaatgtcttaatgtaggttgtagtcactttagatggaaaattacctcacatctgttttcttcagtattacttaagattgtttatttagtggtagagagattttttttttcagcctagaggcagctattttaccatctggtatttatggtctaatttgtatttaaacatatgcacacatataaaagttgatactgtggcagtaaactattaaaagttttcactgtt

SEQ ID NO: 416 - DNA, 251 bp, Homo sapiens
aacagcttaagaccgaggtttattttttctttcacgggacagtgtaatgcaagccaggaaactccttagtagcttttctctaacagcagctcacagatccaggcagcttccatcttgcaacttcgccatctcggtgtttcccttccagtcacagtgatgataaagagagtaaagagaactcacaaactgttcccaactgccttagaccaaagcgacacctgtcacttctgttcacagcccatcaaccagtc

SEQ ID NO: 417 - DNA, 245 bp, Homo sapiens
  misc_feature (1)..(245): n=a,t,g or c
ctataaatctctaatgttatttaggttttttaaggttttggaagtaacagagggatacatacagcaagatccacttacatagttttaaaacatgcaaaacaagattatatatcgtccatatgtaattatatctgtggtaaaatataaagatatgcattttggggacatagtcaccagattattagtagctcaaggaaaggcaggnggaagagtgctctgggtggggggaggttcacagggtgctt

SEQ ID NO: 418 - DNA, 268 bp, Homo sapiens
  misc_feature (1)..(268): n=a,t,g or c
gctttccaaagttttattttttnatttgtacctgccttgttccagaaaacattgaaggtggcttcccaaagtctaactagggataccccctctagcctaggaccctcctccccacacctcaatccaccaaaccatccataatgcacccagataggcccacccccaaaagcctggacaccttgagcacacagttatgaccaggacagactcatctctataggcaaatagctgctggcaaactggcattacctggtttgtggggatgggg

SEQ ID NO: 419 - DNA, 277 bp, Homo sapiens
  misc_feature (1)..(277): n=a,t,g or c
aatcgttataacagttttattcaagtctctgtgtgctctggcattgagaccaggctgagatcagcattacactgtaatacaataagaggtttagccattgaaccaagcctgcttggcatccctagttaacaatttacagtacctcgaaagaaaaaaaaaaaaagccaaaggaaagancctggtaagtttccttcaggactttttcatctttaaatattgttgacaacatacaataacttaaatcccaaagcaaagtgggaattcaaggacacggggt

SEQ ID NO: 420 - DNA, 399 bp, Homo sapiens
  misc_feature (1)..(399): n=a,t,g or c
tcaaaatatttattgaaaaacaatttaccatgacattcctataccacaaacataccactggattctaaataaccaataaaagtatacaaagcctatcctgaaaatatctttggnggtattaaatatataggcccatgaggatagagctgagtaacttaaaaatgttagtccttgggtcacaangactatttgggnaattantaangangngcctcttgacattaggactgcanttaactgaggggtggggggggcatccatataggtcactccggggtttatgggaggggttcttctactattagggncttttcgcttcgaggcgaggcctcggtgcccgaattcttgggcctcgaggggcccaaattcccnataggtgaggtcgtatttaaattccgg

SEQ ID NO: 421 - DNA, 433 bp, Homo sapiens
  misc_feature (1)..(433): n=a,t,g or c
ttttttttttgagtaaaagtgatcgtcatttgagagttatttggctgctttgggcttcaaggctggagaagcaggtaatggcacagtatctcactcactgttcttcctgccctggggttggcagcaccaccagaatgcccagaccactgagttggaattgtcttcccagatttccaactcaggtaaaagaacaaaagccaacaggaaccaatgggctaaggagggagcaacatgtaaaacagtgggtntaaaagaagaaatgcaacgtaaggaggggcaggagagaagtcaaggataatgggagccgagtgggtggccaggaaatntgagtagctctgtgctgactagccttcagtgttaaaacaaatttaaggggaagcagcattatgaggtctcaaggtantgggagccacctgnaaacgggggttaaaag

SEQ ID NO: 422 - DNA, 446 bp, Homo sapiens
  misc_feature (1)..(446): n=a,t,g or c
tttttttttggagcaaggaaagggactttatttcggagagccagcaaaccaagaagatggtggactaatgtcctaaagaaccgtcttaaaattatgcgggctttgcttgtcttttatgtttaggtcgggggaaaggaaggggctgacaaccgcagacatctggacaccagcaagggtccaggggaggtttgcagaacttctttgtccttggctaacagtctgtcatgtgacaatagccaaacctcctcattcctataaacctttaacaaaaacagttaggctgtttacatggcttcccctttaatcccagagttagttttgcaaacgggcatgattcctgtttttgcgttttatctcagtggctcttaaagttattcctaggcctagggtgcagggantagggtaaagggccccttaaaataaaaaatgggagttagttatgttta

SEQ ID NO: 423 - DNA, 249 bp, Homo sapiens
  misc_feature (1)..(249): n=a,t,g or c
aggaagaaagaaaaatttttattacaaggaaagaaaaggagacggccagtctcagacccttctgcgttcagagagacggcagagattcgccatgcaggatgaaattaaggtcagagagccgtttacgctatgctcgggctccccgggctcttcctccctctacggctggccggcattgctggtgcgattcggaagaacgagctgcagnagtcgctcccggccgagggaagggaccgggggcggtgcggg

SEQ ID NO: 424 - DNA, 153 bp, Homo sapiens
  misc_feature (1)..(153): n=a,t,g or c
nngtanttaccaattgtatttattgctagaaactttaaactttttaaaaaagtttttgaatggtagataacatagaaaaagacatccataaaggtaggaagcaatctcatcatttacaaagtgctgcaaatttgataaatttatgttgctgat

SEQ ID NO: 425 - DNA, 468 bp, Homo sapiens
  misc_feature (1)..(468): n=a,t,g or c
ggatctgtgccaaggtttacagcagatattaaaactcttcgatgtctcactgctgttgttcagtcactctctgacttataagaatttagaggtcagatttccccacatatttgaacccttattctgggtccagtcctgtcttcacttccacaactgctgtgttcccacagggagtggatcttctgggagccatttgtaagatagttcaatctgaatttttaacgagatggtacttctcttgggccccacagacacctgcttctccccggatcgctattctcgactatttgcgtttcgggaccggcctgcccctcctctttcccgctctgcccagggaaaagcgagccctcggaaggaacctgggggcagccccagaaagcagtgcccatcaatttccagctncatccacccaggcaggcccatcaatggacctaaatatggtgtctgnttccanccagtnctggccgg

SEQ ID NO: 426 - DNA, 395 bp, Homo sapiens
  misc_feature (1)..(395): n=a,t,g or c
ngaggacaccactcaccacagatagccacatgggggttgcactatgcataagagagagcaaccagggactgtggtatgtaagcttttctgaatcaagaaggtgtgatagcccctgattcccttgaaaggatgcaactggcttgtttttaatttttgagacagggtctcgctctgtcactcctgctggagcgtagtgntgcaattacagctcactgcagcctgaactttccaggtttcagggatcctcctacctcagcctcccgagtgggctggggaccataggtgtgcgacaccacacccagctgtaactgggcttgtttgaattaactctgtgtgtaggaaatgaaattcaaacttgctacaaataaattaataaacagggactctggcttagt

SEQ ID NO: 427 - DNA, 415 bp, Homo sapiens
  misc_feature (1)..(415): n=a,t,g or c
gganttatggtacagtgcatcttgtattaactccacggccatgagacaatgcaaagaacacaaaacttttcaacaatataaacaccatatatcttcaaaatattgtgagaaaagtaaattttgatgggctaaaaaaacaaatatatacataaaggcacatgtaaccagaattctaccaaaaaaaaaaattatcttaagtggaggaatttttcttgctctacaactaaatgaaactgccctaatctgaaagacaaataggccctgtgaaaatctacacctatggcttttcccataanggtacttccttatttatataaggtnttgtantttactttaanatcataacagactantccaactcacttgttgctcaggggggttggcacaaggggncctttntttgggccanctcttc

SEQ ID NO: 428 - DNA, 272 bp, Homo sapiens
  misc_feature (1)..(272): n=a,t,g or c
atcatttattcaaggcatttttatataatcttgcaatcatagtatagatgtataataaaagaatatgagaatgcaaagaggaacataaagccaatgtctgagcatttaaaataagagttcttcaaaaaagttacacgtcttacaaataacattcctgaaaaatttgggagaagctaaaacttcactaaaaacctaacaccaaatgacatgtnacttagtttatagcaagcagttttatatnaattaaatgtntatanaccacaagcnaagat

SEQ ID NO: 429 - DNA, 5416 bp, Homo sapiens
gtgtcccatagtgtttccaaacttggaaagggcgggggagggcgggaggatgcggagggcggaggtatgcagacaacgagtcagagtttccccttgaaagcctcaaaagtgtccacgtcctcaaaaagaatggaaccaatttaagaagccagccccgtggccacgtcccttcccccattcgggccctcctctgcgcccccgcaggctcctcccagctgtggctgcccgggcccccagccccagccctcccattggtggaggcccttttggaggcaccctagggccagggaaacttttgccgtataaatagggcagatccgggatttgttattttagcaccacggcagcaggaggtttcggctaagttggaggtactggccacgactgcatgcccgcgcccgccatgtgatacctccgccggtgacccagggctctgcgacacaaggagtcgcatgtctaagtgctagacatgctcagctttgtggatacgcggactttgttgctgcttgcagtaaccttatgcctagcaacatgccaatctttacaagaggaaactgtaagaaagggcccagccggagatagaggaccacgtggagaaaggggtccaccaggccccccaggcagagatggtgaagatggtcccacaggccctcctggtccacctggtcctcctggcccccctggtctcggtgggaactttgctgctcagtatgatggaaaaggagttggacttggccctggaccaatgggcttaatgggacctagaggcccacctggtgcagctggagccccaggccctcaaggtttccaaggacctgctggtgagcctggtgaacctggtcaaactggtcctgcaggtgctcgtggtccagctggccctcctggcaaggctggtgaagatggtcaccctggaaaacccggacgacctggtgagagaggagttgttggaccacagggtgctcgtggtttccctggaactcctggacttcctggcttcaaaggcattaggggacacaatggtctggatggattgaagggacagcccggtgctcctggtgtgaagggtgaacctggtgcccctggtgaaaatggaactccaggtcaaacaggagcccgtggtcttcctggtgagagaggacgtgttggtgcccctggtccagctggtgcccgtggaagtgatggaagtgtgggtcccgtaggtcctgctggtcctaatgggtctgctggccctccaggtttcccaggtgcccctggtcccaagggtgaaattggagctgttggtaacgctggtcctactggacccgccggtccccgtggtgaagtgggtcttccaggcctctccggccccgttggacctcctggtaatcctggagcaaacggccttactggtgccaagggtgctgctggccttcccggcgttgctggggctcccggcctccctggaccccgcggtattcctggccctcctggtgctgccggtactactggtgccagaggacttgttggtgagcctggtccagctggctccaaaggagagagcggtaacaagggtgagcccggctccgctggtccccaaggtcctcctggtcccagtggtgaagaaggaaagagaggccctaatggggaagctggatctgccggccctccaggacctcctgggctgagaggtagtcctggttctcgtggtcttcctggagctgatggcagagctggcgtcatgggccctcctggtagtcgtggtgcaagtggccctgctggagtccgaggacctaatggagatgctggtcgccctggggagcctggtctcatgggacccagaggtcttcctggttcccctggaaatatcggccccgctggaaaagaaggtcctgtcggcctccctggcatcgacggcaggcctggcccaattggccccgttggagcaagaggagagcctggcaacattggattccctggacccaaaggccccactggtgaccctggcaaaaacggtgataaaggtcatgctggtcttgctggtgctcggggtgctccaggtcctgatggaaacaatggtgctcagggacctcctggaccacagggtgttcaaggtggaaaaggtgaacagggtcccgctggtcctccaggcttccagggtctgcctggcccctcaggtcccgctggtgaagttggcaaaccaggagaaaggggtctccatggtgagtttggtctccctggtcctgctggtccaagaggggaacgcggtcccccaggtgagagtggtgctgccggtcctactggtcctattggaagccgaggtccttctggacccccagggcctgatggaaacaagggtgaacctggtgtggttggtgctgtgggcactgctggtccatctggtcctagtggactcccaggagagaggggtgctgctggcatacctggaggcaagggagaaaagggtgaacctggtctcagaggtgaaattggtaaccctggcagagatggtgctcgtggtgctcatggtgctgtaggtgcccctggtcctgctggagccacaggtgaccggggcgaagctggggctgctggtcctgctggtcctgctggtcctcggggaagccctggtgaacgtggcgaggtcggtcctgctggccccaacggatttgctggtccggctggtgctgctggtcaaccgggtgctaaaggagaaagaggaggcaaagggcctaagggtgaaaacggtgttgttggtcccacaggccccgttggagctgctggcccagctggtccaaatggtccccccggtcctgctggaagtcgtggtgatggaggcccccctggtatgactggtttccctggtgctgctggacggactggtcccccaggaccctctggtatttctggccctcctggtccccctggtcctgctgggaaagaagggcttcgtggtcctcgtggtgaccaaggtccagttggccgaactggagaagtaggtgcagttggtccccctggcttcgctggtgagaagggtccctctggagaggctggtactgctggacctcctggcactccaggtcctcagggtcttcttggtgctcctggtattctgggtctccctggctcgagaggtgaacgtggtctacctggtgttgctggtgctgtgggtgaacctggtcctcttggcattgccggccctcctggggcccgtggtcctcctggtgctgtgggtagtcctggagtcaacggtgctcctggtgaagctggtcgtgatggcaaccctgggaacgatggtcccccaggtcgcgatggtcaacccggacacaagggagagcgcggttaccctggcaatattggtcccgttggtgctgcaggtgcacctggtcctcatggccccgtgggtcctgctggcaaacatggaaaccgtggtgaaactggtccttctggtcctgttggtcctgctggtgctgttggcccaagaggtcctagtggcccacaaggcattcgtggcgataagggagagcccggtgaaaaggggcccagaggtcttcctggcttcaagggacacaatggattgcaaggtctgcctggtatcgctggtcaccatggtgatcaaggtgctcctggctccgtgggtcctgctggtcctaggggccctgctggtccttctggccctgctggaaaagatggtcgcactggacatcctggtacggttggacctgctggcattcgaggccctcagggtcaccaaggccctgctggcccccctggtccccctggccctcctggacctccaggtgtaagcggtggtggttatgactttggttacgatggagacttctacagggctgaccagcctcgctcagcaccttctctcagacccaaggactatgaagttgatgctactctgaagtctctcaacaaccagattgagacccttcttactcctgaaggctctagaaagaacccagctcgcacatgccgtgacttgagactcagccacccagagtggagcagcggttactactggattgaccccaaccaaggatgcactatggaagccatcaaagtatactgtgatttccctaccggcgaaacctgtatccgggcccaacctgaaaacatcccagccaagaactggtataggagctccaaggacaagaaacacgtctggctaggagaaactatcaatgctggcagccagtttgaatataatgttgaaggagtgacttccaaggaaatggctacccaacttgccttcatgcgcctgctggccaactatgcctctcagaacatcacctaccactgcaagaacagcattgcatacatggatgaggagactggcaacctgaaaaaggctgtcattctacagggctctaatgatgttgaacttgttgctgagggcaacagcaggttcacttacactgttcttgtagatggctgctctaaaaagacaaatgaatggggaaagacaatcattgaatacaaaacaaataagccatcacgcctgcccttccttgatattgcacctttggacatcggtggtgctgaccatgaattctttgtggacattggcccagtctgtttcaaataaatgaactcaatctaaattaaaaaagaaagaaatttgaaaaaactttctctttgccatttcttcttcttcttttttaactgaaagctgaatccttccatttcttctgcacatctacttgcttaaattgtgggcaaaagagaaaaagaaggattgatcagagcattgtgcaatacagtttcattaactccttcccccgctcccccaaaaatttgaatttttttttcaacactcttacacctgttatggaaaatgtcaacctttgtaagaaaaccaaaataaaaattgaaaaataaaaaccataaacatttgcaccacttgtggcttttgaatatcttccacagagggaagtttaaaacccaaacttccaaaggtttaaactacctcaaaacactttcccatgagtgtgatccacattgttaggtgctgacctagacagagatgaactgaggtccttgttttgttttgttcataatacaaaggtgctaattaatagtatttcagatacttgaagaatgttgatggtgctagaagaatttgagaagaaatactcctgtattgagttgtatcgtgtggtgtattttttaaaaaatttgatttagcattcatattttccatcttattcccaattaaaagtatgcagattatttgcccaaagttgtcctcttcttcagattcagcatttgttctttgccagtctcattttcatcttcttccatggttccacagaagctttgtttcttgggcaagcagaaaaattaaattgtacctattttgtatatgtgagatgtttaaataaattgtgaaaaaaatgaaataaagcatgtttggttttccaaaagaacatat

SEQ ID NO: 430 - DNA, 5508 bp, Homo sapiens
gattttaggtgatgggcaagtcagaaagtcagatggatataactgatatcaacactccaaagccaaagaagaaacagcgatggactcgactggagatcagcctctcggtccttgtcctgctcctcaccatcatagctgtgagaatgatcgcactctatgcaacctacgatgatggtatttgcaagtcatcagactgcataaaatcagctgctcgactgatccaaaacatggatgccaccactgagccttgtagagactttttcaaatatgcttgcggaggctggttgaaacgtaatgtcattcccgagaccagctcccgttacggcaactttgacattttaagagatgaactagaagtcgttttgaaagatgtccttcaagaacccaaaactgaagatatagtagcagtgcagaaagcaaaagcattgtacaggtcttgtataaatgaatctgctattgatagcagaggtggagaacctctactcaaactgttaccagacatatatgggtggccagtagcaacagaaaactgggagcaaaaatatggtgcttcttggacagctgaaaaagctattgcacaactgaattctaaatatgggaaaaaagtccttattaatttgtttgttggcactgatgataagaattctgtgaatcatgtaattcatattgaccaacctcgacttggcctcccttctagagattactatgaatgcactggaatctataaagaggcttgtacagcatatgtggattttatgatttctgtggccagattgattcgtcaggaagaaagattgcccatcgatgaaaaccagcttgctttggaaatgaataaagttatggaattggaaaaagaaattgccaatgctacggctaaacctgaagatcgaaatgatccaatgcttctgtataacaagatgagattggcccagatccaaaataacttttcactagagatcaatgggaagccattcagctggttgaatttcacaaatgaaatcatgtcaactgtgaatattagtattacaaatgaggaagatgtggttgtttatgctccagaatatttaaccaaacttaagcccattcttaccaaatattctgccagagatcttcaaaatttaatgtcctggagattcataatggatcttgtaagcagcctcagccgaacctacaaggagtccagaaatgctttccgcaaggccctttatggtacaacctcagaaacagcaacttggagacgttgtgcaaactatgtcaatgggaatatggaaaatgctgtggggaggctttatgtggaagcagcatttgctggagagagtaaacatgtggtcgaggatttgattgcacagatccgagaagtttttattcagactttagatgacctcacttggatggatgccgagacaaaaaagagagctgaagaaaaggccttagcaattaaagaaaggatcggctatcctgatgacattgtttcaaatgataacaaactgaataatgagtacctcgagttgaactacaaagaagatgaatacttcgagaacataattcaaaatttgaaattcagccaaagtaaacaactgaagaagctccgagaaaaggtggacaaagatgagtggataagtggagcagctgtagtcaatgcattttactcttcaggaagaaatcagatagtcttcccagccggcattctgcagccccccttctttagtgcccagcagtccaactcattgaactatgggggcatcggcatggtcataggacacgaaatcacccatggcttcgatgacaatggcagaaactttaacaaagatggagacctcgttgactggtggactcaacagtctgcaagtaactttaaggagcaatcccagtgcatggtgtatcagtatggaaacttttcctgggacctggcaggtggacagcaccttaatggaattaatacactgggagaaaacattgctgataatggaggtcttggtcaagcatacagagcctatcagaattatattaaaaagaatggcgaagaaaaattacttcctggacttgacctaaatcacaaacaactatttttcttgaactttgcacaggtgtggtgtggaacctataggccagagtatgcggttaactccattaaaacagatgtgcacagtccaggcaatttcaggattattgggactttgcagaactctgcagagttttcagaagcctttcactgccgcaagaattcatacatgaatccagaaaagaagtgccgggtttggtgatcttcaaaagaagcattgcagcccttggctagacttgccaacaccacagaaatggggaattctctaatcgaaagaaaatgggccctaggggtcactgtactgacttgagggtgattaacagagagggcaccatcacaatacagataacattaggttgtcctagaaagggtgtggagggaggaagggggtctaaggtctatcaagtcaatcatttctcactgtgtacataatgcttaatttctaaagataatattactgtttatttctgtttctcatatggtctaccagtttgctgatgtccctagaaaacaatgcaaaacctttgaggtagaccaggatttctaatcaaaagggaaaagaagatgttgaagaatagagttaggcaccagaagaagagtaggtgacactatagtttaaaacacattgcctaactactagtttttacttttatttgcaacatttacagtccttcaaaatccttccaaagaattcttatacacattggggccttggagcttacatagttttaaactcatttttgccatacatcagttattcattctgtgatcatttattttaagcactcttaaagcaaaaaatgaatgtctaaaattgttttttgttgtacctgctttgactgatgctgagattcttcaggcttcctgcaattttctaagcaatttcttgctctatctctcaaaacttggtatttttcagagatttatataaatgtaaaaataataatttttatatttaattattaactacatttatgagtaactattattataggtaatcaatgaatattgaagtttcagcttaaaataaacagttgtgaaccaagatctataaagcgatatacagatgaaaatttgagactatttaaacttataaatcatattgatgaaaagatttaagcacaaactttagggtaaaaattgcgattggacagttgtctagagatatatatacttgtggttttcaaattggactttcaaaattaaatctgtccctgagagtgtctctgataaaagggcaaatctgcacctatgtagctctgcatctcctgtcttttcaggtttgtcatcagatggaaatattttgataataaattgaaattgtgaactcattgctccctaagactgtgacaactgtctaactttagaagtgcatttctgaatagaaatgggaggcctctgatggaccttctagaattataagtcacaaagagttctggaaaagaactgtttactgcttgataggaattcatcttttgaggcttctgttcctctcttttcctgttgtattgactattttcgttcattacttgattaagattttacaaaagaggagcacttccaaaattcttatttttcctaacaaaagatgaaagcagggaatttctatctaaatgatgagtattagttccctgtctcttgaaaaatgcccatttgcctttaaaaaaaaaagttacagaaatactataacatatgtacataaattgcataaagcataagtatacagttcaataaacttaactttaactgaacaatggccctgtagccagcacctgtaagaaacagagcagtaccagcgctctaaaagcacctccttgtcactttattactcccagaacaacaactatcctgacttctaatatcattcactagctttgcctggttttgtcttttatgcagatagaatcaatcagtatgtattcttttgtgcctggcttctttctctcagccttacatttgtgagattcctctgtattgtgctgattgtggatcttttcattctcattgcagaataatgttctattgtgggacttattacaatttgttcatcctattgttgatgggcacttgagaactttccattttggcgctattacaaatagtgcaactatgaatgtactgcatgttaccatcttacttgagcctttaatggacttatttcttcaaatccttccaaaaattattataagcattgaaattatagtttcaagccaactgtggatacccttaccctttcctcctttatcacaaccaccgttacaagtatacttatatttccctaaaatacatttaaaacttacctaagtgacatttgtagttggagtaataggagcttccagctctaataaaacagctgtctctaacttattttatttccatcatgtcagagcaggtgaagagccagaagtgaagagtgactagtacaaattataaaaagccactagactcttcactgttagctttttaaaacattaggctcccatccctatggaggaacaactctccagtgcctggatcccctctgtctacaaatataagattttctgggcctaaaggatagatcaaagtcaaaaatagcaatgcctccctatccctcacacatccagacatcatgaattttacatggtactcttgttgagttctatagagccttctgatgtctctaaagcactaccgattctttggagttgtcacatcagataagacatatctctaattccatccataaatccagttctactatggctgagttctggtcaaagaaagaaagtttagaagctgagacacaaagggttgggagctgatgaaactcacaaatgatggtaggaagaagctctcgacaatacccgttggcaaggagtctgcctccatgctgcagtgttcgagtggattgtaggtgcaagatggaaaggattgtaggtgcaagctgtccagagaaaagagtccttgttccagccctattctgccactcctgacagggtgaccttgggtatttgcaatattcctttgggcctctgcttctctcacctaaaaaaagagaattagattatattggtggttctcagcaagagaaggagtatgtgtccaatgctgccttcccatgaatctgtctcccagttatgaatcagtgggcaggataaactgaaaactcccatttaagtgtctgaatcgagtgagacaaaattttagtccaaataacaagtaccaaagttttatcaagtttgggtctgtgctgctgttactgttaaccatttaagtggggcaaaaccttgctaattttctcaaaagcatttatcattcttgttgccacagctggagctctcaaactaaaagacatttgttattttggaaagaagaaagactctattctcaaagtttcctaatcagaaatttttatcagtttccagtctcaaaaatacaaaataaaaacaaacgtttttaatact

SEQ ID NO: 431 - DNA, 2259 bp, Homo sapiens
gttctccccttcccggctttcggtccggaggaggcgggagcagcttccctgttctgatcctatcgcgggcggcgcagggccggcttggccttccgtgggacggggaggggggcgggatgtgtcacccaaataccagtggggacggtcggtggtggaaccagccgggcaggtcgggtagagtataagagccggagggagcggccgggcggcagacgcctgcagaccatcccagacgccggagcccgagccccgccgagtccccgcgcctcatccgcccgcgtccggtccgcgttcctccgccccaccatggctcggggccccggcctcgcgccgccaccgctgcggctgccgctgctgctgctggtgctggcggcggtgaccggccacacggccgcgcaggacaactgcacgtgtcccaccaacaagatgaccgtgtgcagccccgacggccccggcggccgctgccagtgccgcgcgctgggctcgggcatggcggtcgactgctccacgctgacctccaagtgtctgctgctcaaggcgcgcatgagcgcccccaagaacgcccgcacgctggtgcggccgagtgagcacgcgctcgtggacaacgatggcctctacgaccccgactgcgaccccgagggccgcttcaaggcgcgccagtgcaaccagacgtcggtgtgctggtgcgtgaactcggtgggcgtgcgccgcacggacaagggcgacctgagcctacgctgcgatgacctggtgcgcacccaccacatcctcattgacctgcgccaccgccccaccgccggcgccttcaaccactcagacctggacgccgagctgaggcggctcttccgcgagcgctatcggctgcaccccaagttcgtggcggccgtgcactacgagcagcccaccatccagatcgagctgcggcagaacacgtctcagaaggccgccggtgaagtggatatcggcgatgccgcctactacttcgagagggacatcaagggcgagtctctattccagggccgcggcggcctggacttgcgcgtgcgcggagaacccctgcaggtggagcgcacgctcatctattacctggacgagattcccccgaagttctccatgaagcgcctcaccgccggcctcatcgccgtcatcgtggtggtcgtggtggccctcgtcgccggcatggccgtcctggtgatcaccaaccggagaaagtcggggaagtacaagaaggtggagatcaaggaactgggggagttgagaaaggaaccgagcttgtaggtacccggcggggcaggggatggggtggggtaccggatttcggtatcgtcccagacccaagtgagtcacgcttcctgattcctcggcgcaaaggagacgtttatcctttcaaattcctgccttccccctcccttttgcgcacacaccaggtttaatagatcctggcctcagggtctcctttctttctcacttctgtcttgaaggaagcatttctaaaatgtatcccctttcggtccaacaacaggaaacctgactggggcagtgaaggaagggatggcacagcgttatgtgtaaaaaacaagtatctgtatgacaacccgggatcgtttgcaagtaactgaatccattgcgacattgtgaaggcttaaatgagtttagatgggaaatagcgttgttatcgccttgggtttaaattatttgatgagttccacttgtatcatggcctacccgaggagaagaggagtttgttaactgggcctatgtagtagcctcatttaccatcgtttgtattactgaccacatatgcttgtcactgggaaagaagcctgtttcagctgcctgaacgcagtttggatgtctttgaggacagacattgcccggaaactcagtctatttattcttcagcttgcccttactaccactgatattggtaatgttcttttttgtaaaatgtttgtacatatgttgtctttgataatgttgctgtaattttttaaaataaaacacgaatttaataaaatatgggaaaggcacaaaccagaagttggcatttgtgaaaagtccctccagatttctatcactttggtctctaatttcccaagacttgtattttttttttatttcaaattataacacttttttttcccccagaagtgggtgtttcatgttgctactctggtgtgtcccaagatatcctaactggccagtgtaaatgctattctttctaaataagattatttggaaacttccttcaaactgcag

SEQ ID NO: 432 - DNA, 6158 bp, Homo sapiens
  misc_feature (1)..(6158): n=a,t,g or c
aaccatcaaatttagaagaaaaagccctttgactttttccccctctccctccccaatggctgtgtagcaaacatccctggcgataccttggaaaggacgaagttggtctgcagtcgcaatttcgtgggttgagttcacagttgtgagtgcggggctcggagatggagccgtggtcctctaggtggaaaacgaaacggtggctctgggatttcaccgtaacaaccctcgcattgaccttcctcttccaagctagagaggtcagaggagctgctccagttgatgtactaaaagcactagattttcacaattctccagagggaatatcaaaaacaacgggattttgcacaaacagaaagaattctaaaggctcagatactgcttacagagtttcaaagcaagcacaactcagtgccccaacaaaacagttatttccaggtggaactttcccagaagacttttcaatactatttacagtaaaaccaaaaaaaggaattcagtctttccttttatctatatataatgagcatggtattcagcaaattggtgttgaggttgggagatcacctgtttttctgtttgaagaccacactggaaaacctgccccagaagactatcccctcttcagaactgttaacatcgctgacgggaagtggcatcgggtagcaatcagcgtggagaagaaaactgtgacaatgattgttgattgtaagaagaaaaccacgaaaccacttgatagaagtgagagagcaattgttgataccaatggaatcacggtttttggaacaaggattttggatgaagaagtttttgagggggacattcagcagtttttgatcacaggtgatcccaaggcagcatatgactactgtgagcattatagtccagactgtgactcttcagcacccaaggctgctcaagctcaggaacctcagatagatgagtatgcaccagaggatataatcgaatatgactatgagtatggggaagcagagtataaagaggctgaaagtgtaacagagggacccactgtaactgaggagacaatagcacagacggaggcaaacatcgttgatgattttcaagaatacaactatggaacaatggaaagttaccagacagaagctcctaggcatgtttctgggacaaatgagccaaatccagttgaagaaatatttactgaagaatatctaacgggagaggattatgattcccagaggaaaaattctgaggatacactatatgaaaacaaagaaatagacggcagggattctgatcttctggtagatggagatttaggcgaatatgatttttatgaatataaagaatatgaagataaaccaacaagcccccctaatgaagaatttggtccaggtgtaccagcagaaactgatattacagaaacaagcataaatggccatggtgcatatggagagaaaggacagaaaggagaaccagcagtggttgagcctggtatgcttgtcgaaggaccaccaggaccagcaggacctgcaggtattatgggtcctccaggtctacaaggccccactggaccccctggtgaccctggcgataggggccccccaggacgtcctggcttaccaggggctgatggtctacctggtcctcctggtactatgttgatgttaccgttccgttatggtggtgatggttccaaaggaccaaccatctctgctcaggaagctcaggctcaagctattcttcagcaggctcggattgctctgagaggcccacctggcccaatgggtctaactggaagaccaggtcctgtgggggggcctggttcatctggggccaaaggtgagagtggtgatccaggtcctcagggccctcgaggcgtccagggtccccctggtccaacgggaaaacctggaaaaaggggtcgtccaggtgcagatggaggaagaggaatgccaggagaacctggggcaaagggagatcgagggtttgatggacttccgggtctgccaggtgacaaaggtcacaggggtgaacgaggtcctcaaggtcctccaggtcctcctggtgatgatggaatgaggggagaagatggagaaattggaccaagaggtcttccaggtgaagctggcccacgaggtttgctgggtccaaggggaactccaggagctccagggcagcctggtatggcaggtgtagatggccccccaggaccaaaagggaacatgggtccccaaggggagcctgggcctccaggtcaacaagggaatccaggacctcagggtcttcctggtccacaaggtccaattggtcctcctggtgaaaaaggaccacaaggaaaaccaggacttgctggacttcctggtgctgatgggcctcctggtcatcctgggaaagaaggccagtctggagaaaagggggctctgggtccccctggtccacaaggtcctattggatnnccgggcccccggggagtaaagggagcagatggtgtcagaggtctcaagggatctaaaggtgaaaagggtgaagatggttttccaggattcaaaggtgacatgggtctaaaaggtgacagaggagaagttggtcaaattggcccaagagggnaagatggccctgaaggacccaaaggtcgagcaggcccaactggagacccaggtccttcaggtcaagcaggagaaaagggaaaacttggagttccaggattaccaggatatccaggaagacaaggtccaaagggttccactggattccctgggtttccaggtgccaatggagagaaaggtgcacggggagtagctggcaaaccaggccctcggggtcagcgtggtccaacgggtcctcgaggttcaagaggtgcaagaggtcccactgggaaacctgggccaaagggcacttcaggtggcgatggccctcctggccctccaggtgaaagaggtcctcaaggacctcagggtccagttggattccctggaccaaaaggccctcctggaccaccaggaaggatgggctgcccaggacaccctgggcaacgtggggagactggatttcaaggcaagaccggccctcctgggccagggggagtggttggaccacagggaccaaccggtgagactggtccaataggggaacgtgggtatcctggtcctcctggccctcctggtgagcaaggtcttcctggtgctgcaggaaaagaaggtgcaaagggtgatccaggtcctcaaggtatctcagggaaagatggaccagcaggattacgtggtttcccaggggaaagaggtcttcctggagctcagggtgcacctggactgaaaggaggggaaggtccccagggcccaccaggtccagttggctcaccaggagaacgtgggtcagcaggtacagctggcccaattggtttacgagggcgcccgggacctcagggtcctcctggtccagctggagagaaaggtgctcctggagaaaaaggtccccaagggcctgcagggagagatggagttcaaggtcctgttggtctcccagggccagctggtcctgccggctcccctggggaagacggagacaagggtgaaattggtgagccgggacaaaaaggcagcaagggtggcaagggagaaaatggccctcccggtcccccaggtcttcaaggaccagttggtgcccctggaattgctggaggtgatggtgaaccaggtcctagaggacagcaggggatgtttgggcaaaaaggtgatgagggtgccagaggcttccctggacctcctggtccaataggtcttcagggtctgccaggcccacctggtgaaaaaggtgaaaatggggatgttggtccatgggggccacctggtcctccaggcccaagaggccctcaaggtcccaatggagctgatggaccacaaggacccccaggttctgttggttcagttggtggtgttggagaaaagggtgaacctggagaagcaggaaacccagggcctcctggggaagcaggtgtaggcggtcccaaaggagaaagaggagagaaaggggaagctggtccacctggagctgctggacctccaggtgccaaggggccgccaggtgatgatggccctaagggtaacccgggtcctgttggttttcctggagatcctggtcctcctggggaacttggccctgcaggtcaagatggtgttggtggtgacaagggtgaagatggagatcctggtcaaccgggtcctcctggcccatctggtgaggctggcccaccaggtcctcctggaaaacgaggtcctcctggagctgcaggtgcagagggaagacaaggtgaaaaaggtgctaagggggaagcaggtgcagaaggtcctcctggaaaaaccggcccagtcggtcctcagggacctgcaggaaagcctggtccagaaggtcttcggggcatccctggtcctgtgggagaacaaggtctccctggagctgcaggccaagatggaccacctggtcctatgggacctcctggcttacctggtctcaaaggtgaccctggctccaagggtgaaaagggacatcctggtttaattggcctgattggtcctccaggagaacaaggggaaaaaggtgaccgagggctccctggaactcaaggatctccaggagcaaaaggggatgggggaattcctggtcctgctggtcccttaggtccacctggtcctccaggcttaccaggtcctcaaggcccaaagggtaacaaaggctctactggacccgctggccagaaaggtgacagtggtcttccagggcctcctgggcctccaggtccacctggtgaagtcattcagcctttaccaatcttgtcctccaaaaaaacgagaagacatactgaaggcatgcaagcagatgcagatgataatattcttgattactcggatggaatggaagaaatatttggttccctcaattccctgaaacaagacatcgagcatatgaaatttccaatgggtactcagaccaatccagcccgaacttgtaaagacctgcaactcagccatcctgacttcccagatggtgaatattggattgatcctaaccaaggttgctcaggagattccttcaaagtttactgtaatttcacatctggtggtgagacttgcatttatccagacaaaaaatctgagggagtaagaatttcatcatggccaaaggagaaaccaggaagttggtttagtgaatttaagaggggaaaactgctttcatacttagatgttgaaggaaattccatcaatatggtgcaaatgacattcctgaaacttctgactgcctctgctcggcaaaatttcacctaccactgtcatcagtcagcagcctggtatgatgtgtcatcaggaagttatgacaaagcacttcgcttcctgggatcaaatgatgaggagatgtcctatgacaataatccttttatcaaaacactgtatgatggttgtacgtccagaaaaggctatgaaaaaactgtcattgaaatcaatacaccaaaaattgatcaagtacctattgttgatgtcatgatcagtgactttggtgatcagaatcagaagttcggatttgaagttggtcctgtttgttttcttggctaagattaagacaaagaacatatcaaatcaacagaaaatgtaccttggtgccaccaacccattttgtgccacatgcaagttttgaataaggatgtatggaaaacaacgctgcatatacaggtaccatttaggaaataccgatgcctttgtgggggcagaatcacagacaaaagctttgaaaatcataaagatataagttggtgtggctaagatggaaacagggctgattcttgattcccaattctcaactctccttttcctatttgaatttctttggtgctgtagaaaacaaaaaaagaaaaatatatattcataaaaaatatggtgctcattctcatccatccaggatgtactaaaacagtgtgtttaataaattgtaattattttgtgtacagttctatactgttatctgtgtccatttccaaaacttgcacgtgtccctgaattccgctgactctaatttatgaggatgccgaactctgatggcaataatatatgtattatgaaaatgaagttatgatttccgatgaccctaagtccctttctttggttaatgatgaaattcctttgtgtgtgttt

SEQ ID NO: 433 - DNA, 2334 bp, Homo sapiens
agacacctctgccctcaccatgagcctctggcagcccctggtcctggtgctcctggtgctgggctgctgctttgctgcccccagacagcgccagtccacccttgtgctcttccctggagacctgagaaccaatctcaccgacaggcagctggcagaggaatacctgtaccgctatggttacactcgggtggcagagatgcgtggagagtcgaaatctctggggcctgcgctgctgcttctccagaagcaactgtccctgcccgagaccggtgagctggatagcgccacgctgaaggccatgcgaaccccacggtgcggggtcccagacctgggcagattccaaacctttgagggcgacctcaagtggcaccaccacaacatcacctattggatccaaaactactcggaagacttgccgcgggcggtgattgacgacgcctttgcccgcgccttcgcactgtggagcgcggtgacgccgctcaccttcactcgcgtgtacagccgggacgcagacatcgtcatccagtttggtgtcgcggagcacggagacgggtatcccttcgacgggaaggacgggctcctggcacacgcctttcctcctggccccggcattcagggagacgcccatttcgacgatgacgagttgtggtccctgggcaagggcgtcgtggttccaactcggtttggaaacgcagatggcgcggcctgccacttccccttcatcttcgagggccgctcctactctgcctgcaccaccgacggtcgctccgacggcttgccctggtgcagtaccacggccaactacgacaccgacgaccggtttggcttctgccccagcgagagactctacacccgggacggcaatgctgatgggaaaccctgccagtttccattcatcttccaaggccaatcctactccgcctgcaccacggacggtcgctccgacggctaccgctggtgcgccaccaccgccaactacgaccgggacaagctcttcggcttctgcccgacccgagctgactcgacggtgatggggggcaactcggcgggggagctgtgcgtcttccccttcactttcctgggtaaggagtactcgacctgtaccagcgagggccgcggagatgggcgcctctggtgcgctaccacctcgaactttgacagcgacaagaagtggggcttctgcccggaccaaggatacagtttgttcctcgtggcggcgcatgagttcggccacgcgctgggcttagatcattcctcagtgccggaggcgctcatgtaccctatgtaccgcttcactgaggggccccccttgcataaggacgacgtgaatggcatccggcacctctatggtcctcgccctgaacctgagccacggcctccaaccaccaccacaccgcagcccacggctcccccgacggtctgccccaccggaccccccactgtccacccctcagagcgccccacagctggccccacaggtcccccctcagctggccccacaggtccccccactgctggcccttctacggccactactgtgcctttgagtccggtggacgatgcctgcaacgtgaacatcttcgacgccatcgcggagattgggaaccagctgtatttgttcaaggatgggaagtactggcgattctctgagggcagggggagccggccgcagggccccttccttatcgccgacaagtggcccgcgctgccccgcaagctggactcggtctttgaggagccgctctccaagaagcttttcttcttctctgggcgccaggtgtgggtgtacacaggcgcgtcggtgctgggcccgaggcgtctggacaagctgggcctgggagccgacgtggcccaggtgaccggggccctccggagtggcagggggaagatgctgctgttcagcgggcggcgcctctggaggttcgacgtgaaggcgcagatggtggatccccggagcgccagcgaggtggaccggatgttccccggggtgcctttggacacgcacgacgtcttccagtaccgagagaaagcctatttctgccaggaccgcttctactggcgcgtgagttcccggagtgagttgaaccaggtggaccaagtgggctacgtgacctatgacatcctgcagtgccctgaggactagggctcccgtcctgctttgcagtgccatgtaaatccccactgggaccaaccctggggaaggagccagtttgccggatacaaactggtattctgttctggaggaaagggaggagtggaggtgggctgggccctctcttctcacctttgttttttgttggagtgtttctaataaacttggattctctaaccttt

SEQ ID NO: 434 - DNA, 1738 bp, Homo sapiens
cgggggggtactgtgcgagccctcaaggaggtggctgttctgtagctggagagctccgtgggtggcaggactgaacttgaacaccagaaacaacccccaagccttgtgacctgggaggcaggaggcgggtctgtctccctgggacttgggtggctgagccgaggtactcgggaccctgtcccgcgcatggcagagtggctcctcacagcctgaagctcatccttctgcacgggccagccaggccagcacagaggcaccagggcagcagtgcacacaggtccccggggaccccaccatgtggagcggatggtggctgtggccccttgtggccgtctgcactgcagacttctttcgggacgaggcagagaggatcatgagggactcccctgtcattgatgggcacaatgacctcccctggcagctgctggatatgttcaacaaccggctgcaggacgagagggccaacctgaccaccttggccggcacacacaccaacatccccaagctgagggccggctttgtgggaggccagttctggtccgtgtacacgccctgcgacacccagaacaaagacgccgtgcggaggacgctggagcagatggacgtggtccaccgcatgtgccggatgtacccggagaccttcctgtatgtcaccagcagtgcaggcattcggcaggccttccgggaagggaaggtggccagcctgatcggcgtggagggcggccactccattgacagcagtttgggcgtcctgcgggcactctatcagctgggcatgcggtacctgaccctcacccacagctgcaacacgccctgggctgacaactggctggtggacacgggagacagcgagccccagagccaaggcttgtcaccctttgggcagcgtgtggtgaaggagctgaaccgtctgggggtcctcatcgacttggctcacgtgtctgtggccaccatgaaggccaccctgcagctgtccagagccccggtcatcttcagccactcctcggcctacagcgtgtgcgcaagccggcgcaacgtgcctgacgacgtcctgaggctggtgaaacagacagacagcctggtgatggtgaacttctacaacaattacatttcctgcaccaacaaggccaacctgtcccaagtggccgaccatctggatcacatcaaggaggtggcaggagccagagccgtgggttttggtggggactttgatggtgttccaagggtccctgaggggctggaggacgtctccaagtatccagacctgatcgctgagctgctcaggaggaactggacggaggcggaggtcaagggcgcactggctgacaacctgctgagggtcttcgaggctgtggaacaggccagcaacctcacacaggctcccgaggaggagcccatcccgctggaccagctgggtggctcctgcaggacccattacggctactcctctggggcttccagcctccatcgccactgggggctcctgctggcctccctcgctcccctggtcctctgtctgtctctcctgtgaaacctgggagaccagagtcccctttagggttcccggagctccgggaagacccgcccatcccaggactccagatgccaggagccctgctgcccacatgcaaggaccagcatctcctgagaggacgcctgggcttacctggggggcaggatgcctggggacagttcaggacacacacacagtaggcccgcaataaaagcaacacccctt

SEQ ID NO: 435 - DNA, 4251 bp, Homo sapiens
gaattcctgggctcaagtgatcctctcatgtcagtctcccaaagtgctgggatgacaggcttgagccaccacaccaggcccatcatcagtttttatataaagaaaaaaaaaccttaaaattgttaggcaaatactatgacaaattgtaatatatattcttacatttcagatttttattttttaaactgtataagaattgattaataaataaaatttagtattaatctgtcttttaaaaccatatataaagtttatcaaatagcttataacttcttgcaactgaatttttgtattcaatgttatggctttgatactagtccaagttgaaatatagatatctactttattcgatttaaattctgtttagtattttattatattttgttaatccatttgtcccaattcatatacttatctctctttctgtgaatattcaggttagttttttcttcctaattttgcattctgattggcttttattccctgaattataaatgactattctatgatgattctggtaaatactcaatttcaccacacaatctttgacttcatactaacaaacagttgacttcaaatggacaatttcaatgaaggctgacttcatatttagctcctttaagcttccttaggcatcagctctctacaattctcacattgagaatatgtgtattttgttagctcaaaccttgttagacatgttaaatgtttagaaatataaatttaacctaccccttgaggtaggtcttgagaggtttgtgagcctaaaaagacatggaggaaccacttattgccacaagcacattgttctaaattatttggaatcagttaattcttccccatctcctacccatgcctgacaccaaagaggagcctctaaatttacagggaatacaaggaagtctactgttctctgctcctctctgggttattagggcacatgggagccctcagttgttttctgctgagcaagagcaaagtccaccttggacttagacagcttgccaaattttttgccagaaggggacctgagttgtgaccactcccagtgtgtgccgggaaaaggctcatactggtgccagaatctcttactgtcaatgctcccaaaactcaccgcttgcccccaccccttttgcttaaatgacgtggttcttatctcagatcctgatataaagctcctacagctacctggcctgagaagccaactcagactcagccaacaggtaagtgggcattacaggagaagggcgtctctaacatgcactgtagatctaaaatcttcgggaagatacagcatgagtttctgtccaagaggttttagctgtaaggaagcctcagtgggatccaaagttgtttttcagttactgagtctgtataatccccactctcaagagaaacatttgaaggtgtgggtgtctcagaggaccttcctggtctcagaaattctgagaggaggttttaaggaaggtaataggtgctttgctctccatctctcagaacccccttctctgtgttctcctatagagattgttgatttgcctcttaagcaagagattcattgcagctcagcatggctcagaccagctcatacttcatgctgatctcctgcctgatgtttctgtctcagagccaaggtaagatctcttttccaccaaccaactctttctagccctgaagacttcactctatccccaagcatacgggtctacttgaaaaaaaaaaaaaagcagagtcactgttaagggttgttttgtggtgtttagtgatctttattgcttatctcttcacatttatatacatccacacctcattaaggagttggagctagaatttaaaatgaccccttataagcaactgctgcagctggcatgagtttatctgattaaatttatacgtgatggtggatttggggatgtctgtgtgtagacagtcactaatggggtggagaactgaagagagccttgtgttcagggaaaccaagtcaggcttgagaaagtagaaggctgagtccttcaaggtagaagagcctgagctccagacataaaagggaaactggagacttgtttctttggcctattcattctgttttttttcccctgatcaaagaaaccaaagacagaagatgtaggatgcaggagcaatagtgagcagtcatcccataatagactggattcttctgtttctataaaggaacctcagaagctcttacctcaccttcaagccttttccttaccctgagagcctcctttaattgtctcttctttttcaggccaagaggcccagacagagttgccccaggcccggatcagctgcccagaaggcaccaatgcctatcgctcctactgctactactttaatgaagaccgcgagacctgggttgatgcagatgtgagtgaggagagcagtgtgggaagggagactcatgaagggaggggaagctgccactctccagtgtgttcagtggctgcaatgagatgagactgaaccccttgctatactatcatcagccccaaactttccaatctactttatcccattattcagcacattcccagcacaaagaacctggtggtcagtgacagcatcatcacggacattactctgctgtcctttttctgacccgtcctcttggaggactcagtatatccgtcacaacttcctcctccactgagtgctccattttcttctgcaacagctctattgccagaacatgaattcgggcaacctggtgtctgtgctcacccaggccgagggtgcctttgtggcctcactgattaaggagagtggcactgatgacttcaatgtctggattgccctccatgaccccaaaaaggtaggctgcagccttctttatctcctaatgatcaggtttgagaagtaagaaggaggttcaagttctggtctcttaagtaccagcttttatcgctttccagaaatcaggctgtttacagatcctctaatgtcctgtgtagcaaggtgcactgtagatgattggagatataagtggaaggctgaatttcctaggtgttcttgtcattcatgaataaacttattctgttttcagtcaacaaagcatctttatgcaccaacttcttacctattttgttactgtcagagtcacaagagagactagattgccgactatataagaaaggagacttgtggtaaaaatctgctgctgtactgctggcatttgggaacctggtagtatactaaataatataatatatcaacaactaatggtcagccaatgctatgctggatatgagggtcctgggccacaaagacaaaaaatcaggaaccactttttaagtgagatactttgggtctctgtcaaattcataacacttatttcttggtggaatacagttaatgagttggacagttcaggaaagaagtttagagcaatagcaaaggaaaggaaacaatatttagcaaggtttattcttcctttgtgtcttagcatgtttctgagtgtgcacacaggcccagtgattccatgtatttttgagtgaccactgcctctgttctggcccttccccatctagaaccgccgctggcactggagcagtgggtccctggtctcctacaagtcctggggcattggagccccaagcagtgttaatcctggctactgtgtgagcctgacctcaagcacaggtgagaggcagagaatccatccacctgtttctgttctctcctgcttagctccagggatggaactgggactgggatagaggaaaggtgaactcctcattaaggaaatggatgtttggtttttgtcctgagtcctaaagccaggagggtcatactctttcgggtctcccagttgtaactcttctcattgacttataggattccagaaatggaaggatgtgccttgtgaagacaagttctcctttgtctgcaagttcaaaaactagaggcagctggaaaatacatgtctagaactgatccagcaattacaacggagtcaaaaattaaaccggaccatctctccaactcaactcaacctggacactctcttctctgctgagtttgccttgttaatcttcaatagttttacctaccccagtctttggaaccctaaataataaaaataaacatgtttccactattgtgctgtcttactgtgtctgctatttccacagctgatgcctgggtggttgagatgagagtgattacaacaaagcttgctctggcctatccacttcttaaaagtccatccgcataccatgcatattggaattc

SEQ ID NO: 436 - DNA, 806 bp, Homo sapiens
tcccctccccaccacagctgtagtgcagtccaccgtctccagtggctatggcggtgccagcggtgtcggcagtggcttaggcctgggtggaggaagcagctactcctatggcagtggtcttggcgttggaggcggctttagttccagcagcggcagagccactgggggtggcctcagctctgttggaggcggcagttccaccatcaagtacaccaccacctcctcctccagcaggaagagctacaagcactgaagctgtgccgccagctctcagtcccacagctctcaggcccctctctggcagcagagccctctcctcaggttgcttgtcctcccctggcctccagtctcccctgccctcccgggtagagctgggatgccctcacttttcttctcatcaatactgttccactgagctcctgttgcttaccatcaagtcaacagttatcagcactcagacatgcgaatgtcctttttagttcccgtattattacaggtatctgagtctgccataattctgagaagaaaaatgacctatatcccccataagaactgaaactcagtctaggagttctcatctgacaagtcagttgtcctgatcttctcttgcagtgtcctgaatggcaagtagtgtaccttctagtgcagtctgcattcctgcactgctttctctgctctctttgccttcttttgttctgtgtgaataaagcatattgagaatgtgaacatgttgtgttagattgtattgctgaccacttcctggtttagaaacattcgcaccccacaaatggtttcttatctttggg

SEQ ID NO: 437 - DNA, 2167 bp, Homo sapiens
ctgcaggaaccaatacccataggctatttgtataaatgggccatggggcctcccagctggaggctggctggtgccacgagggtcccacaggcatgggtgtccttcctatatcacatggccttcactgagactggtatatggattgcacctatcagagaccaaggacaggacctccctggaaatctctgaggacctggcctgtgatccagttgctgccttgtcctcttcctgctatgtcatggcttatcttctttcacccattcattcattcattcattcattcagcagtattagtcaatgtctcttgatatgcctggcacctgctagatggtccccgagtttaccattagtggaaaagacatttaagaaattcaccaagggctctatgagaggccatacacggtggacctgactagggtgtggcttccctgaggagctgaagttgcccagaggcccagagaaggggagctgagcacgtttgaaccactgaacctgctctggacctcgcctccttccttcggtgcctcccagcatcctatcctctttaaagagcaggggttcagggaagttccctggatggtgattcgcaggggcagctcccctctcacctgccgcatgactaccccgccccatctcaaacacacaagctcacgcatgcgggactggagcccttgaggacatgtggcccaaagacaggaggtacaggggctcagtgcgtgcagtggaatgaactgggcttcatctctggaagggtaaggggccatcttccgggttcaccgccgcatccccacccccggcacagcgcctcctggcgactaacatcggtgacttagtgaaaggactaagaaagacccgaggcgaggccggaacaggccgatttctagccgccaagtggagaacaggttggagcggtgcgccgggcttagcggcggttgctggaggaacgggcggagtcgcccagggtcctgccctgcgggggtcgagccgaggcaggcggtgacttccccactcggggcggagccgcagcctcgcgggggcggggcctggcgccggcggtggcgtcacaaaaggcgggaccacagtggtgtccgagaagtcaggcacgtagctcagcggcggccgcggcgcgtgcgtctgtgcctctgcgcgggtctcctggtccttctgccatcatgccgatgttcatcgtaaacaccaacgtgccccgcgcctccgtgccggacgggttcctctccgagctcacccagcagctggcgcaggccaccggcaagcccccccaggtttgccgggaggggacaggaagaggggggtgcccaccggacgaggggttccgcgctgggagctggggaggcgactcctgaacggagctggggggcggggcggggggaggacggtggctcgggcccgaagtggacgttcggggcccgacgaggtcgctggggcgggctgaccgcgccctttcctcgcagtacatcgcggtgcacgtggtcccggaccagctcatggccttcggcggctccagcgagccgtgcgcgctctgcagcctgcacagcatcggcaagatcggcggcgcgcagaaccgctcctacagcaagctgctgtgcggcctgctggccgagcgcctgcgcatcagcccggacaggtacgcggagtcgcggaggggcgggggaggggcggcggcgcgcggccaggcccgggactgagccacccgctgagtccggcctcctccccccgcagggtctacatcaactattacgacatgaacgcggccaatgtgggctggaacaactccaccttcgcctaagagccgcagggacccacgctgtctgcgctggctccacccgggaacccgccgcacgctgtgttctaggcccgcccaccccaaccttctggtggggagaaataaacggtttagagactaggagtgcctcggggttccttggcttgcgggaggaattggtgcagagccgggacattggggagcgaggtcgggaaacggtgttgggggcgggggtcagggccgggttgctctcctcgaacctgctgttcgggagcccttttgtccagcctgtccctcctacgctcctaacagaggagccccagtgtctttccattctatggcgtacgaagggatgaggagaagttggcactctgccctgggctgcag

SEQ ID NO: 438 - DNA, 309 bp, Homo sapiens
ctctcaataggaaagagaagtaattcaagaaagaaatagaaacttcaggcagaacatccattcattcattcattggattgtatatcattgttgcacaatcagaattgataagcactgttcttccactccatttagcaattatgtcacccttttttattgcagttggtttttgaatgtctttcactccttttaaggataaactcctttatggtgtgactgtgtcttattcatctatacttgcagtgggtagatgtcaataaatgttacatacacaaataaataaaatgtttattccatggtaaatttatt

SEQ ID NO: 439 - DNA, 1778 bp, Homo sapiens
tagaagtttacaatgaagtttcttctaatactgctcctgcaggccactgcttctggagctcttcccctgaacagctctacaagcctggaaaaaaataatgtgctatttggtgagagatacttagaaaaattttatggccttgagataaacaaacttccagtgacaaaaatgaaatatagtggaaacttaatgaaggaaaaaatccaagaaatgcagcacttcttgggtctgaaagtgaccgggcaactggacacatctaccctggagatgatgcacgcacctcgatgtggagtccccgatctccatcatttcagggaaatgccaggggggcccgtatggaggaaacattatatcacctacagaatcaataattacacacctgacatgaaccgtgaggatgttgactacgcaatccggaaagctttccaagtatggagtaatgttacccccttgaaattcagcaagattaacacaggcatggctgacattttggtggtttttgcccgtggagctcatggagacttccatgcttttgatggcaaaggtggaatcctagcccatgcttttggacctggatctggcattggaggggatgcacatttcgatgaggacgaattctggactacacattcaggaggcacaaacttgttcctcactgctgttcacgagattggccattccttaggtcttggccattctagtgatccaaaggctgtaatgttccccacctacaaatatgtcgacatcaacacatttcgcctctctgctgatgacatacgtggcattcagtccctgtatggagacccaaaagagaaccaacgcttgccaaatcctgacaattcagaaccagctctctgtgaccccaatttgagttttgatgctgtcactaccgtgggaaataagatctttttcttcaaagacaggttcttctggctgaaggtttctgagagaccaaagaccagtgttaatttaatttcttccttatggccaaccttgccatctggcattgaagctgcttatgaaattgaagccagaaatcaagtttttctttttaaagatgacaaatactggttaattagcaatttaagaccagagccaaattatcccaagagcatacattcttttggttttcctaactttgtgaaaaaaattgatgcagctgtttttaacccacgtttttataggacctacttctttgtagataaccagtattggaggtatgatgaaaggagacagatgatggaccctggttatcccaaactgattaccaagaacttccaaggaatcgggcctaaaattgatgcagtcttctattctaaaaacaaatactactatttcttccaaggatctaaccaatttgaatatgacttcctactccaacgtatcaccaaaacactgaaaagcaatagctggtttggttgttagaaatggtgtaattaatggtttttgttagttcacttcagcttaataagtatttattgcatatttgctatgtcctcagtgtaccactacttagagatatgtatcataaaaataaaatctgtaaaccataggtaatgattatataaaatacataatatttttcaattttgaaaactctaattgtccattcttgcttgactctactattaagtttgaaaatagttaccttcaaagcaagataattctatttgaagcatgctctgtaagttgcttcctaacatccttggactgagaaattatacttacttctggcataactaaaattaagtatatatattttggctcaaataaaattg

SEQ ID NO: 440 - DNA, 3018 bp, Homo sapiens
ctcctcacaggtgtgtctctagtcctcgtggttgcctgccccactccctgccgagacgcctgccagaaaggtcacctatcctgaaccccagcaagcctgaaacagctcagccaagcaccctgcgatggaagctgcagatgcctccaggagcaacgggtcgagcccagaagccagggatgcccggagcccgtcgggccccagtggcagcctggagaatggcaccaaggctgacggcaaggatgccaagaccaccaacgggcacggcggggaggcagctgagggcaagagcctgggcagcgccctgaagccaggggaaggtaggagcgccctgttcgcgggcaatgagtggcggcgacccatcatccagtttgtcgagtccggggacgacaagaactccaactacttcagcatggactctatggaaggcaagaggtcgccgtacgcagggctccagctgggggctgccaagaagccacccgttacctttgccgaaaagggcgacgtgcgcaagtccattttctcggagtcccggaagcccacggtgtccatcatggagcccggggagacccggcggaacagctacccccgggccgacacgggccttttttcacggtccaagtccggctccgaggaggtgctgtgcgactcctgcatcggcaacaagcagaaggcggtcaagtcctgcctggtgtgccaggcctccttctgcgagctgcatctcaagccccacctggagggcgccgccttccgagaccaccagctgctcgagcccatccgggactttgaggcccgcaagtgtcccgtgcatggcaagacgatggagctcttctgccagaccgaccagacctgcatctgctacctttgcatgttccaggagcacaagaatcatagcaccgtgacagtggaggaggccaaggccgagaaggagacggagctgtcactgcaaaaggagcagctgcagctcaagatcattgagattgaggatgaagctgagaagtggcagaaggagaaggaccgcatcaagagcttcaccaccaatgagaaggccatcctggagcagaacttccgggacctggtgcgggacctggagaagcaaaaggaggaagtgagggctgcgctggagcagcgggagcaggatgctgtggaccaagtgaaggtgatcatggatgctctggatgagagagccaaggtgctgcatgaggacaagcagacccgggagcagctgcatagcatcagcgactctgtgttgtttctgcaggaatttggtgcattgatgagcaattactctctccccccacccctgcccacctatcatgtcctgctggagggggagggcctgggacagtcactaggcaacttcaaggacgacctgctcaatgtatgcatgcgccacgttgagaagatgtgcaaggcggacctgagccgtaacttcattgagaggaaccacatggagaacggtggtgaccatcgctatgtgaacaactacacgaacagcttcgggggtgagtggagtgcaccggacaccatgaagagatactccatgtacctgacacccaaaggtggggtccggacatcataccagccctcgtctcctggccgcttcaccaaggagaccacccagaagaatttcaacaatctctatggcaccaaaggtaactacacctcccgggtctgggagtactcctccagcattcagaactctgacaatgacctgcccgtcgtccaaggcagctcctccttctccctgaaaggctatccctccctcatgcggagccaaagccccaaggcccagccccagacttggaaatctggcaagcagactatgctgtctcactaccggccattctacgtcaacaaaggcaacgggattgggtccaacgaagccccatgagctcctggcggaaggaacgaggcgccacacccctgctcttcctcctgaccctgctgctcttgccttctaagctactgtgcttgtctgggtgggagggagcctggtcctgcacctgccctctgcagccctctgccagcctcttgggggcagttccggcctctccgacttccccactggccacactccattcagactcctttcctgccttgtgacctcagatggtcaccatcattcctgtgctcagaggccaacccatcacaggggtgagataggttggggcctgccctaacccgccagcctcctcctctcgggctggatctgggggctagcagtgagtacccgcatggtatcagcctgcctctcccgcccacgccctgctgtctccaggcctatagacgtttctctccaaggccctatcccccaatgttgtcagcagatgcctggacagcacagccacccatctcccattcacatggcccacctcctgcttcccagaggactggccctacgtgctctctctcgtcctacctatcaatgcccagcatggcagaacctgcagtggccaagggctgcagatggaaacctctcagtgtcttgacatcaccctacccaggcggtgggtctccaccacagccactttgagtctgtggtccctggagggtggcttctcctgactggcaggatgaccttagccaagatattcctctgttccctctgctgagataaagaattcccttaacatgatataatccacccatgcaaatagctactggcccagctaccatttaccatttgcctacagaatttcattcagtctacactttggcattctctctggcgatggagtgtggctgggctgaccgcaaaaggtgccttacacactgcccccaccctcagccgttgccccatcagaggctgcctcctccttctgattaccccccatgttgcatatcagggtgctcaaggattggagaggagacaaaaccaggagcagcacagtggggacatctcccgtctcaacagccccaggcctatgggggctctggaaggatgggccagcttgcaggggttggggagggagacatccagcttgggctttcccctttggaataaaccattggtctgtc

SEQ ID NO: 441 - DNA, 2439 bp, Homo sapiens
cagcacccagctccccgccaccgccatggtccccgacaccgcctgcgttcttctgctcaccctggctgccctcggcgcgtccggacagggccagagcccgttgggctcagacctgggcccgcagatgcttcgggaactgcaggaaaccaacgcggcgctgcaggacgtgcgggactggctgcggcagcaggtcagggagatcacgttcctgaaaaacacggtgatggagtgtgacgcgtgcgggatgcagcagtcagtacgcaccggcctacccagcgtgcggcccctgctccactgcgcgcccggcttctgcttccccggcgtggcctgcatccagacggagagcggcggccgctgcggcccctgccccgcgggcttcacgggcaacggctcgcactgcaccgacgtcaacgagtgcaacgcccacccctgcttcccccgagtccgctgtatcaacaccagcccggggttccgctgcgaggcttgcccgccggggtacagcggccccacccaccagggcgtggggctggctttcgccaaggccaacaagcaggtttgcacggacatcaacgagtgtgagaccgggcaacataactgcgtccccaactccgtgtgcatcaacacccggggctccttccagtgcggcccgtgccagcccggcttcgtgggcgaccaggcgtccggctgccagcgcggcgcacagcgcttctgccccgacggctcgcccagcgagtgccacgagcatgcagactgcgtcctagagcgcgatggctcgcggtcgtgcgtgtgtcgcgttggctgggccggcaacgggatcctctgtggtcgcgacactgacctagacggcttcccggacgagaagctgcgctgcccggagccgcagtgccgtaaggacaactgcgtgactgtgcccaactcagggcaggaggatgtggaccgcgatggcatcggagacgcctgcgatccggatgccgacggggacggggtccccaatgaaaaggacaactgcccgctggtgcggaacccagaccagcgcaacacggacgaggacaagtggggcgatgcgtgcgacaactgccggtcccagaagaacgacgaccaaaaggacacagaccaggacggccggggcgatgcgtgcgacgacgacatcgacggcgaccggatccgcaaccaggccgacaactgccctagggtacccaactcagaccagaaggacagtgatggcgatggtataggggatgcctgtgacaactgtccccagaagagcaacccggatcaggcggatgtggaccacgactttgtgggagatgcttgtgacagcgatcaagaccaggatggagacggacatcaggactctcgggacaactgtcccacggtgcctaacagtgcccaggaggactcagaccacgatggccagggtgatgcctgcgacgacgacgacgacaatgacggagtccctgacagtcgggacaactgccgcctggtgcctaaccccggccaggaggacgcggacagggacggcgtgggcgacgtgtgccaggacgactttgatgcagacaaggtggtagacaagatcgacgtgtgtccggagaacgctgaagtcacgctcaccgacttcagggccttccagacagtcgtgctggacccggagggtgacgcgcagattgaccccaactgggtggtgctcaaccagggaagggagatcgtgcagacaatgaacagcgacccaggcctggctgtgggttacactgccttcaatggcgtggacttcgagggcacgttccatgtgaacacggtcacggatgacgactatgcgggcttcatctttggctaccaggacagctccagcttctacgtggtcatgtggaagcagatggagcaaacgtattggcaggcgaaccccttccgtgctgtggccgagcctggcatccaactcaaggctgtgaagtcttccacaggccccggggaacagctgcggaacgctctgtggcatacaggagacacagagtcccaggtgcggctgctgtggaaggacccgcgaaacgtgggttggaaggacaagaagtcctatcgttggttcctgcagcaccggccccaagtgggctacatcagggtgcgattctatgagggccctgagctggtggccgacagcaacgtggtcttggacacaaccatgcggggtggccgcctgggggtcttctgcttctcccaggagaacatcatctgggccaacctgcgttaccgctgcaatgacaccatcccagaggactatgagacccatcagctgcggcaagcctagggaccagggtgaggacccgccggatgacagccaccctcaccgcggctggatgggggctctgcacccagcccaaggggtggccgtcctgagggggaagtgagaagggctcagagaggacaaaataaagtgtgtgtgcaggg

SEQ ID NO: 442 - DNA, 1338 bp, Homo sapiens
ggatcctgccagagcctcctcccacctggaggggtcccagcgtccaccttccctgccccagcccccctcctcgaggtactgggaggctggataaagtcttcggctgggccacaccccaccccaaattctccctgtcccaccctagtgcccaggccaccccggcctgctcccttccgcaaggcacctcaccttctgtgcccagaccattagccaacgcggtgaccttgaccccggcccaggccctgctaatgaagaggaaagcccgtacgcactcggcctgacccacggcgaccctctgtgaccaatcatactaccaacctcttaaacagagctccaccgacgcaatgcccaggcataaaaaggccaggccgagagaccgccaccagtcacggaccctggacccagcgcacccgcaccatggccggccccagcctcgcttgctgtctgctcggcctcctggcgctgacctccgcctgctacatccagaactgccccctgggaggcaagagggccgcgccggacctcgacgtgcgcaaggtgagtccccagccctggtcccgcggcgctccggggagggagggacccgcagccacaggggcgcgccccgctccggcctcgcctgagaactccaggagctgagcggattttgacgccccgcccttgaccgcggtcgaggcccccacggcgccccagcgtctcagccccgctgtccccgcccgaactccgaaccccggaccccagcatccttgcccggcgcaccccggccggcctcgcagggtcctccgagcgagtccccagcgccgccccgcgtcccgctcaccccgcccgtcccccgagtgcctcccctgcggccccgggggcaaaggccgctgcttcgggcccaatatctgctgcgcggaagagctgggctgcttcgtgggcaccgccgaagcgctgcgctgccaggaggagaactacctgccgtcgccctgccagtccggccagaaggcgtgcgggagcgggggccgctgcgccttgggcctctgctgcagcccgggtgagcggggcaaggcgctccggggccagggggaggcgggcgggggtgcggccgggattcccctgactccacctcttcctccagacggctgccacgccgaccctgcctgcgacgcggaagccaccttctcccagcgctgaaacttgatggctccgaacaccctcgaagcgcgccactcgcttcccccatagccaccccagaaatggtgaaaataaaataaagcaggtttttctcctctaccttgactcgtgtctaagtgccagaaatgggacggggagggggcattgtgggactggaagatc

SEQ ID NO: 443 - DNA, 7011 bp, Homo sapiens
cgggccgcatcagccctcctcctgtttgcgctccccagcgtgcaatttatttggggggctaccggggattgaacggagcgggcgagcgctgccaggaggtggggccggccccacctgtcgactgcccgtagtaggcagggagagggcggggtttgtcccatagggcccgccccccagtccctgggtcccgggcgcgcgacgagatataaggcagtcaggaaacaatgcgcctgcagctcgcgctcccgcgccgatcccgagagcgtccgggccgccgtgcgcgagcgagggagggcgcgcgcgcggggggggcgcgctcgtgagtgcgggccgcgctctcggcggcgcgcatgtgcgtgtgtgctggctgccgggctgccccgagccggcggggagccggtccgctccaggtggcgggcggctggagcgaggtgaggctgcgggtggccagggcacgggcgcgggtcccgcggtgcgggctggctgcaggctgccttctgggcacggcgcgcccccgcccggccccgccgggccctgggagctgcgctccgggcggcgctggcaaagtttgctttgaactcgctgcccacagtcgggtccgcgcgctgcgattggcttcccctaccactctgacccggggcccggcttcccgggacgcgaggactgggcgcaggctgcaagctggtggggttggggaggaacgagagcccggcagccgactgtgccgagggacccggggacacctccttcgcccggccggcacccggtcagcacgtccccccttccctcccgcagggagcggacatggactacgactcgtaccagcactatttctacgactatgactgcggggaggatttctaccgctccacggcgcccagcgaggacatctggaagaaattcgagctggtgccatcgccccccacgtcgccgccctggggcttgggtcccggcgcaggggacccggcccccgggattggtcccccggagccgtggcccggagggtgcaccggagacgaagcggaatcccggggccactcgaaaggctggggcaggaactacgcctccatcatacgccgtgactgcatgtggagcggcttctcggcccgggaacggctggagagagctgtgagcgaccggctcgctcctggcgcgccccgggggaacccgcccaaggcgtccgccgccccggactgcactcccagcctcgaagccggcaacccggcgcccgccgccccctgtccgctgggcgaacccaagacccaggcctgctccgggtccgagagcccaagcgactcgggtaaggacctccccgagccatccaagagggggccaccccatgggtggccaaagctctgcccctgcctgaggtcaggcattggctcttctcaagctcttgggccatctccgcctctctttggctgaagctgcccgtgtagtccccaaccgtgtctgtctggcacgtgggtgtgttggtaaacagtttggaaaagtggcgtgggagccagcctccctttgatgattattggagccccaggggacaagggatttgaggtgagggttggcgcttagagaggacaatactggggttggactgtaagggattgaagggggtaccttaagagacactccaaacctgaagtttttttgctgctgcctctttccctaggaaactcacactcccctagggggagaagaagccgagagccttttgtgcaaagccaaaaccttcgtccttttaaaaacctaggtctccagttggctttactttaaaatgccaataataaatgccctcttctcgtgcctccccaccaccacttaccactcgtgcatccctgagacagggagggaagaatgaacactccccattaacagatggaaaaactgaggcttagagatagacaatcactacaagtcagctccagctttctgccatctagccagcccctcttccccaatgctccatcccaaccaggcacctcttccttgatgtttggggtctttgtggtagcttatcttagaagcactacaccttgccttgctgtttgtcctgagatggaaaagtgtccttcttgctccccctcaatagatctccagcgtcagctgctccctggcattcaacaaatattcactggcccctactttgtggcaatctgtgggctacatgctggggtcaaggcagtagaactccaggccctcctctcccatccttgatgcaagtgcaacctcgctgagggcagactggggcatcctgtgccactaaactacattgttcttattctggcatcttagacctccacacccgtgagaaatcctggagagggtatttttgtagagtgtagactgtggctagtgacaaataaattaggaccaagaaagctcactgtagcttttaggaataacttttacacgaccatttgatagggaactggggaatggggtatggaagttttcctacacttgagagaaaaaataggataacaaaaattaaaagtctttttttcctggtccactgtgttaaggtcatttttaaccagcttgctttctacaccaagagtttatgtttgtttaatggctggaaagagaatcttgagatcaaaaaaccaataaagatgtatctctacaacggctggtggagtggtagagtggaaagagcattgctttggaagttggaacattttagtttgagatccagaacgttacaaaggtgatatgtggacttcgctgatctgggcctcagtttccccatttgcacacgatggggttggacttgattgtcctgctgatgacatttccttgtctggatagagtaagacactactctctgaaagggagaatggtgtgcttaaattatttctttcttagatagaatcttcctgagccacgaggcttaacactgaaaattaaaggtttgggatgtaggaaagcctgctgaatcattttctaacctaccctttaacctgaacctgtttgtgagcttctagttcactcacaggccacatggcctggaacaaaatgcaacagattgcaaacaatgaggcggggggtggggaaagtgattggcagcagagctcacccaataggggctaggggctgggtaagacagaattccaaacacagcgtaatcagccaatcatgggctttggggccaggagggctgaatggtcaggtttattaatggagaaataatgcgattgtccacacaatggaagccttcctgacaaaggggctcaagcttcctgatatgcaaagaagctgagaacggagctcttcctttgccgaggccgagatccattaaggtcggacttctgtgtggaggctgcaaaatgtgtggagcaggaggagacttttctcccaattgcccctctcctggttaggttaacctaagagaccttcaagccagtgaatgagaagggcgtgtccaggtgtctccaggtctctggtgttatgagccccatatctgggacattctgctgcccagtctctgcctctggtgcaggtagtttggaaatggtcgcttgtacctttgtgaagttcctgcagcttcgccgacctatgattacaaatctaaccttctagtccagggaaggaggtggggcaggcgacctataaatgatggatgactttagaaacccattgaacccaggagcaaaatgctcctaagggaaaccctttccctcccctctgtgggtgaagagggatgggttgtagccctcccttctctgaatcttcagctgaaagggatggcagaatagagaggtgggggaataataggatttataacttgtgaaaagtaacaattccccaagtgcaggctgtgctgggcaggaacaaagggcagctctgcccacagacccctcatttacaattctgatggggcatgaaagagcccgactggggaagatctttatagctaaactttgtcccaggccggtagctctttctctccaacccctccgtgggggaggggagagcctttgcagactgggggctgttggcttgggtctgccttttgttcttatctaagccttgctgtgcaaaaggaaattggagaatattttccttcttgctaatgtcccctcctttccttcactgtgcccttaccacattacaaatgaatcagctttctgctcacctcgatttgtatatatctaaattggaaaaatgtctcctaccttcccaagcaccagcgtagacagctaaagctgtagggtctatgtttgtgtttctcatgggatgtgtttcttctcttgatctcttttctcggacagagaatgaagaaattgatgttgtgacagtagagaagaggcagtctctgggtattcggaagccggtcaccatcacggtgcgagcagaccccctggatccctgcatgaagcatttccacatctccatccatcagcaacagcacaactatgctgcccgttttcctccagaaagctgctcccaagaagaggcttcagagaggggtccccaagaagaggttctggagagagatgctgcaggggaaaaggaagatgaggaggatgaagagattgtgagtcccccacctgtagaaagtgaggctgcccagtcctgccaccccaaacctgtcagttctgatactgaggatgtgaccaagaggaagaatcacaacttcctggagcgcaagaggcggaatgacctgcgttcgcgattcttggcgctgagggaccaggtgcccaccctggccagctgctccaaggcccccaaagtagtgatcctaagcaaggccttggaatacttgcaagccctggtgggggctgagaagaggatggctacagagaaaagacagctccgatgccggcagcagcagttgcagaaaagaattgcatacctcagtggctactaactgaccaaaaagcctgacagttctgtcttacgaagacacaagtttattttttaacctccctctcccctttagtaatttgcacattttggttatggtgggacagtctggacagtagatcccagaatgcattgcagccggtgcacacacaataaaggcttgcattcttggaaaccttgaaacccagctctccctcttccctgactcatgggagtgctgtatgttctctggcgcctttggcttcccagcaggcagctgactgaggagccttggggtctgcctagctcactagctctgaagaaaaggctgacagatgctatgcaacaggtggtggatgttgtcaggggctccagcctgcatgaaatctcacactctgcatgagctttaggctaggaaaggatgctcccaactggtgtctctggggtgatgcaaggacagctgggcctggatgctctccctgaggctcctttttccagaagacacacgagctgtcttgggtgaagacaagcttgcagacttgatcaacattgaccattacctcactgtcagacactttacagtagccaaggagttggaaacctttatgtattatgatgttagctgacccccttcctcccactcccaatgctgcgaccctgggaacacttaaaaagcttggcctctagattctttgtctcagagccctctgggctctctcctctgagggagggacctttctttcctcacaagggacttttttgttccattatgccttgttatgcaatgggctctacagcaccctttcccacaggtcagaaatatttccccaagacacagggaaatcggtcctagcctggggcctggggatagcttggagtcctggcccatgaacttgatccctgcccaggtgttttccgaggggcacttgaggcccagtcttttctcaaggcaggtgtaagacactcagagggagaactgtactgctgcctctttcccaccttcctcatctcaatccttgagcggcaagtttgaagttcttctggaaccatgcaaatctgtcctcctcatgcaattccaaggagcttgctggctctgcagccacctctgggccccttccagcctgccatgaatcagatatctttcccagaatctgggcgtttctgaagttttggggagagctgttgggactcatccagtgctccagaaggtggacttgcttctggggggttttaaaggagcctccaggagatatgcttagccaaccatgatggattttaccccagctggactcggcagctccaagtggaatccacgtgcagcttctagtctgggaaagtcacccaacctagcagttgtcatgtgggtaacctcaggcacctctaagcctgtcctggaagaaggaccagcagcccctccagaactctgcccaggacagcaggtgcctgctggctctgggtttggaagtttggggtgggtagggggtggtaagtactatatatggctctggaaaaccagctgctacttccaaatctattgtccataatggtttctttctgaggttgcttcttggcctcagaggaccccaggggatgtttggaaatagcctctctacccttctggagcatggtttacaaaagccagctgacttctggaattgtctatggaggacagtttgggtgtaggttactgatgtctcaactgaatagcttgtgttttataagctgctgttggctattatgctgggggagtcttttttttttatattgtatttttgtatgccttttgcaaagtggtgttaactgtttttgtacaaggaaaaaaactcttggggcaatttcctgttgcaagggtctgatttattttgaaaggcaagttcacctgaaattttgtatttagttgtgattactgattgcctgattttaaaatgttgccttctgggacatcttctaataaaagatttctcaaacatgtcagagtgggggcagcttatgccacctgagtcctcctcaaccacggaaaactatttcagggtagccacaagtgatccagagggctgcacttctctaaccatgttgctaacctggtcattccactctgggttcctgaaatgccatttcagacatgttgaaacaatgtaggctcagtactcagtgaacacggaattc

SEQ ID NO: 444 - DNA, 3489 bp, Homo sapiens
  misc_feature (1)..(3489): n=a,t,g or c
ctgcagggccccaacaaccctcaccaaaggccaaggtggtgaccgacggacccacagcggggtggctgggggagtcgaaactcgccagtctccactccactcccaaccgtggtgccccacgcgggcctgggagagtctgtgaggccgcccaccgcttgtcagtagagtgcgcccgcgagccgtaagcacagcccggcaacatgcggtcttcagacaggaaagtggccgcgaatgggaccggggtgcccagcggctgtggggactctgtcctgcggaaaccgcggtgacgagcacaagctcggtcaactggatgggaatcggcctggggggctggcaccgcgcccaccagggggtttgcggcacttccctctgcccctcagcaccccacccctactctccaggaacgtgaggtctgagccgtgatggtggcaggaaggggccctctgtgccatccgagtccccagggacccgcagctggcccccagccatgtgcaaagtatgtgcagggcgctggcaggcagggagcagcaggcatggtgtcccctgaggggagacagtggtctgggagggagaggtcctggaccctgagggaggtgatggggcaatgctcagccctgtctccggatgccaaaggaggggtgcggggaggccgtctttggagaattccaggatgggtgctgggtgagagagacgtgtgctggaactgtccagggcggaggtgggccctgcgggggccctcgggagggccctgctctgattggccggcagggcaggggcgggaattctggcgggccaccccagttagaaaaagcccgggctaggaccgaggagcagggtgagggagggggtgggatgggtggggggtaacgggggaaactggggaagtggggaaccgaggggcaaccaggggaagatggggtgctggaggagagcttgtgggagccaaggagcaccttggacatctggagtctggcaggagtgatgacgggtggaggggctagctcgaggcagggctggtggggcctgaggccagtgaggagtgtggagtaggtgcccaggcatcgtgcagacagggcgacatcagctggggacgatgggcctgagctagggctggaaagaagggggagccaggcattcatcccggtcacttttggttacaggacgtggcagctggttggacgaggggagctggtgggcagggtttgatcccagggcctgggcaacggaggtgtagctggcagcagcgggcaggtgaggaccccatctgccgggcaggtgagtcccttccctccccaggcctcgcttccccagccttctgaaagaaggaggtttaggggatcgagggctggcggggagaagcagacaccctcccagcagaggggcaggatgggggcaggagagttagcaaaggtgacatcttctcggggggagccgagactgcgcaaggctggggggttatgggcccgttccaggcagaaagagcaagagggcagggagggagcacaggggtggccagcgtagggtccagcacgtggggtggtaccccaggcctgggtcagacagggacatggcaggggacacaggacagaggggtccccagctgccacctcacccaccgcaattcatttagtagcaggcacaggggcagctccggcacggctttctcaggcctatgccggagcctcgagggctggagagcgggaagacaggcagtgctcggggagttgcagcaggacgtcaccaggagggcgaagcggccacgggaggggggccccgggacattgcgcagcaaggaggctgcaggggctcggcctgcgggcgccggtcccacgaggcactgcggcccagggtctggtgcggagagggcccacagtggacttggtgacgctgtatgccctcaccgctcagcccctggggctggcttggcagacagtacagcatccaggggagtcaagggcatggggcgagaccagactaggcgaggcgggcggggcggagtgaatgagctctcaggagggaggatggtgcaggcaggggtgaggagcgcagcgggcggcgagcgggaggcactggcctccagagcccgtggccaaggcgggcctcgcgggcggcgacggagccgggatcggtgcctcagcgttcgggctggagacgagggtgagtttttccccctctgccaccctcagcccccacccgcccctccccacacaaccaacacgttctccccacacgactctctcgttctccccacagccaggtctccagctggggtggacgtgcccaccagctgccgaaggccaagacgccaggtccggtggacgtgacaagcaggacatgacatggtccggtgtgacggcgaggacagaggaggcgcgtccggccttcctggtgagcgtgtctgccctccctgcgtcaggacggccctgcccagaccgccccgcgccaccatctcactgccccgacctctgtcttctacagaacaccttaggctggtggggctgcggcaagaagcgggtctgtttctttacttcctccacggagtcggcacactatggctgccctctgggctcccagaacccacaacatgaaaggtgagggncttcctgccacacttggggtggggggcacgcgagaggagctgagtgggacctcaactccttccccatccacagaaatggtgctacccagctcaagcctgggcctttgaatccggacacaaaaccctctagcttggaaatgaatatgctgcactttacaaccactgcactacctgactcaggaatcggctctggaaggtgagcaccagcgctccttnggaagcctccaggcccccgagcaccctgcccccatcccacccacgtgtcgctatctctaggtgaagctagaggaaccagacctcatcagcccaacatcaaagacaccatcggaacagcagcgcccgcagcacccaccccgcaccggcgactccatcttcatggccaccccctgcggtggacggttgaccaccagccaccacatcatcccagagctgagctcctccagcgggatgacgccgtccccaccacctccctcttcttctttttcatccttctgtctctttgtttctgagctttcctgtctttccttttttctgagagattcaaagcctccacgactctgtttcccccgtcccttctgaatttaatttgcactaagtcatttgcactggttggagttgtggagacggccttgagtctcagtacgagtgtgcgtgagtgtgagccaccttggcaagtgcctgtgcagggcccggccgccctccatctgggccgggtgactgggcgccggctgtgtgcccgaggcctcaccctgccctcgcctagtctggaagctccgaccgacatcacggagcagccttcaagcattccattacgccccatctcgctctgtgcccctccccaccagggcttcagcaggagccctggactcatcatcaataaacactgttac

SEQ ID NO: 445 - DNA, 1064 bp, Homo sapiens
  misc_feature (1)..(1064): n=a,t,g or c
cacagccgggtcgcaggcacctccccngccagctctcccgcattctgcacagcttcccgacgcgtctgctgagccccatggcccacgccacgctctccgccgcccccagcaatccccggctcctgcgggtggcgctgctgctcctgctcctggtgggcagccggcgcgcagcaggagcgtccgtggtcactgaactgcgctgccagtgcttgcagacactgcagggaattcacctcaagaacatccaaagtgtgaatgtaaggtcccccggaccccactgcgcccaaaccgaagtcatagccacactcaagaatgggaagaaagcttgtctcaaccccgcatcccccatggttcagaaaatcatcgaaaagatactgaacaaggggagcaccaactgacaggagagaagtaagaagcttatcagcgtatcattgacacttcctgcagggtggtccctgcccttaccagagctgaaaatgaaaaagagaacagcagctttctagggacagctggaaagggacttaatgtgtttgactatttcttacgagggttctacttatttatgtatttatttttgaaagcttgtattttaatattttacatgctgttatttaaagatgtgagtgtgtttcatcaaacatagctcagtcctgattatttaattggaatatgatgggttttaaatgtgtcattaaactaatatttagtgggagaccataatgtgtcagccaccttgataaatgacagggtggggaactggagggtngggggattgaaatgcaagcaattagtggatcactgttagggtaagggaatgtatgtacacatctattttttatacttttttttttaaaaaagaatgtcagttgttatttattcaaattatctcacattatgtgttcaacatttttatgctgaagtttcccttagacattttatgtcttgcttgtagggcataatgccttgtttaatgtccattctgcagcgtttctctttcccttggaaaagagaatttatcattactgttacatttgtacaaatgacatgataataaaagttttatg

SEQ ID NO: 446 - DNA, 3004 bp, Homo sapiens
ctcaattggaggatcaaagttgagaaaagtaatattcgacatttttcgattcaacggagtggccaccaagacgatgtcatagaagtctgaacgagtctcagttccaatttggtagaccacttcatacatctttgttggatttcctgtgtacttggtctttgttttctcctcgatgtacattactgagccagatataagattgcttttggatgcctgcagaagccctgagcaaacaagtttattgccaccttctactgcccaaaggccagaatcagaacaggacagtgacaccgcccccacaaaggcattgatgtccgtgctttggccataattgaccctcataacaggagcaatcatttcattgaggaacttctcagaaaagccggccttttgcaaggtttcaagaagtgttcgattaagcattccaaggaagtcatctcctcctagagcatgaagtaatttttcgacactactgaaggcatagtcatgagactggtagcggtagatcctcatgaacttgtctaacacgtcctctacccacatgtgcatacggagggattgaaatccatagcgccaaactaatttaatcacgttaattatgaaccagttgctctcctcaaataccagagtctctccattatatatccccagtaggccacccagaggctgatgctcaccatggggcgcctgcaactggttgtgttgggcctcacctgctgctgggcagtggcgagtgccgcgaagctgggcgccgtgtacacagaaggtgggttcgtggaaggcgtcaataagaagctcggcctcctgggtgactctgtggacatcttcaagggcatccccttcgcagctcccaccaaggccctggaaaatcctcagccacatcctggctggcaagggaccctgaaggccaagaacttcaagaagagatgcctgcaggccaccatcacccaggacagcacctacggggatgaagactgcctgtacctcaacatttgggtgccccagggcaggaagcaagtctcccgggacctgcccgttatgatctggatctatggaggcgccttcctcatggggtccggccatggggccaacttcctcaacaactacctgtatgacggcgaggagatcgccacacgcggaaacgtcatcgtggtcaccttcaactaccgtgtcggcccccttgggttcctcagcactggggacgccaatctgccaggtaactatggtcttcgggatcagcacatggccattgcttgggtgaagaggaatatcgcggccttcgggggggaccccaacaacatcacgctcttcggggagtctgctggaggtgccagcgtctctctgcagaccctctccccctacaacaagggcctcatccggcgagccatcagccagagcggcgtggccctgagtccctgggtcatccagaaaaacccactcttctgggccaaaaaggtggctgagaaggtgggttgccctgtgggtgatgccgccaggatggcccagtgtctgaaggttactgatccccgagccctgacgctggcctataaggtgccgctggcaggcctggagtaccccatgctgcactatgtgggcttcgtccctgtcattgatggagacttcatccccgctgacccgatcaacctgtacgccaacgccgccgacatcgactatatagcaggcaccaacaacatggacggccacatcttcgccagcatcgacatgcctgccatcaacaagggcaacaagaaagtcacggaggaggacttctacaagctggtcagtgagttcacaatcaccaaggggctcagaggcgccaagacgacctttgatgtctacaccgagtcctgggcccaggacccatcccaggagaataagaagaagactgtggtggactttgagaccgatgtcctcttcctggtgcccaccgagattgccctagcccagcacagagccaatgccaagagtgccaagacctacgcctacctgttttcccatccctctcggatgcccgtctaccccaaatgggtgggggccgaccatgcagatgacattcagtacgttttcgggaagcccttcgccacccccacgggctaccggccccaagacaggacagtctctaaggccatgatcgcctactggaccaactttgccaaaacaggggaccccaacatgggcgactcggctgtgcccacacactgggaaccctacactacggaaaacagcggctacctggagatcaccaagaagatgggcagcagctccatgaagcggagcctgagaaccaacttcctgcgctactggaccctcacctatctggcgctgcccacagtgaccgaccaggaggccacccctgtgccccccacaggggactccgaggccactcccgtgccccccacgggtgactccgagaccgcccccgtgccgcccacgggtgactccggggccccccccgtgccgcccacgggtgactccggggccccccccgtgccgcccacgggtgactccggggccccccccgtgccgcccacgggtgactccggggccccccccgtgccgcccacgggtgactccggggccccccccgtgccgcccacgggtgactccggggccccccccgtgccgcccacgggtgactccggcgccccccccgtgccgcccacgggtgacgccgggcccccccccgtgccgcccacgggtgactccggcgccccccccgtgccgcccacgggtgactccggggccccccccgtgacccccacgggtgactccgagaccgcccccgtgccgcccacgggtgactccggggccccccctgtgccccccacgggtgactctgaggctgcccctgtgccccccacagatgactccaaggaagctcagatgcctgcagtcattaggttttagcgtcccatgagccttggtatcaagaggccacaagagtgggaccccaggggctcccctcccatcttgagctcttcctgaataaagcctcatacccctg

SEQ ID NO: 447 - DNA, 1065 bp, Homo sapiens
gaattaggcacgagagctccttgccagctctcctcctcgcacagccgctcgaaccgcctgctgagccccatggcccgcgccacgctctccgccgcccccagcaatccccggctcctgcgagtggcgctgctgctcctgctcctggtggccgccagccggcgcgcagcaggagcgcccctggccactgaactgcgctgccagtgcttgcagaccctgcagggaattcacctcaagaacatccaaagtgtgaaggtgaagtcccccggaccccactgcgcccaaaccgaagtcatagccacactcaagaatgggcagaaagcttgtctcaaccccgcatcgcccatggttaagaaaatcatcgaaaagatgctgaaaaatggcaaatccaactgaccagaaggaaggaggaagcttattggtggctgttcctgaaggagccctgccttacaggaacagaagaggaaagagagacacagctgcagaggccacctggattgcgcctaatgtgtttgagcatcacttaggagaagtcttctatttatttatttatttatttatttatttgtttgttttagaagattctatgttaatattttatgtgtaaaataaggttatgattgaatctacttgcacactctcccattatatttattgtttattttaggtcaaacccaagttagttcaatcctgattcatatttaatttgaagatagaaggtttgcagatattctctagtcatttgttaatatttcttcgtgatgacatatcacatgtcagccactgtgatagaggctgaggaatccaagaaaatggccagtaagatcaatgtgacggcagggaaatgtatgtgtgtctattttgtaactgtaaagatgaatgtcagttgttatttattgaaatgatttcacagtgtgtggtcaacatttctcatgttgaagctttaagaactaaaatgttctaaatatcccttggacattttatgtctttcttgtaagatactgccttgtttaatgttaattatgcagtgtttccctctgtgttagagcagagaggtttcgatattta

SEQ ID NO: 448 - DNA, 3984 bp, Homo sapiens
gtcctttcacgcgtgtcttcgtgttggtgcgcttttcactggtcataaagtgctgctcacggccgtgaactgctacagcgtgaaggccgccacccgggtccaggatgcttttgccgccgccaagctcctggccctggccctgatcatcctgctgggcttcgtccagatcgggaagggtgatgtgtccaatctagatcccaagttctcatttgaaggcaccaaactggatgtggggaacattgtgctggcattatacagcggcctctttgcctatggaggatggaattacttgaatttcgtcacagaggaaatgatcaacccctacagaaacctgcccctggccatcatcatctccctgcccatcgtgacgctggtgtacgtgctgaccaacctggcctacttcaccaccctgtccaccgagcagatgctgtcgtccgaggccgtggccgtggacttcgggaactatcacctgggcgtcatgtcctggatcatccccgtcttcgtgggcctgtcctgctttggctccgtcaatgggtccctgttcacatcctccaggctcttcttcgtggggtcccgggaaggccacctgccctccatcctctccatgatccacccacagctcctcacccccgtgccgtccctcgtgttcacgtgtgtgatgacgctgctctacgccttctccaaggacatcttctccgtcatcaacttcttcagcttcttcaactggctctgcgtggccctggccatcatcggcatgatctggctgcgccacagaaagcctgagcttgagcggcccatcaaggtgaacctggccctgcctgtgttcttcatcctggcctgcctcttcctgatcgccgtctccttctggaagacacccgtggagtgtggcatcggcttcaccatcatcctcagcgggctgcccgtctacttcttcggggtctggtggaaaaacaagcccaagtggctcctccagggcatcttctccacgaccgtcctgtgtcagaagctcatgcaggtggtcccccaggagacatagccaggaggccgagtggctgccggaggagcatgcgcagaggccagttaaagtagatcacctcctcgaacccactccggttccccgcaacccacagctcagctgcccatcccagtcctcgccgtccctcccaggtcgggcagtggaggctgctgtgaaaactctggtacgaatctcatccctcaactgagggccagggacccaggtgtgcctgtgctcctgcccaggagcagcttttggtctccttgggccctttttcccttccctcctttgtttacttatatatatattttttttaaacttaaattttgggtcaacttgacaccactaagatgattttttaaggagctgggggaaggcaggagccttcctttctcctgccccaagggcccagaccctgggcaaacagagctactgagacttggaacctcattgctaccacagacttgcactgaagccagacagctgcccagacacatgggcttgtgacattcgtgaaaaccaaccctgtgggcttatgtctctgccttagggtttgcagagtggaaactcagccgtagggtggcactgggagggggtgggggatctgggcaaggtgggtgattcctcccaggaggtgcttgaggccccgatggactcctgaccataatcctagccccgagacaccatcctgagccagggaacagccccagggttggggggtgccggcatctcccctagctcaccaggcctggcctctgggcagtgtggcctcttggctatttctgttccagttttggaggctgagttctggttcatgcagacaaagccctgtccttcagtcttctagaaacagagacaagaaaggcagacacaccgcggccaggcacccatgtgggcgcccaccctgggctccacacagcagtgtcccctgccccagaggtcgcagctaccctcagcctccaatgcattggcctctgtaccgcccggcagccccttctggccggtgctgggttcccactcccggcctaggcacctccccgctctccctgtcacgctcatgtcctgtcctggtcctgatgcccgttgtctaggagacagagccaagcactgctcacgtctctgccgcctgcgtttggaggcccctgggctctcacccagtccccacccgcctgcagagagggaactagggcaccccttgtttctgttgttcccgtgaatttttttcgctatgggaggcagccgaggcctggccaatgcggcccactttcctgagctgtcgctgcctccatggcagcagccaaggacccccagaacaagaagacccccccgcaggatccctcctgagctcggggggctctgccttctcaggccccgggcttcccttctccccagccagaggtggagccaagtggtccagcgtcactccagtgctcagctgtggctggaggagctggcctgtggcacagccctgagtgtcccaagccgggagccaacgaagccggacacggcttcactgaccagcggctgctcaagccgcaagctctcagcaagtgcccagtggagcctgccgcccccacctgggcaccgggaccccctcaccatccagtgggcccggagaaacctgatgaacagtttggggactcaggaccagatgtccgtctctcttgcttgaggaatgaagacctttattcacccctgccccgttgcttcccgctgcacatggacagacttcacagcgtctgctcataggacctgcatccttcctggggacgaattccactcgtccaagggacagcccacggtctggaggccgaggaccaccagcaggcaggtggactgactgtgttgggcaagacctcttccctctgggcctgttctcttggctgcaaataaggacagcagctggtgccccacctgcctggtgcattgctgtgtgaatccaggaggcagtggacatcgtaggcagccacggccccaggtccaggagaagtgctccctggaggcacggaccactgcttcccactggggccggcggggcccacgcacgacgtcagcctcttaccttcccgcctcggctaggggtcctcgggatgccgttctgttccaacctcctgttctgggaggtggacatgcctcaaggatacagggagccggcggcctctcgacggcacgcacttcctgttggctgctgcggctgtgggcgagcatgggggctgccagcgtctgttgtggaaagtagctgctagtgaaatggctggggccgctggggtccgtcttcacactgcgcaggtctcttctgggcgtctgagctggggtgggagctcctccgcagaaggttggtggggggtccagtctgtgatccttggtgctgtgtgccccactccagcctggggaccccacttcagaaggtaggggccgtgtcccgcggtgctgactgaggcctgcttccccctccccctcctgctgtgctggaattccacagggaccagggccaccgcaggggactgtctcagaagacttgatttttccgtccctttttctccacactccactgacaaacgtccccagcggtttccacttgtgggcttcaggtgttttcaagcacaacccaccacaacaagcaagtgcattttcagtcgttgtgcttttttgttttgtgctaacgtcttactaatttaaagatgctgtcggcaccatgtttatttatttccagtggtcatgctcagccttgctgctctgcgtggcgcaggtgccatgcctgctccctgtctgtgtcccagccacgcagggccatccactgtgacgtcggccgaccaggctggacaccctctgccgagtaatgacgtgtgtggctgggaccttctttattctgtgttaatggctaacctgttacactgggctgggttgggtagggtgttctggcttttttgtggggtttttatttttaaagaaacactcaatcatcctag

SEQ ID NO: 449 - DNA, 2113 bp, Homo sapiens
gtgcggttgggaacgcggagcggacggattcgattcaacggggttccggaccgcgctgcgctatggagcaggtcaatgagctgaaggagaaaggcaacaaggccctgagcgtgggtaacatcgatgatgccttacagtgctactccgaagctattaagctggatccccacaaccacgtgctgtacagcaaccgttctgctgcctatgccaagaaaggagactaccagaaggcttatgaggatggctgcaagactgtcgacctaaagcctgactggggcaagggctattcacgaaaagcagcagctctagagttcttaaaccgctttgaagaagccaagcgaacctatgaggagggcttaaaacacgaggcaaataaccctcaactgaaagagggtttacagaatatggaggccaggttggcagagagaaaattcatgaaccctttcaacatgcctaatctgtatcagaagttggagagtgatcccaggacaaggacactactcagtgatcctacctaccgggagctgatagagcagctacgaaacaagccttctgacctgggcacgaaactacaagatccccggatcatgaccactctcagcgtcctccttggggtcgatctgggcagtatggatgaggaggaagagattgcaacacctccaccaccaccccctcccaaaaaggagaccaagccagagccaatggaagaagatcttccagagaataagaagcaggcactgaaagaaaaagagctggggaacgatgcctacaagaagaaagactttgacacagccttgaagcattacgacaaagccaaggagctggaccccactaacatgacttacattaccaatcaagcagcggtatactttgaaaagggcgactacaataagtgccgggagctttgtgagaaggccattgaagtggggagagaaaaccgagaagactatcgacagattgccaaagcatatgctcgaattggcaactcctacttcaaagaagaaaagtacaaggatgccatccatttctataacaagtctctggcagagcaccgaaccccagatgtgctcaagaaatgccagcaggcagagaaaatcctgaaggagcaagagcggctggcctacataaaccccgacctggctttggaggagaagaacaaaggcaacgagtgttttcagaaaggggactatccccaggccatgaagcattatacagaagccatcaaaaggaacccgaaagatgccaaattatacagcaatcgagctgcctgctacaccaaactcctggagttccagctggcactcaaggactgtgaggaatgtatccagctggagccgaccttcatcaagggttatacacggaaagccgctgcgctggaagcgatgaaggactacaccaaagccatggatgtgtaccagaaggcgctagacctggactccagctgtaaggaggcggcagacggctaccagcgctgtatgatggcgcagtacaaccggcacgacagccccgaagatgtgaagcgacgagccatggccgaccctgaggtgcagcagatcatgagtgacccagccatgcgccttatcctggaacagatgcagaaggacccccaggcactcagcgaacacttaaagaatcctgtaatagcacagaagatccagaagctgatggatgtgggtctgattgcaattcggtgatgacttgttcatccccccttcccttcgccctcatgtggaaagaggagctgggaccgcggcgagcagcacggagcggaagggagagcaggggagagaaggcctcatctctctatatttatacataaccccggggaagacacagagactcgtacctgcgctgtttgtgccgccgctgcctctgggccctcccagcacacgcatggtctcttcaccgctgccctcgagttccatgtctctttcccctgcccctagttgctgtctcggctgctctcccatagttggttttttttttatttggggcagtgggcatgttatggggaggggagggggttcttccagcctcaggtcccagctgtctcacgttgtttattctgcgtccccttctccaataaaacaagccagttgggcgtggttataac

SEQ ID NO: 450 - DNA, 2372 bp, Homo sapiens
gcaccgcgcgagcttggctgcttctggggcctgtgtggccctgtgtgtcggaaagatggagcaagaagccgagcccgaggggcggccgcgacccctctgaccgagatcctgctgctttcgcagccaggagcaccgtccctccccggattagtgcgtacgagcgcccagtgccctggcccggagagtggaatgatccccgaggcccagggcgtcgtgcttccgcagtagtcagtccccgtgaaggaaactggggagtcttgagggacccccgactccaagcgcgaaaaccccggatggtgaggagcaggcaaatgtgcaataccaacatgtctgtacctactgatggtgctgtaaccacctcacagattccagcttcggaacaagagaccctggttagaccaaagccattgcttttgaagttattaaagtctgttggtgcacaaaaagacacttatactatgaaagaggttcttttttatcttggccagtatattatgactaaacgattatatgatgagaagcaacaacatattgtatattgttcaaatgatcttctaggagatttgtttggcgtgccaagcttctctgtgaaagagcacaggaaaatatataccatgatctacaggaacttggtagtagtcaatcagcaggaatcatcggactcaggtacatctgtgagtgagaacaggtgtcaccttgaaggtgggagtgatcaaaaggaccttgtacaagagcttcaggaagagaaaccttcatcttcacatttggtttctagaccatctacctcatctagaaggagagcaattagtgagacagaagaaaattcagatgaattatctggtgaacgacaaagaaaacgccacaaatctgatagtatttccctttcctttgatgaaagcctggctctgtgtgtaataagggagatatgttgtgaaagaagcagtagcagtgaatctacagggacgccatcgaatccggatcttgatgctggtgtaagtgaacattcaggtgattggttggatcaggattcagtttcagatcagtttagtgtagaatttgaagttgaatctctcgactcagaagattatagccttagtgaagaaggacaagaactctcagatgaagatgatgaggtatatcaagttactgtgtatcaggcaggggagagtgatacagattcatttgaagaagatcctgaaatttccttagctgactattggaaatgcacttcatgcaatgaaatgaatcccccccttccatcacattgcaacagatgttgggcccttcgtgagaattggcttcctgaagataaagggaaagataaaggggaaatctctgagaaagccaaactggaaaactcaacacaagctgaagagggctttgatgttcctgattgtaaaaaaactatagtgaatgattccagagagtcatgtgttgaggaaaatgatgataaaattacacaagcttcacaatcacaagaaagtgaagactattctcagccatcaacttctagtagcattatttatagcagccaagaagatgtgaaagagtttgaaagggaagaaacccaagacaaagaagagagtgtggaatctagtttgccccttaatgccattgaaccttgtgtgatttgtcaaggtcgacctaaaaatggttgcattgtccatggcaaaacaggacatcttatggcctgctttacatgtgcaaagaagctaaagaaaaggaataagccctgcccagtatgtagacaaccaattcaaatgattgtgctaacttatttcccctagttgacctgtctataagagaattatatatttctaactatataaccctaggaatttagacaacctgaaatttattcacatatatcaaagtgagaaaatgcctcaattcacatagatttcttctctttagtataattgacctactttggtagtggaatagtgaatacttactataatttgacttgaatatgtagctcatcctttacaccaactcctaattttaaataatttctactctgtcttaaatgagaagtacttggttttttttttcttaaatatgtatatgacatttaaatgtaacttattattttttttgagaccgagtcttgctctgttacccaggctggagtgcagtgggtgatcttggctcactgcaagctctgccctccccgggttcgcaccattctcctgcctcagcctcccaattagcttggcctacagtcatctgccaccacacctggctaattttttgtacttttagtagagacagggtttcaccgtgttagccaggatggtctcgatctcctgacctcgtgatccgcccacctcggcctcccaaagtgctgggattacaggcatgagccaccg

SEQ ID NO: 451 - DNA, 1618 bp, Homo sapiens
atgtcccggccgcagcttcgacgctggcgcctcgtctctagcccgccgagcggcgtcccgggtctagcgctgctggcgctgctggcgctgctggcgctgcggctcgcggccgggaccgactgcccatgcccggagcctgagctctgccgcccgattcgccaccatccagatttcgaggtctttgtgtttgatgttggacagaaaacttggaaatcttatgattggtcacagattacaactgtggcaacatttggaaaatatgactcagaacttatgtgctacgctcattcaaaaggagccagagtagtacttaaaggagatgtatccttaaaggatatcattgatcctgctttcagagcatcctggatagctcaaaaacttaatttggccaaaacacaatatatggatggaattaatatagatatagagcaagaagttaattgtttatcacctgaatatgatgcattaactgctttagtcaaagaaactacagactctttccatcgtgaaattgagggatcacaggtaacctttgatgtagcttggtctccaaagaacatagacagaagatgctataattatactggaatcgcagatgcttgtgacttcctctttgtgatgtcttatgatgaacaaagtcagatctggtcagaatgtattgcagcagccaatgctccctataatcagacattaactggatataatgactacatcaagatgagcattaatcctaagaaacttgtaatgggtgttccttggtatggttatgattatacctgcctgaatctgtctgaggatcatgtttgtaccattgcaaaagtccctttccggggggctccttgtagtgacgctgcaggacgtcaggtgccctacaaaacgatcatgaagcaaataaatagttctatttctggaaacctatgggataaagatcagcgggctccttattataactataaagatcctgctggccactttcatcaagtatggtatgataaccctcagagtatttctttaaaggcaacatatatacaaaactatcgcttacggggcattggcatgtggaatgcaaactgtcttgactactctggagatgctgtagccaaacagcaaactgaagaaatgtgggaagtcttaaagccaaagctgttacagagatgaacatcttttgtcaaaccattaagagttagaaagatgatctgtatcaacagatctagtttcttgcatttttattatgttgctatatacttttgttatccgtatactaaaaaaaaagaataaataaatgttttgattgtttgaatttgaaaaatacacacgaatgtcctcagtatccaggaacataaaggcaagaagcaagtcaacttacctattaaatattcctctattagatgtttcaacactataatttaattgggaaaaattgctttcagaattttattatgccatatttcccttcattatagtaaaatatatgctcacgaatcaatgctgatttttaaaatatgtataatctgaagtggaaattgtttgcttagagtttttaaaaacctagtctttgaaaagcagtttgtgctatacttttcccccaaccctccaataaatcttaaatttaaaacct

SEQ ID NO: 452 - DNA, 1717 bp, Homo sapiens
cgcctaccgtctccttcaaggcactttcttagacacccgggcaccaggcagatgcaccccccaacacacccaccccaagcaagtcacaaatcagcctgctccaactgtcttatggggagggtgtgagagaggtgcccaaaggcccctaaaaggtgagcctctcctctctccccacaggggtgaatgtgatgctgaggaagattgctgtggctgcagcgtccaagccagcagtggagatcaaacaggagggagacactttctacatcaaaacctccaccaccgtgcgcaccacagagattaacttcaaggttggggaggagtttgaggagcagactgtggatgggaggccctgtaaggtgagtgccagaaggggctccagggtcatggcgtcattgccctgcctctcaacctgccattttccaggctagcagttaactcctagcttctctctgtcccagtagggaaaatccctaggtagtggtgggggctagaaaggggctctctcccttatccctctcactgcattgcccctgctatgggcccagctcacttggccacctgtctcttgcagagcctggtgaaatgggagagtgagaataaaatggtctgtgagcagaagctcctgaagggagagggccccaagacctcgtggaccagagaactgaccaacgatggggaactgatcctggtaagtcctgcctcctccccactaatagcaaacccagtgctaccttccaagattctctgggagaccccagggtgcaggagactcaagaacaaccatggctggactccgcaccctgctgatgggactgcttgaacagaactaaggtgtccctatcccatacagtgccctgtgtgaattagaaatggtgttccttttatgcaagcaaagggcatgtactgagggatcccagcagttcttcagggagatcttcctggcttgaggaggaggacgggccccagggctctattgctatcctccctccattgatgcctgggcattctgggaccagctcctgcctgttggtcttgagccaagaagcaggtttggacctggaggccaagcagagtacctccattcaaccctcctctccaaagccacaggaccccaggggcctctcaggctaacaactacttctgtccttccagaccatgacggcggatgacgttgtgtgcaccagggtctacgtccgagagtgagtggccacaggtagaaccgcggccgaagcccaccactggccatgctcaccgccctgcttcactgccccctccgtcccaccccctccttctaggatagcgctccccttaccccagtcacttctgggggtcactgggatgcctcttgcagggtcttgctttctttgacctcttctctcctcccctacaccaacaaagaggaatggctgcaagagcccagatcacccattccgggttcactccccgcctccccaagtcagcagtcctagccccaaaccagcccagagcagggtctctctaaaggggacttgagggcctgagcaggaaagactggccctctagcttctaccctttgtccctgtagcctatacagtttagaatatttatttgttaattttattaaaatgctttaaaaaaataaaacctgtctctggctcattgggcaggtagataagtcacctgagttcaaccttgcctctgaaatgtagtatgggaaagacttgtgtttctgcagcat

SEQ ID NO: 453 - DNA, 330 bp, Homo sapiens
tgtggataaatatattagcaaataaatatatttcttaacatagtgcctgattcaagcgtctgtctggttcagatataaatacccatgtgggtacctaggtgctagtctccccactaactgagggaaaaaggttcccaggtggggtcctctgcccactttgccaccacattcacattccaaatgggataatgcctgaggggccaagagtggtcaggctgccctggggtgaatgtcaccctgatgaggcccatcagctcttgtccactcagtgaggccagacttgtgctctaatccactctcctgtgggtccctggcctgtatggcttatac

SEQ ID NO: 454 - DNA, 537 bp, Homo sapiens
  misc_feature (1)..(537): n=a,t,g or c
tcttttaaaaaataaatatttataaacttaaggaagattcaaagaatcagggtatcttttcctccaaaaacacaaatgtcccgtgtaagtcaaaccaaggtgcgaccaccaacccatgaatgaagtcccctccccctgcagctacagggttgaggggcaggtgggcaggggagctgctctctctcctgccttcagtcccccttggtgatgaggtcctcaatgtaggcgtccagctcatcatctgtgttgatgtctatgtcctcctgcaccttttgcaggagtgccacgatgttggtcctcagcttctgcagcttctcctccgtctcggcgganttccctctcggaggtgcgcaggctttcctcggaggccttggccgggagtcagcacggctctggtaggaattgcacaggttttggagccctacttcatattgcttgaagtactccttcagaggaaaagatattagctcatctgaattcatagcactcagctgcttcttggagatggggaaacttggaaggcaggaagtanccgta

SEQ ID NO: 455 - DNA, 465 bp, Homo sapiens
caacagccaaataaaaactttattactttttaggcttgacatctttaacagtagaacaagatcactcatgataaatctggaagatgcagatggaagacagtgcttgaagcccaaacaaatgatttactacaagtaattaaaagcagaatatgagaaaagcagcagtgtaaatgacgtaaacattaaaaaatatattagtttgtatatttcccccaggaagtctcacaggaagcacaggacacctgtgcggctgtttgggcatcctgggtacttcttgccctcaggtgaactcccatctctttagttaggaccagaatccacctggcttgtaggagaggaactacatgggagaagctgcattgaggcttttattattaatacctatgactcaaggaataccagccttgggggtgctttggggcctggggagggaagtgactggctctcctggctacactggagact

SEQ ID NO: 456 - DNA, 295 bp, Homo sapiens
caagtttcttcagagtttttaattattattattattttaataacaacctgaatcccagaacttccagatactgtccacactccctcccctgggcagaggagaggaggcacctcaagggaacaagatgggggtggggtgtctgccggggagcctccgactcccccaagccgtctactgctggggggtcccaggagggagggtgggggttggttccctcccagaggggctccctctgacgccccgtcctgaagccctccctcctccatcaaggctggggatgatgaggagatggggc

SEQ ID NO: 457 - DNA, 488 bp, Homo sapiens
  misc_feature (1)..(488): n=a,t,g or c
gcgaccgcagtngcaactccagctggggccgtgcggacgaagattctgccagcagttcggtccgactgcgacggcggcggcgacagtcnagggtgcagcgcgggccctnggggtcttgcaaggctgagctgacgccgcagaggtcgtgtcacgtcccacgaccttgacgccgtcggggacagccggaacanagcccggtgaaggcgggaggctcgaagatcccctcgggaagggcggcccgagagatacgcaggtgcaggtggccgccggatcccagccgcacttctggcgtgagtatccggactgcaggggccgggacgaggtcggtgttcgaatcttcccagctctggttggcccgcaacctgggttaagcaggtcctcgtagcgtttccgcaactctccggaatctggagtcttccggtgtgcaactctgaatggtcccgggaaacttgcgcggctcgcatcggntaaagacagggtgcccccat

SEQ ID NO: 458 - DNA, 448 bp, Homo sapiens
tcgtttctatgaaattactcgtatttatttagtttttctccttcaacaaaaatggaatcaactataaaaactcttgcatcctactttttttcacttactaaatcttagagagttttctgtcaaaacatattgccctagctcatttaaaaaaataacatatatcttatcagtttcctgtgaatagccatttagtctgtttcccatttttattaaaacaatcagtgcccatgtttacttttttttttttgagagggatttttgctcttgttgcccaggctggagtgcagtggcacgaatctcagctcaccgcaacctccacctcccaggttcaagtgattctcctgtctcagcctcctgagtagctgggattacaggcatgtaccaccatacccggctagttttggtatttttagtagagatggggtttctccattttggtcaggctggg

SEQ ID NO: 459 - DNA, 466 bp, Homo sapiens
atcaaagaaacatagagttcgggcaatatacttcatcctacccatcccacccaaatcttactctactcatctcattctcattaattttgggaaatcatcagaagatgtgttcgttgagtaagagattaaaagaaataagctttttgacccctgccaacaccccatgcccagggtggtcaccctccaatacaataacatgccaggaagagtaagttgccctttctgatgccgtaatctgccatcatcttcccatcttccagtctcctttccattgcaagtcacaatctgggtctcagggattatacccgtcttagtctcgatcattgctttcacttgtgccactgagctggaccttcgcacctgggaggaggtgcctctttgcctcatcacctgactccacaagaaacaagggcagctcctcatcactggggcttcaccactttcaggggtaaggtgggatggtctt

SEQ ID NO: 460 - DNA, 340 bp, Homo sapiens
  misc_feature (1)..(340): n=a,t,g or c
gtgaactcctggcctcaagggatcctctggcatgccttgnctcccaaaggcntaggatcacaggcaaaagcaccgtgtgtttatttttcccattcccttcctttatctgcaatgcttttttctttaaggcagcctaatttacaagcttggccttgaattaaaagagaacccagaacccgctcttggagtttacgttctcaaaccaacatcagagcaactgtctatccccatataaataaagttatctacccctgctcctaactgggtacaagttatgactacaactcagtgattttttaaattagtgtgcctatttggtgaaatctgtgaacttaatcaa

SEQ ID NO: 461 - DNA, 470 bp, Homo sapiens
  misc_feature (1)..(470): n=a,t,g or c
aggattcaaacattctaggctttaattctttacctgatgtactcatagaagtaagtcggcctcgttccaggggaggagcccatttgacatatatttcaaactgggctgttgcaactatcccctgggctgctccctgaactgctcgacatacaacgacccaagctactccaattccagctgctggtgggatgagcaggcttaacacagagctgaggcataatgcaaagccaatcattttctttgtagaatatattccagagaagtatccaacaggaacttggatgatgatgacaccataggaggtggaactcaagatgattccctgggatatctgggctccaattatacatagggttcttttatattatccaggaagcttctttgtggaggtgttnggcaaaccatgtggatctgtggctattcaccatgactaccattgtgaggttcaggcacgcacgctgtgctggtta

SEQ ID NO: 462 - DNA, 320 bp, Homo sapiens
cacagtggcagattttctttaatagatatatttcaaacagatacaacaaattaaaaaatctaattcacggcaggtaaacatgggtgctcaaaaagttccacatagacatttacacttgggccatcagtatttccctcacattcccttttgttaagtcccatcttcgcagtggcagtacaggagaaatctccaccgtcaccgcacaatccaccaggcgcattaccacctgaagtgaaggtctcatctcgaaggtgcgctcagccataaaaagaaaacatattacagaaaggaaaaataagtgtgctcttcccacccgcaaa

SEQ ID NO: 463 - DNA, 418 bp, Homo sapiens
  misc_feature (1)..(418): n=a,t,g or c
aaaatcaaaacacacgcaaaaatatattactactcatttgagggtaccctgttatgaaggtataatttatatataataaaattcattattttttagttacagagttctatgagttttggcaaatgcattcaatgccatcactactacaatcaagatatagaacagctccatcacttcaaacaattttcttgtgtcttttttcatcaattcttcctccaactcacagcacagatctgtttgctgatcctgtagtttttaaaatgccatatggattatatacagtatgtagcattttaagtctgacttcctctaattaagcataatgcatttgatgtaactccaagttgttgcangtattggggtgctcatttctttttattactgagtagtatttccactgtatgaatacaccatagtn

SEQ ID NO: 464 - DNA, 434 bp, Homo sapiens
  misc_feature (1)..(434): n=a,t,g or c
agtctcactctgttgctcaggctggagtgcagtggtgtaaggacggcccaatgcagcttcaacctcctgagctcaagcaatcctcttgccttagcctcctgagcagctgagactacaggcatgcgccactgtgcccaggtattttttaaaatttttgtagagatagagtctcattctgttgcctaggctgggtctcaaactcctagactcaagccatcctcacacctcagcctcccaaagtgctgggattacaggtgtgagcctccacgtctggcctggaaatttttaaaaaacatattttcaggatcaagttagaaattataatnggaattgtaaaaatactaaaaattggggtgataatgacaacatcacattaccaaaatttgtgggggttcagtaaaagctctatttcaatctaaatttatagtgtaagt

SEQ ID NO: 465 - DNA, 417 bp, Homo sapiens
ttccagttaatttagtcctttatttttttcattctccatagaatattggttttgtaacaacgaatacaatccaatatataacattaaaacaatccgatacataccattctgctttatgaaagatcagcaaaaatacataaacaaggatataactagtacatttataaaatacatcataacaatgaaaccaaaggatcccacacaataatcttcacatttgacatgctggttacagctgaggagagccagtgtctttggcaagtgattcatatacataagcgatgacactgactaatcctaacacttctgaaatgttcattctttaccagttaaacctaaaataaatcagcaagagtactgaaatataacaagaatgaaatccaaaatttgtcgaaaggggcaatgtttaatactagg

SEQ ID NO: 466 - DNA, 374 bp, Homo sapiens
gaatacaatgatgtatttctttattttcacatacactctagctaaaagagcaagagtacacatcaacaaaaatggaaacaaggctttggctgaaaaaaacatgcatttgacaaatcatgttaatagctagacaagaagaaagttagctttgtaaacttctacttcatttgattcagagaaacagagcatgagttttcttaaaagtaacaagaaaaggaacaaaaaaaatgaggtttgaaatcttttaccatggcaaaacattaacatctttctcaaaaacatagagaaatctggaaaaatcaagaagataaaattctggaccagttagttgacattctttcaagcatacttgtaaaatgtttccttaaagtgtt

SEQ ID NO: 467 - DNA, 437 bp, Homo sapiens
gacacactatttttcgttagtttattacaaaactacagatacaatacacaaaattctaattccgaaatccttctacattttttttttctgagactaaatgccctcaaagcccgtctgcttggcctgtattacaacctgactcctcggctcctggatgcacaggtcagatgttccaacaaccctgaccatggccagtgctatggagtcactccaaaggtggttgagccctctgtgaaaatttaaatggctgctaagtcattctaaataaatacgtgaacggattgtttctgcccctaagatgaaatcccacagatcttatgctcaagctcaggtcttcctactgccgccttcgacatctagaaagtatggtgggatcttcactggatttgttaaccctgggagtgccccttgtgatccagatgagtcaaaacaaacgg

SEQ ID NO: 468 - DNA, 470 bp, Homo sapiens
  misc_feature (1)..(470): n=a,t,g or c
ttacttatcggaggttttattatttttatttatttttgagactgagtcttgctctgtcatcaggctggagtgcagtggctcactgcaacctccgcctcccaggttcaagcaattctcctgcctcagcctccctagtagctgggattacaggtgtccaccaccatgcccaattaatttttgtatttttggtacagacagggtttcaccatgttggccaggatggtctcgatctcgttgaccttgtgatccgcctgcctcggcctcccaaagtgctgggattacaggcgtgcaaccngcccctggactacttatggaggttttaaaaaatcttttaagtccaggcctgacgtttagagaaggttacaaaggcggccaggatctgagtatttccaaaaagctctggaggcagcattgaggtttccttccagttgaatcactgactttaggtcgactggggtactttgggtttt

SEQ ID NO: 469 - DNA, 443 bp, Homo sapiens
ccccgtctcaaaaaatattaataaaaaaatatggctgctttgtagagaatggttgggagggagaatgtgtgggtgtagggaggtctagtgggaggcttttatggggggtgtggggggggtggcctttagcagggcagatggaggaagtgccttgtgccataagacacaggaaggggatgagggaggatgtttcccggccatgatgtactggggccagctcctaccggcttgaaagagccaattctacacatctcttcccaacttggcatttagcgtcttcatgttggtagcctgaaattggctaatggtgggaggctctgcaccacggaaattggcaaacactacgaatcagggcttcccccccatcacacagccagttgctaaatgcttacaagcacatcactggctgtctgctttccagcttgtggtggtttccggtagta

SEQ ID NO: 470 - DNA, 427 bp, Homo sapiens
gacatcctttgtatgtttactataataacagcaaaatttttccaaaccagagccaatttccttggctctaggtacaccccttccaagcaatgcaaaggacatctccaatcatgacatttaagacaattctttatttctctgacagtgacttcttgaagtgcacatataataaataaatagaaaatatatctttgttcatggtgatgcctacaagaaatgtttacatacaaacactctgtacatctaactcccgaaaaaggaccagctatttcggcaacagaaaaaagacaagcatttcagaggagcgttgcttttccttaaagacctaactcacttaagtctttaccaaacagaaataacaagggaggacaattttctaagcaataagaaaatttgtggctaccaaggaaaatgcctagatattggg

SEQ ID NO: 471 - DNA, 436 bp, Homo sapiens
  misc_feature (1)..(436): n=a,t,g or c
tttgctgtaatacacaaaagttttatttttgactttcttcttttctgaaggcaaaataaaatagaactgaacatcagtgaattttgtacaacaaaaacagcttttaatatggaatagtccatgaacattttaaaatctcggaatggcttccctttttcaaagtcatgctttcttgcggtccacaaggagttggcacagaggagatggtggcagcggcgggtgaggtgagtggaggacagggcttctctcagatccgtgttagctggtgccacagactggatgggaggatgctctccacttttctccatgacaaagtttaagggggcaaacaaagtgctgaggaaagcntttgcgaagacccccataagttccgggaactgatgtgtcaggagggccagcatgctgttgaaggaacataatccagcagtaaagagaa

SEQ ID NO: 472 - DNA, 340 bp, Homo sapiens
  misc_feature (1)..(340): n=a,t,g or c
gccttctgagagcaaagtttaatcctgacccagaattataataatttctgaaagttctattaatttcagcacactgtgtaggaattactcaggcttttcccatcctatagctcctaaaaaaccaaagtggctaaccatatctggcataacagaggaagtaaggtgcanttccngantnttcaaccatcacagaaaaagcacacttaatttgcatctcaagtcgtctggagtaaagtctatgttgctggcaacagttgtgttatcctgacttctcttccccaggtccctggtggtctgtaacagagatgtgtttgtgaaaatgctgtcacttggctttctc

SEQ ID NO: 473 - DNA, 505 bp, Homo sapiens
  misc_feature (1)..(505): n=a,t,g or c
tttttttccctgcacacacactttattttgtcctctctgagcccttctcacttccccctcaggacggccaccccttggcatcgggtgcaganccccatccagccgcggtgagggtggctgtcatccggcgggtcctcaccctggtccctaggcttgcgcaagctgatgggtctcatagtcctctgggatggtgtcattgcagcggtaacagggttggcccagatgatgttctcctgggagaagcagaagacccccaggcggccaccccgcatggttgtgtccaagaccacgttgctgtcggccaccagctcagggccctcatagaatcgcaccctgatgtagcccacttgggnccgggtgctgcaggaaccaacgataggacttcttgtccttccaacccacgtttcgcgggtccttccacagcagccgaacctgggaatctgtgtctcctgtatgcaaagaagcgtttcgaagctgttnccggggcctgtggaanaattnaaag

SEQ ID NO: 474 - DNA, 302 bp, Homo sapiens
  misc_feature (1)..(302): n=a,t,g or c
ccattaaggtgaaatcacctatgttttattataaaaaacatgtgacacttataataaacccagtaaggagcacatacaatttgccctgggttcccattttctgagcgatctgtgtttgcttggggtggaggcaccgggaggntcggccacgtggcttcataaagctcagctgcggttctccgtggccacagtgactctgctccgggtacccagtccccgactccttggcctcccaggggccatcccgggggtctcggaaggcacagctcggttagctttgacttcttggtgtggctgaaact

SEQ ID NO: 475 - DNA, 417 bp, Homo sapiens
  misc_feature (1)..(417): n=a,t,g or c
ttagtagagacgaggtcttgctatgtggccctggntggtctcgaactccagagcccaaatgatccacccaccttggcctcccaaagtgctgggattacagaaatgagccaccacacctggcctgattgtttttaaatggcagcaagaacagggttggacagcaagggcaaatcacacagtatgtggcatattcagaattggttgtgagtttccagtagaaagcactgagaatatccatagggcaaaatggaatactaataatcctcatttgcctttgcctttgtactgggaaaccagaccttactttaagcccaccaaaggcaaggtttggggcctgccacagcgggatttcaaaaagacaaagcaatgcaagccacgtgttcaaaatgcccttaagtgggctttttcagggtnttt

SEQ ID NO: 476 - DNA, 375 bp, Homo sapiens
  misc_feature (1)..(375): n=a,t,g or c
ttnacatgaaagagaaactttattgaagtggcaaagagtgaaagtgagggactggcctggagtgggagttgccacactgccccaacagtgattccctttcaaagagctgtgcttcctaaacattctggggggttttgccagagtcttccccttgctcatcctcatttccaggacactgtcattttagtggtctgagtcaagtcccgtatacattcaagaacagggcataggcgtgggaaggtctgggaaagttggggtctttttcccttacatttggggtgactttgattgggnccccctcttcatgattccctctgttgccctcaagttttcccctttggggtaaaattggggggggaaatttttctnccatgt

SEQ ID NO: 477 - DNA, 272 bp, Homo sapiens
  misc_feature (1)..(272): n=a,t,g or c
ttnttttttttctctcatcttgtcttctcgctttatttcattaagttgatcttcaatctctgatatcctttcttccacttgattgatacagctattgatacttttgtttgcttcacgaagttctcgtgctgtgtttttcagctccatcgggtcatttatattcttctctaaactggttattctagttagcaattcatctaaccttttttcaaggttcttagcttccttgcattagggttagaacatgctccctttagtttgggaggagtttg

SEQ ID NO: 478 - DNA, 244 bp, Homo sapiens
  misc_feature (1)..(244): n=a,t,g or c
atgatcnagacttgctttaatctgcacactgcgggggtgggggtgggcatgctcctcagcagtgcattctgggacacgggcgggcgggggctggcacgggaggacgagagcacctgcagggcagcgctggncgngcgnncgggcgggcgggcgatgtgtcagctgcagttcttgggcaggcggtagacgccgtccgcagttagacgagctgctggtcccgcaccttcttctgcaggtagccctg

SEQ ID NO: 479 - DNA, 429 bp, Homo sapiens
  misc_feature (1)..(429): n=a,t,g or c
aganaattnnttttattcagcctgatatagatcatttatgaaaaactaacagcaaacatcatcctcaatggtaaaaggctgaaggatttttctctaaggttaggaacaaggcaaatgcctgctcttgccactctattcagcatagtgctgggagttctagacagagcagttaggcaaggaaaaggaaatctaagggcatccaaattgggaaagggagggaaggtaaaattatctctgtttggccaatggatatggattttatatggtatggaataggaaaacccttaaaggattccncccaggggccnggggncggggtgggcctcacggcctttttaattccccagcactttggggggaggggcccagggtgggggnggggtttgctttgagggnccaggggggtttccaggacttggccgggggggg

SEQ ID NO: 480 - DNA, 284 bp, Homo sapiens
tttttttttttttggaaaaagaaatttttttttaattagaaaccaagtttacatacggttaaatggttactaaaagctcagttgtaaccactcctaacaccactagcagaacctcaagggagccaagagctcttcccttttcccctgttaatttccagtataatgtagcagcacaattatttcatgtcacatttaagaagaacaagaaccaatttatataaaggtacaattgtatatccttaaacattccacataaacacactgtcaaaactcactggatatgc

SEQ ID NO: 481 - DNA, 371 bp, Homo sapiens
  misc_feature (1)..(371): n=a,t,g or c
ttttttttttttaaagtttaaacaccttttatttgaagaaatattgcttctagnactttcctgaagccagaattgttctataaaagtatcatggaatattatacatgattaaaaaacagagtatgcttcctaataacttgaaatctttttacaaagcacattattcatgatcataaatatgtttgttctgtcatcccaccgatgatacacacatcaggcaagcagctaatttgaacatatgtacagagtctatgataaagatttaaagttaccaaaaagattcaggctataacatattaaattttctttaaaagagtttaccntaaacacttaaagganaacatagtttatctaggcacttggagttatct

SEQ ID NO: 482 - DNA, 373 bp, Homo sapiens
  misc_feature (1)..(373): n=a,t,g or c
ttttttttttttaaggaataaggtgaatttttattaagtgaaaaaaatcaataacaatataggaatgatcacatctatacaaatacattgctacatttctacatataaaatgtataggaaaaagtctgaaagaatgcacaccaaattattctgtttttaggaaaagcagtaggattggtcagggcatggaatgtcggctaagtgaagtgagatttaaaatttttattctacatgattttctagtgttgggaatttttgacagtgagcatacatgcacttattacttgcataattctgaaaactattttaaaaacaacaganaatatatgaaagtctattgggtgtatacagcattaatagtagtgaaagttta

SEQ ID NO: 483 - DNA, 316 bp, Homo sapiens
  misc_feature (1)..(316): n=a,t,g or c
tgaaaggggtttatttctggtgcacacaattgcttcattgtgaatatacatgtgattctctgtacacaggaaatggaattatgttcaaaataatagacacagcaaacaagtttctttgaagttactaaaaattaatgactacataaaataaacattctaaaactaagtaagtattattaatttgaatagttagtaggtgtaagggaaaaggcatcacactacaataaacaaacaaaaaccaacatggcattcctcgcattagggtaaaggcaccttcnaaatatttttctcttttatacttttttttttaattgtg

SEQ ID NO: 484 - DNA, 364 bp, Homo sapiens
aaggctgctgttaaataactttaatggttgatgtgggagtcacaagggagttatgtttgctccaagggttcttcagtgccatcctcaaagctggttagtgcagggaggtagggcagagttggttccagttttcttccaggaagggtttagggaggtcccagcgagccccaggaatgagtccctcggtaccatggcaaccacaatttaagaggggcttctgccaacccctgcagcctaccccagggtccagcagaggaacaggaggccagactggcaaacttgctatagacagcgccgtatccagagcccaactgcgcatgggtcattttctcttctggggcagatcctatgccagcacctttct

SEQ ID NO: 485 - DNA, 328 bp, Homo sapiens
  misc_feature (1)..(328): n=a,t,g or c
tgagccaaaatatatatacttaattttagttatgccagaagtaagtataatttctcagtccaaggatgttaggaagcaacttacagagcatgcttcaaataganttctcttggcctttgaaggtaactattttcaaacttaatagtagagtcaagcaagantggacaattagagtttncaaanttgaaaantattatgtattttatataatcattacctatggtttacagattttatttttatgatacatatctctaaggtaggtgggtacactgaggacataggcaantatgccaataaatacttatttaagctggaagtganctaa

SEQ ID NO: 486 - DNA, 534 bp, Homo sapiens
caggactcgacgtcggacctgatcccggccccacctctgagcaaggtccctctgcagcagaacttccaggacaaccaattccaggggaagtggtatgtggtaggcctggcagggaatgcaattctcagagaagacaaagacccgcaaaagatgtatgccaccatctatgagctgaaagaagacaagagctacaatgtcacctccgtcctgtttaggaaaaagaagtgtgactactggatcaggacttttgttccaggttgccagcccggcgagttcacgctgggcaacattaagagttaccctggattaacgagttacctcgtccgagtggtgagcaccaactacaaccagcatgctatggtgttcttcaagaaagtttctcaaaacagggagtacttcaagatcacgctctacgggagaaccaaggagctgacttcggaactaaaggagaacttcatccgcttctccaaatctctgggcctccctgaaaaccacatcgtcttccccgtccccatcgatcaatgcatcgacggc

SEQ ID NO: 487 - DNA, 3118 bp, Homo sapiens
ggggggggggggggggggagaggcttccctggctggtgcctgagcccggcgtccctcgccccccgccctccccgcatccctctcctccctcgcgcctggccctgtggctcttcctccctccctccttccccccccccccacccctcgcccgctgcctccctcggcccagccagctgtgccggcgtttgttggctgccctgcgcccggccctccagccagccttctgccggccccgccgcgatggaggtgccccagccggagcccgcgccaggctcggctctcagtccagcaggcgtgtgcggtggcgcccagcgtccgggccacctcccgggcctcctgctgggatctcatggcctcctggggtccccggtgcgggcggccgcttcctcgccggtcaccaccctcacccagaccatgcacgacctcgccgggctcggcagccgcagccgcctgacgcacctatccctgtctcgacgggcatccgaatcctccctgtcgtctgaatcctccgaatcttctgatgcaggtctctgcatggattcccccagccctatggacccccacatggcggagcagacgtttgaacaggccatccaggcagccagccggatcattcgaaacgagcagtttgccatcagacgcttccagtctatgccggtgaggctgctgggccacagccccgtgcttcggaacatcaccaactcccaggcgcccgacggccggaggaagagcgaggcgggcagtggagctgccagcagctctggggaagacaaggagaatgatggatttgtcttcaagatgccatggaagcccacacatcccagctccacccatgctctggcagagtgggccagccgcagggaagcctttgcccagagacccagctcggcccccgacctgatgtgtctcagtcctgaccggaagatggaagtggaggagctcagccccctggccctaggtcgcttctctctgacccctgcagagggggatactgaggaagatgatggatttgtggacatcctagagagtgacttaaaggatgatgatgcagttcccccaggcatggagagtctcattagtgccccactggtcaagaccttggaaaaggaagaggaaaaggacctcgtcatgtacagcaagtgccagcggctcttccgctctccgtccatgccctgcagcgtgatccggcccatcctcaagaggctggagcggccccaggacagggacacgcccgtgcagaataagcggaggcggagcgtgacccctcctgaggagcagcaggaggctgaggaacctaaagcccgcgtcctccgctcaaaatcactgtgtcacgatgagatcgagaacctcctggacagtgaccaccgagagctgattggagattactctaaggccttcctcctacagacagtagacggaaagcaccaagacctcaagtacatctcaccagaaacgatggtggccctattgacgggcaagttcagcaacatcgtggataagtttgtgattgtagactgcagatacccctatgaatatgaaggcgggcacatcaagactgcggtgaacttgcccctggaacgcgacgccgagagcttcctactgaagagccccatcgcgccctgtagcctggacaagagagtcatcctcattttccactgtgaattctcatctgagcgtgggccccgcatgtgccgtttcatcagggaacgagaccgtgctgtcaacgactaccccagcctctactaccctgagatgtatatcctgaaaggcggctacaaggagttcttccctcagcacccgaacttctgtgaaccccaggactaccggcccatgaaccacgaggccttcaaggatgagctaaagaccttccgcctcaagactcgcagctgggctggggagcggagccggcgggagctctgtgaccggctgcaggaccagtgaggggcctgcgccagtcctgctacctcccttgcctttcgaggcctgaagccagctgccctatgggcctgccgggctgagggcctgctggaggcctcaggtgctgtccatgggaaagatggtgtggtgtcctgcctgtctgccccagcccagattcccctgtgtcatcccatcattttccatatcctggtgccccccacccctggaagagcccagtctgttgagttagttaagttgggttaataccagcttaaaggcagtattttgtgtcctccaggagcttcttgtttccttgttagggttaacccttcatcttcctgtgtcctgaaacgctcctttgtgtgtgtgtcagctgaggctggggagagccgtggtccctgaggatgggtcagagctaaactccttcctggcctgagagtcagctctctgccctgtgtacttcccgggccagggctgcccctaatctctgtaggaaccgtggtatgtctgccatgttgcccctttctcttttcccctttcctgtcccaccatacgagcacctccagcctgaacagaagctcttactctttcctatttcagtgttacctgtgtgcttggtctgtttgactttacgcccatctcaggacacttccgtagactgtttaggttcccctgtcaaatatcagttacccactcggtcccagttttgttgccccagaaagggatgttattatccttgggggctcccagggcaagggttaaggcctgaatcatgagcctgctggaagcccagcccctactgctgtgaaccctggggcctgactgctcagaacttgctgctgtcttgttgcggatggatggaaggttggatggatgggtggatggccgtggatggccgtggatgcgcagtgccttgcatacccaaaccaggtgggagcgttttgttgagcatgacacctgcagcaggaatatatgtgtgcctatttgtgtggacaaaaatatttacacttagggtttggagctattcaagaggaaatgtcacagaagcagctaaaccaaggactgagcaccctctggattctgaatctcaagatgggggcagggctgtgcttgaaggccctgctgagtcatctgttagggccttggttcaataaagcactgagcaagttgagaaaaaaaaaaaaaaaaaaaaaaaaaaaaa

SEQ ID NO: 488 - DNA, 332 bp, Homo sapiens
  misc_feature (1)..(332): n=a,t,g or c
atttggtaagattttattaagactctaagttcaaacacccttcttgggaaaagctctacaggataaccacacatgctcaactacggggccagctgctgcagctgtgggaccccatcctgtggaagaggagagaggcactaaaaagatgaggtagccaggcctgtgcccacactacgagacctgcatcaccatggtgtgaggagcagcaacgtgggtcaactnggggctgggacgagatggaagagtaaaaggcctttcttcataggcctgcctattttatgaccaccagggtagacttttgtaattaaattaaggtccacatgacttttaga

SEQ ID NO: 489 - DNA, 215 bp, Homo sapiens
  misc_feature (1)..(215): n=a,t,g or c
ttgttttccttcctgaggtgaaaaatcaagctgaatgacaattagcactaatctggcactttataaattgtgatgtagcctcgctagtcaagctgtgaatgtatattgtttgcacttaanccttaactgtattaacgttcagcttactaaactgactgcctcaagtccaggcaagttacaatgccttgttgtgcctcaataaaaaagttacatgc

SEQ ID NO: 490 - DNA, 406 bp, Homo sapiens
  misc_feature (1)..(406): n=a,t,g or c
ttttttttttggagaaccaactcatctttattaaatgcatcgtgtgtgtgtgtgtgtgtgtgtgtgtgtgtgtgtgtgtatagcacatacttcaggcctgcggcaccaccccatagagatggtgaggaagtaacttctgcttctcattgaaactgtagatccatcggggacgaacgaatgccagggaggggttgnacatcagggtctcctcaaagntgggatcccattcctgtgctgagatcacaaactgaccccggtcactcatatagtcctcgagctccccattgaaggntgtaaagtatcggatgaatttccgcgcttcggcccccaggggaactccccccttaaagaaagaagtagcttggcccctgggaaaggaaatcttggggagcttcaagggacttgg

SEQ ID NO: 491 - DNA, 369 bp, Homo sapiens
  misc_feature (1)..(369): n=a,t,g or c
catttctctgaggaagccgagaaactttaattaggtgacggggttccgagcacttaagcagatggggtgcggtgaaggcccagggaggaggagggcagggaggtgcacgtcctctgtgccccacacactttcaaccactgcaacaaacaagcacccaagagaggctgtncggcagagccctgcacccacaggcctttgacagcacagtgaggggcctccgcacgtggcctcgggacgntcactcgacgcacacccggtgcatcacactggcacctaaagacaggccgtgcagctaaaaggagcacgtttggncaaggagagcaatcagctgtcccgcgtttctaaaggcagggaccgaggctttgggag

SEQ ID NO: 492 - DNA, 504 bp, Homo sapiens
  misc_feature (1)..(504): n=a,t,g or c
tnnannnaannaaagagntcagcctttattgtgggctcagaagggcacaagagcagaacatgcagaggactggcagcactctggcctggcatcacnanggagngcagcagcaggcacccatgcagctcagcagcctcacttgctgcacttcctgggggagcatttgcactccatggcattgagaacctcatggtacacaacagagccattggtgcagtgcagggccacctcatnggggctccgtccgtntcggagagcagcaggagcactggtcctgcacatcgttgatgtcaatgggagtacatggcttttctgggcacattttgccctgggcagttagtgggatatccaccttnttactttcagactttacagctttccccaccttttgacatacttgcagcctgggcagttnattttcgtttncacttcaggcttcctcacatgtnttcacagcaggtncctgggntttttcataatttttacctcccttnaggccagaca

SEQ ID NO: 493 - DNA, 273 bp, Homo sapiens
  misc_feature (1)..(273): n=a,t,g or c
gattccacaaggatttattggcaccggacctagcctggnnccgccccttcaaggaaagacactaacaaggaggagtgccggcaccgcaagagccctcccagaagcgcccagactgggggtcggggaggacgctgccattcgtggccaggaagggaagggcgattccggagaggngtgggcacggcgcagggaaaggccggntggtnggntnggcagggaggcggggtaccngccccttaagaaaggggaactcgcagacntagtagagacgcc

SEQ ID NO: 494 - DNA, 406 bp, Homo sapiens
  misc_feature (1)..(406): n=a,t,g or c
ttaaactacacacacagtttattaaatagtgaaatggttaacaaaggcacatcaataaccacttactatatatacagaaatatatataattaacatggatccaattatctcataactgccattttttccaacaaagagtcattcaattcttcatgtcatgaaggntaaaggcaaagtcttagtccccatcttatgctttcccaccctcttcttgaaaactacattgaacctctatggggttaatcagcgtcttctgtagccataaggtctctgcaagcatgctgactgcaggctcctcagattctttctccattccctcaaggtccagtttttaatggaacagggctgtttgctttagcagggtgctggttgctgggtatttcatccaggttnacactatggattt

SEQ ID NO: 495 - DNA, 421 bp, Homo sapiens
  misc_feature (1)..(421): n=a,t,g or c
tttcanttttatttttttaaatgtcccaggctgcctttcctgtcctcccatcctgcatcctgctttctgttccctggataccgtaggatggttttatttcagttcatgcacaaattagtctggacactgtggagtcataacaagagtgggatggaggttccagggccaatcagtttctttggagggaagcttgagaagtaggttagagcaatgcccacaaaagccactgcttctccttcccatccccagcaatgagctaagagccaacctcagccagagagagggtctttgatcacagagggtcantcagtggggatntgattagtggggtttnggggatgggagtcccagggttaaaccagaggggcaaagggntccctcttgaggtcctgggctttaaggggaattggggttttcaaat

SEQ ID NO: 496 - DNA, 413 bp, Homo sapiens
  misc_feature (1)..(413): n=a,t,g or c
ctgtttttanngatgtttttaattgacaataattgtagatattcatcggatacacagtgatgttttgatacatgggatgtctagtgatcaaatcagggtaatgagcatatcatcatctcaagcgtttattatgtgtgttgagaatgttcaatatcctccttcttgctgcttgaaactatataatatatggtcaggagtttgtttttccgtcgtcatttgtaaccgttaacattaggatctgtgagcgtgttttctagttattctgctttattttcctctgctcctgaccgccgttgggatagctgaggatttcctccggatgggcagaagctcggcctgccttatggcttccgtaggctgaacactgtggtcttcactgaggcngggatgaggtgattnggtacctgccaggg

SEQ ID NO: 497 - DNA, 429 bp, Homo sapiens
  misc_feature (1)..(429): n=a,t,g or c
tttnntnntcaaccttttaatcaacactatttggttaaacaagagagcatcttccagggcgatttaggagaaaattttcttaaaagtaattccctttagataaaatcaatattgctgtattagtcagaggttctgtgaaatcttggtaaggtgtactggatagcagaaacagcatactggttcccgcccatctggctgaccactctcggtgtatgtgttaggaacttttctgggtgctggatgcaataatgaatgggttcttctgcatctctcttcaaatgctaggaaacttccntatatcttggggagccaagnatggcccgaatagggaacnagctccggtatacagcctcccngcgtgcggnccgcaggaaggacaggtgatttctgccatttccctctgagggtacccnggttcnatctnactaa

SEQ ID NO: 498 - DNA, 952 bp, Homo sapiens
tgaactctggatgctgttagcctgagactcaggaagacaacttctgcagggtcactccctggcttctggaggaaagagaaggagggcagtgctccagtggtacagaagtgagacataatggaatcaggcttcacctccaaggacacctatctaagccattttaaccctcgggattacctagaaaaatattacaagtttggttctaggcactctgcagaaagccagattcttaagcaccttctgaaaaatcttttcaagatattctgcctagacggtgtgaagggagacctgctgattgacatcggctctggccccactatctatcagctcctctctgcttgtgaatcctttaaggagatcgtcgtcactgactactcagaccagaacctgcaggagctggagaagtggctgaagaaagagccagaggcctttgactggtccccagtggtgacctatgtgtgtgatcttgaagggaacagagtcaagggtccagagaaggaggagaagttgagacaggcggtcaagcaggtgctgaagtgtgatgtgactcagagccagccactgggggccgtccccttacccccggctgactgcgtgctcagcacactgtgtctggatgccgcctgcccagacctccccacctactgcagggcgctcaggaacctcggcagcctactgaagccagggggcttcctggtgatcatggatgcgctcaagagcagctactacatgattggtgagcagaagttctccagcctccccctgggccgggaggcagtagaggctgctgtgaaagaggctggctacacaatcgaatggtttgaggtgatctcgcaaagttattcttccaccatggccaacaacgaaggacttttctccctggtggcgaggaagctgagcagacccctgtgatgcctgtgacctcaattaaagcaattcctttgacctgtca

SEQ ID NO: 499 - DNA, 2814 bp, Homo sapiens
aagaacgcccccaaaatctgtttctaattttacagaaatcttttgaaacttggcacggtattcaaaagtccgtggaaagaaaaaaaccttgtcctggcttcagcttccaactacaaagacagacttggtccttttcaacggttttcacagatccagtgacccacgctctgaagacagaattagctaactttcaaaaacatctggaaaaatgaagacttgggtaaaaatcgtatttggagttgccacctctgctgtgcttgccttattggtgatgtgcattgtcttacgcccttcaagagttcataactctgaagaaaatacaatgagagcactcacactgaaggatattttaaatggaacattttcttataaaacattttttccaaactggatttcaggacaagaatatcttcatcaatctgcagataacaatatagtactttataatattgaaacaggacaatcatataccattttgagtaatagaaccatgaaaagtgtgaatgcttcaaattacggcttatcacctgatcggcaatttgtatatctagaaagtgattattcaaagctttggagatactcttacacagcaacatattacatctatgaccttagcaatggagaatttgtaagaggaaatgagcttcctcgtccaattcagtatttatgctggtcgcctgttgggagtaaattagcatatgtctatcaaaacaatatctatttgaaacaaagaccaggagatccaccttttcaaataacatttaatggaagagaaaataaaatatttaatggaatcccagactgggtttatgaagaggaaatgcttcctacaaaatatgctctctggtggtctcctaatggaaaatttttggcatatgcggaatttaatgataaggatataccagttattgcctattcctattatggcgatgaacaatatcctagaacaataaatattccatacccaaaggctggagctaagaatcccgttgttcggatatttattatcgataccacttaccctgcgtatgtaggtccccaggaagtgcctgttccagcaatgatagcctcaagtgattattatttcagttggctcacgtgggttactgatgaacgagtatgtttgcagtggctaaaaagagtccagaatgtttcggtcctgtctatatgtgacttcagggaagactggcagacatgggattgtccaaagacccaggagcatatagaagaaagcagaactggatgggctggtggattctttgtttcaagaccagttttcagctatgatgccatttcgtactacaaaatatttagtgacaaggatggctacaaacatattcactatatcaaagacactgtggaaaatgctattcaaattacaagtggcaagtgggaggccataaatatattcagagtaacacaggattcactgttttattctagcaatgaatttgaagaataccctggaagaagaaacatctacagaattagcattggaagctatcctccaagcaagaagtgtgttacttgccatctaaggaaagaaaggtgccaatattacacagcaagtttcagcgactacgccaagtactatgcacttgtctgctacggcccaggcatccccatttccacccttcatgatggacgcactgatcaagaaattaaaatcctggaagaaaacaaggaattggaaaatgctttgaaaaatatccagctgcctaaagaggaaattaagaaacttgaagtagatgaaattactttatggtacaagatgattcttcctcctcaatttgacagatcaaagaagtatcccttgctaattcaagtgtatggtggtccctgcagtcagagtgtaaggtctgtatttgctgttaattggatatcttatcttgcaagtaaggaagggatggtcattgccttggtggatggtcgaggaacagctttccaaggtgacaaactcctctatgcagtgtatcgaaagctgggtgtttatgaagttgaagaccagattacagctgtcagaaaattcatagaaatgggtttcattgatgaaaaaagaatagccatatggggctggtcctatggaggatacgtttcatcactggcccttgcatctggaactggtcttttcaaatgtggtatagcagtggctccagtctccagctgggaatattacgcgtctgtctacacagagagattcatgggtctcccaacaaaggatgataatcttgagcactataagaattcaactgtgatggcaagagcagaatatttcagaaatgtagactatcttctcatccacggaacagcagatgataatgtgcactttcaaaactcagcacagattgctaaagctctggttaatgcacaagtggatttccaggcaatgtggtactctgaccagaaccacggcttatccggcctgtccacgaaccacttatacacccacatgacccacttcctaaagcagtgtttctctttgtcagactaaaaacgatgcagatgcaagcctgtatcagaatctgaaaaccttatataaacccctcagacagtttgcttattttattttttatgttgtaaaatgctagtataaacaaacaaattaatgttgttctaaaggctgttaaaaaaaagatgaggactcagaagttcaagctaaatattgtttacattttctggtactctgtgaaagaagagaaaagggagtcatgcattttgctttggacacagtgttttatcacctgttcatttgaagaaaaataataaagtcagaagttcaaaaaaaaaaaaaaaaaaaaaaaaagcggccgctcg

SEQ ID NO: 500 - DNA, 1042 bp, Homo sapiens
ggcttgggaaggggaaggaaacttctctgaaatctgaacacctgctctcccggcaaggaaacttcgaaggctgaccgaccaagaccatcactatgaccgatggagactatgattatctgatcaaactcctggccctcggggattcaggggtggggaagacaacatttctttatagatacacagataataaattcaatcccaaattcatcactacagtaggaatagactttcgggaaaaacgtgtggtttataatgcacaaggaccgaatggatcttcagggaaagcatttaaagtgcatcttcagctttgggacactgcgggacaagagcggttccggagtctcaccactgcatttttcagagacgccatgggcttcttattaatgtttgacctcaccagtcaacagagcttcttaaatgtcagaaactggatgagccaactgcaagcaaatgcttattgtgaaaatccagatatagtattaattggcaacaaggcagacctaccagatcagagggaagtcaatgaacggcaagctcgggaactggctgacaaatatggcataccatattttgaaacaagtgcagcaactggacagaatgtggagaaagctgtagaaacccttttggacttaatcatgaagcgaatggaacagtgtgtggagaagacacaaatccctgatactgtcaatggtggaaattctggaaacttggatggggaaaagccaccagagaagaaatgtatctgctagactctacatagaaactgaacatcaagaaccccaccaaaatattacttttaaaacaatgacaaaccacacaattgttgttgagtaaaccacgcacaatggcatgtctttctttttctgccagaaaatctattttaagaaaccagaatagtcaacagtgttcaaaagaattgactagttatccctgaggccctttcaaacatgatcaaagatttcccaatgtgatctcatcatcatggatactcaatttgttttttcttatagagaaaatgagtatatagacatatacagagaat

SEQ ID NO: 501 - DNA, 1506 bp, Homo sapiens
aggcggacaaagcccgattgttcctgggccctttccccatcgcgcctgggcctgctccccagcccggggcaggggcgggggccagtgtggtgacacacgctgtagctgtctccccggctggctggctcgctctctcctggggacacagaggtcggcaggcagcacacagagggacctacgggcagctgttccttcccccgactcaagaatccccggaggcccggaggcctgcagcaggagcggccatgaagaagctgatggtggtgctgagtctgattgctgcagcctgggcagaggagcagaataagttggtgcatggcggaccctgcgacaagacatctcacccctaccaagctgccctctacacctcgggccacttgctctgtggtggggtccttatccatccactgtgggtcctcacagctgcccactgcaaaaaaccgaatcttcaggtcttcctggggaagcataaccttcggcaaagggagagttcccaggagcagagttctgttgtccgggctgtgatccaccctgactatgatgccgccagccatgaccaggacatcatgctgttgcgcctggcacgcccagccaaactctctgaactcatccagccccttcccctggagagggactgctcagccaacaccaccagctgccacatcctgggctggggcaagacagcagatggtgatttccctgacaccatccagtgtgcatacatccacctggtgtcccgtgaggagtgtgagcatgcctaccctggccagatcacccagaacatgttgtgtgctggggatgagaagtacgggaaggattcctgccagggtgattctgggggtccgctggtatgtggagaccacctccgaggccttgtgtcatggggtaacatcccctgtggatcaaaggagaagccaggagtctacaccaacgtctgcagatacacgaactggatccaaaaaaccattcaggccaagtgaccctgacatgtgacatctacctcccgacctaccaccccactggctggttccagaacgtctctcacctagaccttgcctcccctcctctcctgcccagctctgaccctgatgcttaataaacgcagcgacgtgagggtcctgattctccctggttttaccccagctccatccttgcatcactggggaggacgtgatgagtgaggacttgggtcctcggtcttacccccaccactaagagaatacaggaaaatcccttctaggcatctcctctccccaacccttccacacgtttgatttcttcctgcagaggcccagccacgtgtctggaatcccagctccgctgcttactgtcggtgtccccttgggatgtacctttcttcactgcagatttctcacctgtaagatgaagataaggatgatacagtctccatcaggcagtggctgttggaaagatttaagatttcacacctatgacatacatgggatagcacctgggccgccatgcactcaataaagaatgtatttt

SEQ ID NO: 502 - DNA, 1670 bp, Homo sapiens
ggcgggagggccgcagctccggcgccgcgccgtcccgccagaacgatcgccgcggccggaagagttggcgctcggggcggactccttggaactggcttagcgcacccatcccaccttcccgcaccctgggaccggtccaacgagcgctcctccaagcggagccttggagggcacggccggcaccattacctccaacgagtggagctctcccacctcccctgaggggagcaccgcctctgggggcagtcaggcactggacaagcccatcgacaatgacggagagggcgtgtggagcccggatattgagcagagtttccaggaggccctcgccatctacccgccctgtggcaggcgcaaaatcatcctgtcggacgagggcaagatgtatggtcgaaacgagctgattgcccgctacatcaagctccggacagggaagacccgcaccaggaagcaggtctccagccacatccaggtgctggctcgtcgcaaagctcgcgagatccaggccaagctaaaggaccaggcagctaaggacaaggccctgcagagcatggctgccatgtcgtctgcacagatcatctccgccacggccttccacagtagcatgcgcctcgcccggggccccggccgcccagcagtctcagggttttggcaaggagctttgccaggccaagccgaaacgtcccatgatgtgaagcctttctctcagcaaacctatgctgtccagcctccgctgcctctgccagggtttgagtctcctgcagggcccgccccatcgccctctgcgcccccggcacccccatggcagggccgcaggcgtggcagctccaagctctggatgttggagttctctgccttcctggagcagcagcaggacccggacacgtacaacaagcacctgttcgtgcacattggccagtccagcccaagctacctgcgcccctacctcgaagccgtggacatccgccaaatctatgacaaattcccggagaaaaagggtggactcaaggatctcttcgaacggggaccctccaatgccttttttcttgtgaagttctgggcagacctcaacaccaacatcgaggatgaaggcagctccttctatggggtctccagccagtatgagagccccgagaacatgatcatcacctgctccacgaaggtctgctctttcggcaagcaggtggtggagaaagttgagacagagtatgctcgctatgagaatggacactactcttaccgcatccaccggtccccgctctgtgagtacatgatcaacttcatccacaagctcaagcacctccctgagaagtacatgatgaacagcgtgctggagaacttcaccatcctgcaggtggtcaccaacagagacacacaggagaccttgctgtgcattgcctatgtctttgaggtgtcagccagtgagcacggggctcagcaccacatctacaggctggtgaaagaatgagagactcggggagcagggaggggggaagagacgtgtgtgcaggaaacggggacgtggggaggggacctgcaggggccagccccctgaagtgccaagagagctgagaggagcagttgtgactctacccaggaacaaactgtgcctgaacctgaggtgcccaaccccaaataaacccaagatgctgtgtattttcagaggaaaa

SEQ ID NO: 503 - DNA, 2066 bp, Homo sapiens
tcgcgctggagggcagccgcttagcgtgcgctcttgtccccgcaggtcgcagccaggcggcgggcgcgcccagccccggcccctggagcgcccgccgcggtccccacctccatggacgccttcaaggggggcatgagcctggagcggctgccggaggggttccggccgccgccgccgccaccccatgacatggggcccgccttccacctggcccggcccgccgacccccgcgagccgctcgagaactccgccagcgagtcgtctgacacggagctgccagagaaggagcgcggcggggaacccaaggggcccgaggacagtggtgcgggaggcacgggctgcggcggcgcagacgacccagccaagaagaagaagcagcggcggcaacgtacgcacttcacaagccagcagttgcaagagctagaggccacgttccagaggaaccgctaccccgacatgagcatgagggaggagatcgccgtgtggaccaacctcaccgagccgcgcgtgcgggtctggttcaagaacaggcgagccaagtggcgtaagcgcgagcgtaaccagcagctggacctgtgcaagggtggctacgtgccgcagttcagcggcctagtgcagccctacgaggacgtgtacgccgccggctactcctacaacaactgggccgccaagagcctggcgccagcgccgctctccaccaagagcttcaccttcttcaactccatgagcccgctgtcgtcgcagtccatgttctcagcacccagctccatctcctccatgaccatgccgtccagcatgggcccaggcgccgtgcctggcatgcccaactcgggcctcaacaacatcaacaacctcaccggctcctcgctcaactcggccatgtcgccgggcgcttgcccgtacggcactcccgcctcgccctacagcgtctaccgggacacgtgcaactcgagcctagccagcctgcggctcaagtccaaacagcactcgtcgtttggctacggcggcctgcagggcccggcctcgggcctcaacgcgtgccagtacaacagctgaccgccccgccgcaccacgcgggccggcggccggagcggggaagggcgcgggcgcggaggacgcacgcggggccccggctcgcaagccccagctcaccgcgccgcggacctcacacctgcgcagccccctcctcccacttcccactccgggttggttttgtgtttgcttttccggaccccactctgccctccaaaaagacaaaaaaaaaaaaaaaaaaaaaagcaaaaagacgtcggagaaaagtgccgcgaaaaaatggatgagttgcaatttctctcgggatggcgcgggtggtgtgtgtgtgttcccacgggccccggaggcccactccgcggagggcacgcggcgcggtaggcaagcgccgaggcccagcggccgggggaggacaacctcgtatcccgcgcccccgccgcgctggatccggactgagcggccgggcctgcggactggatgtgcggggcctggacttgcctaggatttcccgaccccgtacaaaccaagttgccctctccgagctaggcccggccgagagcgccttaactcgagtcggatccgtgttggggcgggcgttgggtttggggggacggtgcccccagcccaggatcgggcactcagtggagccgcacacggcccggcgcgcctggtagagcctcgctggccccgcgccccggagccctatattaaggccacggagcgacagcgggcagtgcgggcctggcgggaggtgggggaggtccatctcagaacaccccagccttgagcttagctgcaggcccaggccctctgctctgctcccgggctaggaggtggccctctgtctgggcgaacagccccctcctcaccgcccgccgtgcaagagtcgagccggcagagcaaggggcgcggccccagggccctgcgcccactttgcacacccgctctccggcccgcgcccctgtttacagcgtccctgtgtatgttggactgactgtaataaatctgtctatatcgactaaaaaaaaaaaaaaaaa

SEQ ID NO: 504 - DNA, 450 bp, Homo sapiens
  misc_feature (1)..(450): n=a,t,g or c
ttttgaaaaaataaagaactatcaggattgaaaacagctcttttgaggaatgtcaattagttattaagttgaaagtaattaatgattttatgtttggttactctactagatttgataaaaattgtgcctttagccttctatatacatcagtggaaacttaagatgcagtaattatgttccagattgaccatgaataaaatattttttaatctaaatgtagagaagttgggattaaaagcagtctcggaaacacagagccaggaatatagccttttggcatggtgccatggctcacatctgtaatcccagcacttttggaggctgaggcgggtggattgcttgaggccaggagttccgagaccaagcctggcccaaccgtggtgaaacactggtcccctactaaaataccaaaaaaataagggctggggcgccgttgctcacgcctgtaan

SEQ ID NO: 505 - DNA, 560 bp, Homo sapiens
  misc_feature (1)..(560): n=a,t,g or c
nnnnnnnnnnngnttnnnnnnnnnnccttnangggntnntactcncatntcattgtccagtaccgcttcnggccnncagaatacncattttcttcactcacatacncnacccctcacatcagcattggtgcactagactctgtaaaaatttttcagtcacacttttggtttttaaacttgagtcaatataaaccttgttcaaaatgttatgaaaaaatgtacatgtttatacaaggcaggttgtggcaggacactaggggttctccccacttgggtggccccaggaggagaggctggagtctcagtttgtatctcttatctcctcccaccacccttcccacccagtcccccaggaaccagcagcgccctgccccctagtgagtgtactcacacccctattccctggggaagcagntagttgacctnnggcatttnccccacanccctggnggannggagncaggntcagncaggncctctcccnngnaattgtncgccccnctnggccaanncaangggnggntnntctntncaggtngggnccangggggggncaantt

SEQ ID NO: 506 - DNA, 490 bp, Homo sapiens
  misc_feature (1)..(490): n=a,t,g or c
tnnnncagccgggaggataccaggatagacgctatgactgaggctgatgtgaatccaaaggcctatccccttgccgatgcccacctcaccaagaagctactggacctcgttcagcagtcatgtaactataagcagcttcggaaaggagccaatgaggccaccaaaaccctcaacaggggcatctctgagttcatcgtgatggntgcagacgccgagccactggagatcattctgcacctgccgntggtgtgtgaagacaagaatgtgccctacgtgttttngggctccaagcaggccctggggagagnctgtngggtctccaggnctgtcatcggctgttctntcaacatcaaagaagggtcgcaggttgaaaacaggagatccaatccattcaggaggccattgaaaggntcttaggcttaacctgtggggctctncangttntccctnccagttccccccagagnngattcaanttgggnttaccagg

SEQ ID NO: 507 - DNA, 560 bp, Homo sapiens
  misc_feature (1)..(560): n=a,t,g or c
nnnnnnnnnctnttaacgatcggtaatgcctttattaacgagaatgaaacgttcattcctccttccactccttctcgttggttttctggacacagctcacctgatcctgctagaaacgttgtcagtctgcttgtggcttccctccttgattgactcacgctgtgtgatgtctggagaagtatctatccacttcatgtgaatgagcactccaatatcagccaacatcaatcattcttaccatgtcacttcccatcatggaaccactcatggttgctggtggaacgccaggattagnttcataacctatgccaccaccacctcctagaggtggaaatttctggcctcctgaaccatagggatctcccatgttcatngntcctccgccgcccattcgggtgtaactttcctctcttggggggctcattnggntcttccatctcacgggggacgaatcatcatctnttccctcttcttctacggngggncccncctcttggctcaaatnggatttcttnaaggtttctgnattcttggatnggggaggtcttcccgangggatt

SEQ ID NO: 508 - DNA, 244 bp, Homo sapiens
ttttttttttttacatttgcgttggcaatgtttaatgtttcacttttgcagaactgaaatttgtattcaaaggcacagaaggaaggaaaggcagttatcagagcatgaagtcacagataaaggatgctgaataaaagcataggactgctcctctttagccttaggaaaataaataatgcagtattaaactagatttttatttttattatatttccatgtgaagacatcacccaaatgtcagcgg

SEQ ID NO: 509 - DNA, 400 bp, Homo sapiens
gtttttaaacactgtatttttaatttttcaaaaatacgacagtaaaggtcgtactatgcacagggggactgatgcctttcatgtgtcccccttgcatttctacctcaaaacaagactaaggcataaattactccactgggcgccaggcacgccccttgtccttggggcattatcactggtcataccacttgtcctgggggccggcagatgagatatttgccaccaaggctgcacaggctccgggagtccttgcacgtgctttattcagtgcattccagaggggacccctcaacagcgctggccaagcccttccctgtgcactggcgggcatgagggaaggatgggaggcagtgtgtgtgtgtgtgtgtgtgtgtgtgtgtgtgtgtgtgtgtgtgtgtgt

SEQ ID NO: 510 - DNA, 276 bp, Homo sapiens
attggtttaatcttttatttggaacaaaggaaaaaaggactgacaccagtttagcctttgagtgtgcagagctctgccctccctcccacccctcagccccaaatccaagatttcatagccctaacacccacccaagcagcttccctcacacatgccctttgttttcttcctctcttctatggttccttagggaaaggagccttctttagggatgaaaagctaactacagcccagtctggcctccagcagcccagggtcagctcagcctccactgga

SEQ ID NO: 511 - DNA, 327 bp, Homo sapiens
ctggaaggaacggatgggcctctagtgacagatccagagacacacaagagcaccaaagcagctcatcccactgatgacaccacgacgctctctgagagaccatccccaagcacagacgtccagacagacccccagaccctcaagccatctggttttcatgaggatgaccccttcttctatgatgaacacaccctccggaaacgggggctgttggtcgcagctgtgctgttcatcacaggcatcatcatcctcaccagtggcaagtgcaggcagctgtcccggttatgccggaatcattgcaggtgagtccatcagaaacagggagct

SEQ ID NO: 512 - DNA, 406 bp, Homo sapiens
  misc_feature (1)..(406): n=a,t,g or c
tnncagatttngcagcacttttaatacacaaagcaaaaggtaataggctggatgggtnaccaaccttcattcacatanagagnccaagtatagatacagactaattgggaaataagttagagtttgnagggccttagggtcgagagcagaaacactctccttttggcagccatggaagcnnnnanttccttttctggtntcagtgcatgtacgccttcggtcgctccatagcctggtgtgcctgcagcacggccactgcctcgtctatcttggcatggacgggattctggagactccagcatgagcaacagctccgagttgtcaatctccagcagcatgcccgtggatcttgccagccagctggggtgtggacatcatggataaaggggggtagagacgctnccca

SEQ ID NO: 513 - DNA, 7258 bp, Homo sapiens
ttcaataggaagcaccaacagtttatgccctaggactttgttcccacaatcctgtaacatcatatcacgacacctaacccaatccttatcaagccctgtcaaaaacggactttaaaccaagctgcaaattttcagtaatctggccttgcctttccccctctgatagcaccatcaaacaaacccccttactgccgaaagcaataagcccggctttgttccatccactggttgtgttggtgatatctggggactgccactgaacagacgcacagagggagcccctacaggcaggggtttttctgtctgtgcttcttgggagagtatgtctcgtacatttgtcgcgtgatgaagacttcacagctccatccagcgaccagactcacagctccatccagctgcggcaagggggtctgaggcagtcttaggcaagttggggcccagcgggagaagttgcagaagaactgattagaggacccaggaggcttcagagctgggctgaggtagagagtctcctgtgcgccttctctcctctctgcaattcggggactccttgcactggggcaggccccggcaggtgcatgggaggaagcacggagaatttacaagcctctcgattcctcagtccagacgctgttgggtcccctccgctggagatcgcgcttcccccaaatctttgtgagcgttgcggaagcacgcggggtccgggtcgctgagcgctgcaagacaggggagggagccgggcgggagagggaggggcggcgccggggcgggccctgatatagagcaggcgccgcgggtcgcagcacagtcggagaccgcagcccggagcccgggccagggtccacctgtccccgcagcgccggctcgcgccctcctgccgcagccaccggtgagtgccgcggtcctgagatccccgggccggatgcgcggcggccccagctcccgagcgtctgcctgccccgccctgggctgcccgggctccctgggctccccggcggctgcacggagtcaaggcgccccgtcccgggcgtcccccgcgggtgccgatccaggctgcccggagtccggagcccatagaggagagagacagctggggagcctggtcaccgcgggcatctcccctgcgctgcagtcgcccgcctggcctgccttcccgttcctccgcctcttgccctgacttctccttcctttgcagagccgccgtctagcgccccgacctcgccaccatgagagccctgctggcgcgcctgcttctctgcgtcctggtcgtgagcgactccaaagtgagtgcgctcttgctttgactgatgctgcccaaggacctctgatcagcaccaggggagaggaggggctgctcagggagctggggtctccggattccatccacagcagggccagactctccccaggaaatgggacagggtggcagcggaggcttgagaaccacgggggttggcactggctggcaagggaggaagagggccaccgggactgccccagcctgcgggcatctggtagatgaagcttaatccatttctcctggctggaaaccatggtcttccatttgagaactagatacgaacagggtgaggcgagagggagagggaagagtgggttttgggattggggccagtttaccctcaccctggatccctggagcatgggacctttgatgaagcctcctcccgaatctcttccagggcagcaatgaacttcatcaagttccatgtgagtatccacccctacaacagttggctgcacagacaagttgggaaggcttcaggggacactcccctccctgccctctgctgcagcgtgcgccaccccttaccacttccactccccctcgcttaccccacctttgttctctccagcgaactgtgactgtctaaatggaggaacatgtgtgtccaacaagtacttctccaacattcactggtgcaactgcccaaagaaattcggagggcagcactgtgaaataggtatggggatctccactgcaactgggagagaaatttggggacagggagggatgggtgggaggcaagagcaggcaggagttaggagctggaggtagggtgggtgacatcttcatccctatgtgacaagcataaacacacacacacgctcacgaaacagtggccacacaaatgtgaggtggggttggaaggagaccctgtccagtcttctggcaggtctgaaacgacatctttaaaatgtccgttggcagccgggcatggtggctcacgcttgtaatcccagcattttgagaggtcaagtttgagtggatcatttaggtcaggagttcaagaccagcctggacaacatggtgtaaccctgcctctactaaaaatgcaaaaatcagcctggcatggtggtggatgcctgtagtcccagctacttgggaggctgaggcaggagaattgcttgaacatgggaggccagatctcagtgagctgagatcacaccactgcactccaactgggcgacagagcaagactccatctcaaaaaaaaaaaaaaataaaagttagttggaatgttcttctctttctcatattctctcatcctcctgtccccttgtagataagtcaaaaacctgctatgaggggaatggtcacttttaccgaggaaaggccagcactgacaccatgggccggccctgcctgccctggaactctgccactgtccttcagcaaacgtaccatgcccacagatctgatgctcttcagctgggcctggggaaacataattactgcaggtgaggtgggggcaacaaggaccaaaagccctccctacagcttcccagaaaccttgttaccatccccttctcccagagggctggccatagcacaagagaagtgcggcctctggttgagtcttccctgaggggaggaggcagggaaggccctctgggttggaatgacatcccctatctttctgtgttgtgccaggaacccagacaaccggaggcgaccctggtgctatgtgcaggtgggcctaaagccgcttgtccaagagtgcatggtgcatgactgcgcagatggtgagcatcactgacctgctgatgacaggtgggtggaaggggacaaacttacatgtccccttattccatcacaggaggactgaggaggtggggggtgcccgagagggatgctttctcctacctgcctccctaagacatccctctgtttgtcctccaggaaaaaagccctcctctcctccagaagaattaaaatttcagtgtggccaaaagactctgaggccccgctttaagattattgggggagaattcaccaccatcgagaaccagccctggtttgcggccatctacaggaggcaccgggggggctctgtcacctacgtgtgtggaggcagcctcatgagcccttgctgggtgatcagcgccacacactgcttcatgtacggccctgggtttctcctcttcgactcttctgccccaccccaagcacatccctttctccttcccagcaaagtgttccgcctcatttctccctcatctgcccctgtccatgcgcccatggccttggggacaagtcgtgctttgaggcctctagggagggaaggaagaagtggcatgatttcatgggactaagctgtttgatgggtatcttcttccacagtgattacccaaagaaggaggactacatcgtctacctgggtcgctcaaggcttaactccaacacgcaaggggagatgaagtttgaggtggaaaacctcatcctacacaaggactacagcgctgacacgcttgctcaccacaacgacattggtgagggggaacgcccgcgactactgtggccataatggcttggggagagtgggacccagggagagactggagctgagttgaagctgccggtggggcaggggtggggcgagggaccttgaagcctcgatatacatgacaaaggatggcagggaagagttccatgaagtctgaggggcctggtgctcctctggagagaccctgaatttccccaacaagtagccctcttgcgagtggaaacagccctgtgggtatatggcttgggctgggaaggccctgtttatatgaattagaaaaagacacaccttcctttgtgggatgcagcctctgtctgtgctaggatatagaacttggagaatggagccttgggatggattccagcctaactacctcagggggatcctctagagtgcagctgggagtttttgcagaaacgacctgtacagctgtatgcagtggctctggccatccaagcctttttcaacacctggaacaaagcccttggggcatggggcaggggaggtttccaggtgataagcgaccagcagacctccctggatgactgacctagggataggcatagctacttcctcggcacttggaggggacagatggggaccgcctaaccagtagtgatctttctcctctgaccctctgtcctcccccagccttgctgaagatccgttccaaggagggcaggtgtgcgcagccatcccggactatacagaccatctgcctgccctcgatgtataacgatccccagtttggcacaagctgtgagatcactggctttggaaaagagaattctagtaagtgacaattgcgactgacttagaaggtcctgaggagtgttttgacctgaaaatgagcccagtgtgatcaagggaagactgcagagttagaggtgggagcactgaggcggtggcagatgggtccagggatggatgaagagtgttgtttagggagcgatgggctgcaaaggtaaatagatggtaggggctataggtggaggtaaatggctcagatttgcatggagagagaataatgggcctctccctgggtgatgatactttatggtgtcccctctctggcgagacgtcccacgtggaggcagataaatcttgatgcaaacgcctccctgttttctccacctagccgactatctctatccggagcagctgaaaatgactgttgtgaagctgatttcccaccgggagtgtcagcagccccactactacggctctgaagtcaccaccaaaatgctgtgtgctgctgacccacagtggaaaacagattcctgccaggtgagtgttccaagcatctctctccacctcttccatatctccccagagctcctgggcttgttccagccagcttaagggtgtctctctctagccaaagccctaagtagccagaatcaggagctcaggtctttgagggtttaaaccagtccttatgtgtttgccagacattaccaaaaaaatcccagctctgcgctagtcacttcagactgggggcacgagatcctagaaagaggaaacagtaaaagacaatgtaactcagtgcccagggtgtgttgtgaactataaatgatcaggtgttcaggagagggaggtgagtgccaacctgagggtcagggaggggaggctttaaaggaaatgtgacttgataggcatttgaagaggcagagggaagaaaggaaggtgtttcagttgaaagatacaaaactgagaaggaggctggcatattccgggtggggaggagaactagggtctgggagtgtggatggaatagtggcagatgacagggcttttaaagccaagcaggggattttccaacttcgatgtggtagaaatggggctgcgtcaggcacagtggctcatgcctgtaatcccagcattgggctaggccgtagtcgatggatcattgaggccagagttgagaccggcctggaccaacatggtgaaaccctgtgtctactaaaaaatgcaaaaaaaaaaattagccaggtgtggtggtgcctgcctgtaatcccagctaatcaggaggctgagacatggaatcgcttgagcacaggaggcaagtttgacgtgagctgagatcacgtcattgcacgccagcctgggcgacagagcgagattctgtcctcccgccgaaaaaagaaagaaaatgggaagtcgctaaggactttgactgggaaactcttccctctctctggtatggttgggtgatgggatcagaaatcccctcctcacttctctagggctcatcttttgtatctttggcgtcacagggagactcagggggacccctcgtctgttccctccaaggccgcatgactttgactggaattgtgagctggggccgtggatgtgccctgaaggacaagccaggcgtctacacgagagtctcacacttcttaccctggatccgcagtcacaccaaggaagagaatggcctggccctctgagggtccccagggaggaaacgggcaccacccgctttcttgctggttgtcatttttgcagtagagtcatctccatcagctgtaagaagagactgggaagataggctctgcacagatggatttgcctgtgccacccaccagggtgaacgacaatagctttaccctcaggcataggcctgggtgctggctgcccagacccctctggccaggatggaggggtggtcctgactcaacatgttactgaccagcaacttgtctttttctggactgaagcctgcaggagttaaaaagggcagggcatctcctgtgcatgggtgaagggagagccagctcccccgacggtgggcatttgtgaggcccatggttgagaaatgaataatttcccaattaggaagtgtaacagctgaggtctcttgagggagcttagccaatgtgggagcagcggtttggggagcagagacactaacgacttcagggcagggctctgatattccatgaatgtatcaggaaatatatatgtgtgtgtatgtttgcacacttgtgtgtgggctgtgagtgtaagtgtgagtaagagctggtgtctgattgttaagtctaaatatttccttaaactgtgtggactgtgatgccacacagagtggtctttctggagaggttataggtcactcctggggcctcttgggtcccccacgtgacagtgcctgggaatgtacttattctgcagcatgacctgtgaccagcactgtctcagtttcactttcacatagatgtccctttcttggccagttatcccttccttttagcctagttcatccaatcctcactgggtggggtgaggaccactccttacactgaatatttatatttcactatttttatttatatttttgtaattttaaataaaagtgatcaataaaatgtgatttttctgatgacaaatctccctggtgcttgtatgggaaggagttggagtacataaaaaggagaaaataacaaaggtgg

SEQ ID NO: 514 - DNA, 988 bp, Homo sapiens
ctcgcacagcttcccgacgcgtctgctgagccccatggcccacgccacgctctccgccgcccccagcaatccccggctcctgcgggtggcgctgctgctcctgctcctggtggccgccagccggcgcgcagcaggagcgtccgtggtcactgaactgcgctgccagtgcttgcagacactgcagggaattcacctcaagaacatccaaagtgtgaatgtaaggtcccccggaccccactgcgcccaaaccgaagtcatagccacactcaagaatgggaagaaagcttgtctcaaccccgcatcccccatggttcagaaaatcatcgaaaagatactgaacaaggggagcaccaactgacaggagagaagtaagaagcttatcagcgtatcattgacacttcctgcagggtggtccctgcccttaccagagctgaaaatgaaaaagagaacagcagctttctagggacagctggaaaggacttaatgtgtttgactatttcttacgagggttctacttatttatgtatttatttttgaaagcttgtattttaatattttacatgctgttatttaaagatgtgagtgtgtttcatcaaacatagctcagtcctgattatttaattggaatatgatgggttttaaatgtgtcattaaactaatatttagtgggagaccataatgtgtcagccaccttgataaatgacagggtggggaactggagggtggggggattgaaatgcaagcaattagtggatcactgttagggtaagggaatgtatgtacacatctattttttatactttttttttaaaaaaagaatgtcagttgttatttattcaaattatctcacattatgtgttcaacatttttatgctgaagtttcccttagacattttatgtcttgcttgtagggcataatgccttgtttaatgtccattctgcagcgtttctctttcccttggaaaagagaatttatcattactgttac

SEQ ID NO: 515 - DNA, 1895 bp, Homo sapiens
gctttccagccccaaccatgcataaaaggggttcgcggatctcggagagccacagagcccgggccgcaggcacctcctcgccagctcttccgctcctctcacagccgccagacccgcctgctgagccccatggcccgcgctgctctctccgccgcccccagcaatccccggctcctgcgagtggcactgctgctcctgctcctggtagccgctggccggcgcgcagcaggtgggtaccggcgccctggggtccccgggccggacgcggctggggtaggcacccagcgccgacagcctcgctcagtcagtgagtctcttcttccctaggagcgtccgtggccactgaactgcgctgccagtgcttgcagaccctgcagggaattcaccccaagaacatccaaagtgtgaacgtgaagtcccccggaccccactgcgcccaaaccgaagtcatgtaagtcccgccccgcgctgcctctgccaccgccggggtcccagaccctcctgctgccccaaccctgtccccagcccgacctcctgcctcacgagattcccttccctctgcagagccacactcaagaatgggcggaaagcttgcctcaatcctgcatcccccatagttaagaaaatcatcgaaaagatgctgaacaggtgagttatggtttccatgtacacaggcgactggagccgttggtcagaaatactggcatgtgccccctaaaaataaaatcaggaaaacccaggggttagttgaaggactagaaattgggattattgttttcacaattaaggtttcctttacgataattactgctctggtgccagaggatattcccaatgcctggcgtccccaccctggttcttccttcgttccaatgaatgtaggtaaaactgccttcatttgaggcccagtaggacaaacagcaacaggttctggctgtttttaatccaatagtacagtggagaccaccgccccaccccacccccattcctaaaagagcatcccaagcttagaggtccctgccacacagcacagctgtcataggcagtagccacttggttgccaggctggggaaactgcattcggagaactctagaggctggaggagcagggcaggagaagagtgttgtgcaatcagctttcccgagcacctactcagggcacccattttctcattgcagtgacaaatccaactgaccagaagggaggaggaagctcactggtggctgttcctgaaggaggccctgcccttataggaacagaagaggaaagagagacacagctgcagaggccacctggattgtgcctaatgtgtttgagcatcgcttaggagaagtcttctatttatttatttattcattagttttgaagattctatgttaatattttaggtgtaaaataattaagggtatgattaactctacctgcacactgtcctattatattcattctttttgaaatgtcaaccccaagttagttcaatctggattcatatttaatttgaaggtagaatgttttcaaatgttctccagtcattatgttaatatttctgaggagcctgcaacatgccagccactgtgatagaggctggcggatccaagcaaatggccaatgagatcattgtgaaggcaggggaatgtatgtgcacatctgttttgtaactgtttagatgaatgtcagttgttatttattgaaatgatttcacagtgtgtggtcaacatttctcatgttgaaactttaagaactaaaatgttctaaatatcccttggacattttatgtctttcttgtaaggcatactgccttgtttaatggtagttttacagtgtttctggcttagaacaaaggggcttaattattgatgttttcatagagaatataaaaataaagcacttatag

SEQ ID NO: 516 - DNA, 1552 bp, Homo sapiens
gcccgtacacaccgtgtgctgggacaccccacagtcagccgcatggctcccctgtgccccagcccctggctccctctgttgatcccggcccctgctccaggcctcactgtgcaactgctgctgtcactgctgcttctgatgcctgtccatccccagaggttgccccggatgcaggaggattcccccttgggaggaggctcttctggggaagatgacccactgggcgaggaggatctgcccagtgaagaggattcacccagagaggaggatccacccggagaggaggatctacctggagaggaggatctacctggagaggaggatctacctgaagttaagcctaaatcagaagaagagggctccctgaagttagaggatctacctactgttgaggctcctggagatcctcaagaaccccagaataatgcccacagggacaaagaaggggatgaccagagtcattggcgctatggaggcgacccgccctggccccgggtgtccccagcctgcgcgggccgcttccagtccccggtggatatccgcccccagctcgccgccttctgcccggccctgcgccccctggaactcctgggcttccagctcccgccgctcccagaactgcgcctgcgcaacaatggccacagtgtgcaactgaccctgcctcctgggctagagatggctctgggtcccgggcgggagtaccgggctctgcagctgcatctgcactggggggctgcaggtcgtccgggctcggagcacactgtggaaggccaccgtttccctgccgagatccacgtggttcacctcagcaccgcctttgccagagttgacgaggccttggggcgcccgggaggcctggccgtgttggccgcctttctggaggagggcccggaagaaaacagtgcctatgagcagttgctgtctcgcttggaagaaatcgctgaggaaggctcagagactcaggtcccaggactggacatatctgcactcctgccctctgacttcagccgctacttccaatatgaggggtctctgactacaccgccctgtgcccagggtgtcatctggactgtgtttaaccagacagtgatgctgagtgctaagcagctccacaccctctctgacaccctgtggggacctggtgactctcggctacagctgaacttccgagcgacgcagcctttgaatgggcgagtgattgaggcctccttccctgctggagtggacagcagtcctcgggctgctgagccagtccagctgaattcctgcctggctgctggtgacatcctagccctggtttttggcctcctttttgctgtcaccagcgtcgcgttccttgtgcagatgagaaggcagcacagaaggggaaccaaagggggtgtgagctaccgcccagcagaggtagccgagactggagcctagaggctggatcttggagaatgtgagaagccagccagaggcatctgagggggagccggtaactgtcctgtcctgctcattatgccacttccttttaactgccaagaaattttttaaaataaatatttataat

SEQ ID NO: 517 - DNA, 5869 bp, Homo sapiens
ctcgaggatctcggctcactgcaacctccgcctcccaggttcaagctgttcttctgcctcagcctcccgagtagctgggattacaggcgcctgccaccatgccctgctaatttttgtatttttagtagagatggggtttcaccgtgttggccagactggtctcgaactcctgacctcgtgatccacccgcctcagcctcccaaatgctgggattacagatgtgagccaccgcacccggcctggcagaggatactttttaaggtcaaagacagtagcagaggtggagttcctgggaacagggtcatgaggggaagagggggttcggagggagcgagtagccactggctacctctagaaagggaaggctttggtgcaacatcgttcccctgcagttttactcatctttgcttcctgccctttcatcatccaatcgggcaggcaggacagggcctgagggggcagggatccagtgggtgcctctctagactaaccccagctcaggactcccagagccccttccctgaggccctgctgcccccaagcccagattggggatcccaagcagcacgtaggcagagccagtgaggtccccgttagtcccattgaaagctctaaaaccagcgaaccctcagtccagcctcaggtcaggcatccaggacggcctcagccctcatgggtgagccatctctgcggacactgcacagggcctacgatccatcgctgcctcccgaggatgccagccaggcccccgttgagataactgcttccctgctggacaaggctgggaccagccatctcggtgacagttccagaacccctggcctgggctgctgggttcaatggaaaaaggctgtgactagagtcagggggatggtctcagtgacctcaaggataaggccagatccttgcactgtcagtgacccaaagcaacaggtgtccagagcagcagtgtggcgccttcacgcccccacacatcagcccaactcacccaggacagggactgtagcctcagcactcaacccatgtgccctgtgtggggtctcttcccactgcactcacaggagaggaagggtccctcaggggtccactggggtcccctcctgcaaatggggcaaggagaggggcaaggggctgtctcaaggcccctggagcacatgcaggtcctggactggggctcctgggagggccatgattctgggctccatgagttcagagcagacgccttgtttttccttgtccactgtcagccaccccacccttccctgacccttaaaagaaccaggaaacagcacatgatctgttggaaggaggcattcattctttcctttctgtgggtgtggggaggggaccacagggcacataccccaccctgggatccagctgagcaggggggtcagagatgacagctcttccggctcacaggccaccggcccacatacagggcaatcagaagaaagaaacagcacaaggaaggcacagagggagtcgttgtccctgccagaggtgcagcactccgggaatgtccctcactctccccgtccctctgtcttgcccaatcctgaccaggtgcagaaatcttgccaagtgtttccgcaggagttgctggcaattgcctcacattcctggccttggcaaagaatgaatcaacccaccctagatcccataaatagggccacccaggtgagcctctcactcgccacctcctcttccacccctgccaggcccagcagccaccacagcgcctgcttcctcggccctgaaatcatgcccctaggtctcctgtggctgggcctagccctgttgggggctctgcatgcccaggcccaggactccacctcagacctgatcccagccccacctctgagcaaggtccctctgcagcagaacttccaggacaaccaagtaaggggccaagaggggcacctgcaggcagggcctggggaagagtgggagcagaggggaggagaggtgaagagactcaggaagagcgttgggcaggacttaggagtccagggtccaggtttcagctcactctgtgccaccagggtcccctggtggaaaccatgccccttccccccatccccaccccctctcagcctgaacagactcccccaggtccacatcccctctcccataacccccattgtccaaagaaggtgggagcacttttagtccccctgcacagatgaggaaactgaggctcaggaaggcccaccagccacatgcctcctccagtgaggaggtcaccctcctccctgccagactcagaaccgcctcttcccccaggactcccttctggactgatggcctcctgctcctgccccttcaccagtgcaggcccagcctgggccctgctgcccagctagaggggctcatggttccaagctgggcggcccagaggtgccacagggacagagctggaggggtggctcctagggccattcctgggttgtgcctcttatcagtcccttgcagttccaggggaagtggtatgtggtaggcctggcagggaatgcaattctcagagaagacaaagacccgcaaaagatgtatgccaccatctatgagctgaaagaagacaagagctacaatgtcacctccgtcctgtttaggtgagggccgacatctcctgggggtgtgagagtcagactgacgtcacaggcaagggatggccaaagctgagggatcctgtcgttcacctcgctgttctgcccggaattcatctgtgttcatccttcctctgttccttagagcaacgtttatagcacatttccatgcagacacacagacagtggtggggatggacatgcacagtcgttagaaaacaagacggagagaggaggggtgcctgggagcgggaggaggggacactggatccagcctggaaccccacccagtgccttcatggaaggcttccagggaggtggccttaaaagagccaacctgcttcaaaaggaaatgtggggtgttcccggcaggggctggagtcagagagagcccccccttcaggaaggagcaagccatcgcagggtcaccctgagcagagctgctgagcagcctggaggggcaggtggccacgctagcacctagcacggtcctcaggccccgccccagcggatctgctgcggagtggcttagagcagggctcttgggccgcagggtggggagacttggtggggtgcagcctagggggtcgggagaccagcgaaagtgaagcggggccgtcacaggtgtgagagaacaggcgcagggtgaagaggcagggagccagggatcagccgcccccagtgggtttctgactctggcagctgagtggattgggattggggcatttgtggagcaaggagcagaatacagacaggttggggagctcagccctggggtgccaggggatgggaagtgggaggactcaaggatggggtcaggtttgacccgagagctaggggaacggctggcatggagcagactggaagtaccgaggtggatccccgggagagggtataggaagggaagcagcaagctgagtgcaggggagaaatgcagggtttcctgtgtgttgggtggcggcgggggtgaaagccacccagggaggcagccaaaggaaagaaggacatcgggtgctggagggtctgagtggggtccaggggccccaggcaggccaggagggacagcctggtgtcagctcagggagaaggcccaggcccatctcggctgggtggggtagggcccctccaggtagtgggggatgagctgtcacgggttgggccggactgagagcaacagaaccctgctgctgccctggccccaccttgtccagcacaggaggcccaagcctgggttgtctcccctctcacccacccatctctccctcccaaggaaaaagaagtgtgactactggatcaggacttttgttccaggttgccagcccggcgagttcacgctgggcaacattaagagtgagtcttgagtgaggtggggcactgagttggggctccggggagctgggtaggggcacagaccttcctgcccctccacacagatgtgttgtatggggagaagcccacgttgatgggctggggagggaggggacagctccctcctcccatccagggcagggctgacccctcaccgtccacgcctgcaggttaccctggattaacgagttacctcgtccgagtggtgagcaccaactacaaccagcatgctatggtgttcttcaagaaagtttctcaaaacagggagtacttcaagatcaccctctacggtgggtcctctcccatcccctcggggactggctcctgatcacacttagtgggaggggaggccggtcccccatgaggaagggatctgaggcctcatctactcattcaacgatatttatgtggtgtctgccggccactcactggccatcttggtcacagggagaaccaaggagctgacttcggaactaaaggagaacttcatccgcttctccaaatatctgggcctccctgaaaaccacatcgtcttccctgtcccaatcggtaatggccagtctggatgaggggacggggacatggggactgttcaggcaggatgcttccctaccagggatcagggagaggagggactccgtcctcagcttcagtcactggagcagtggatggtccaggagctccttggaagccactctgggcccaggaagactgtgccccaccccagggtctatgggactcccagggacccaggccgcaagtgctctttcctggcagtttagcccgggtctgcccagacaaggatttcaggcccaggcctgagtatccatttctcagtctcactggcctgacacctctggccaccctcccaggcccccttgttctgggccatctcccccgaccctcccaggcctcgtcaccctgggttttgctgtcctggctgtcctctctcccctggggacttgctcaccactgacttgggagctgtccttgactccagggagcctggcttgggcaggaggctccagccaggccattcagagagccactggcctcccccaggctgagagactgcctggactggtaaacaggcaggagacctgggtgcccgaggagcctgggagctgggcctcactcagggcagcccctccccaggcctttctcccacatcccctgccctgccatccacccctctgttgccccatctctgaaaggaacccccatatcttctgcagctgggccaggtggggcaggggctgcccaggggcagtgcagaggacctggcagtcagggatcacacacacacactcatacacgcacacacacacacagctgcctgttctgacggactttctccctaacagaccagtgtatcgacggctgagtgcacagtgagtgtggctgggcggctgcgagggggcttgtgggaggccagggtgcagtgggctgggggtcttgggcctgcctttgctcatccccctgccccccagcactgctgctgtctttattctgctgtccccatctcgggtgcctcccatttccccacccatcaccctcatatccacctctgtccagggtgccgccagctgccgcaccagcccgaacaccattgagggagctgggagaccctccccacagtgccacccatgcagctgctccccaggccaccccgctgatggagccccaccttgtctgctaaataaacatgtgccctcaggcctctgagtctacactgtttgacccctgggccttcgaggaaggggaggggcgggaggctcccactggcatcactctcagggtctgcacccccaggatggagcctagcgaacccagcctgggtgttagggctgcagagtgaagacacaagcccctggtcatcaccagcagctttgtgg

SEQ ID NO: 518 - DNA, 1973 bp, Homo sapiens
ggatccggcaacgaaggtaccatggcgggacgtggcgccatggtgctgttgcacgtgctgtttgagcacgcggtcggctacgcgctcgtggcgctgaaggaagtggaggagatcagtctgctgcagccgcaggtggaggagtccgtgctcaacctgggcaaattccacagcatcgttcgtctggtggccttttgtccctttgcctcatcccaggttgccttggaaaatgccaacgccgtgtctgaaggggttgttcatgaggacctccgcctgctcttggagacccacctgccgtccaaaaagaagaaagtactcttgggagttggggatcccaagattggtgccgcaatacaggaggagttagggtacaactgccagactggaggagtcatagctgagatcctgcgaggagttcgtctgcacttccacaatctggtgaagggtctgaccgatctgtcagcttgtaaagcacagctggggctgggacacagctattcccgtgccaaagttaagtttaatgtgaaccgggtggacaatatgatcatccagtccattagcctcctggaccagctggataaggacatcaataccttctctatgcgtgtcagggagtggtacgggtatcactttccggagctggtgaagatcatcaacgacaatgccacatactgccgtcttgcccagtttattggaaaccgaagggaactgaatgaggacaagctggagaagctggaggagctgacaatggatggggccaaggctaaggctattctggatgcctcacggtcctccatgggcatggacatatctgccattgacttgataaacatcgagagcttctccagtcgtgtggtgtctttatctgaataccgccagagcctacacacttacctgcgctccaagatgagccaagtagcccccagcctgtcagccctaattggggaagcggtaggtgcacgtctcatcgcacatgctggcagcctcaccaacctggccaagtatccagcatccacagtgcagatccttggggctgaaaaggccctgttcagagccctgaagacaaggggtaacactccaaaatatggactcattttccactccaccttcattggccgagcagctgccaagaacaaaggccgcatctcccgatacctggcaaacaaatgcagtattgcctcacgaatcgattgcttctctgaggtgcccacgagtgtattcggggagaagcttcgagaacaagttgaagagcgactgtccttctatgagactggagagataccacgaaagaatctggatgtcatgaaggaagcaatggttcaggcagaggcagaggaagcggctgctgagattactaggaagctggagaaacaggagaagaaacgcttaaagaaggaaaagaaacggctggctgcacttgccctcgcgtcttcagaaaacagcagtagtactccagaggagtgtgaggagacgagtgaaaaacccaaaaagaagaaaaagcaaaagccccaggaggttcctcaggagaatggaatggaagacccatctatctctttctccaaacccaagaaaaagaaatctttttccaaggaggagttgatgagtagcgatcttgaagagaccgctggcagcaccagtattcccaagaggaagaagtctacacccaaggaggaaacagttaatgaccctgaggaggcaggccacagaagtcggtccaagaaaaagaggaaattctccaaagaggagccggtcagcagtgggcctgaagaggcggttggcaagagcagctccaagaagaagaaaaagttccataaagcatcccaggaagattagaatgcaaatggacattctctgggaggtggggcataccatagcccaaggtgacatttcccaccctgtgcccgtgttcccaataaaaacaaattcacaagaaaaaaaaaaaaaaaaaaaaaattcctgaggccgcaagggaattc

SEQ ID NO: 519 - DNA, 273 bp, Homo sapiens
actgtgtcatgtcaggttagatctgaatctctaggagaatagcttttttgatctgtttgctcctttgagtctcccttttactttacaactagaaaaccaatcgcatacttcacttctatcgcttccagatatggcatatttttcttaggctaccgttgaaatttagcataatatttctcccttacctttacgtccttttaaaaaaataggactatagtaagtcctccgtgtcggtggcatgtttttggaaactgactttaaagaaaacataca

SEQ ID NO: 520 - DNA, 359 bp, Homo sapiens
  misc_feature (1)..(359): n=a,t,g or c
cctttaccaaaaatttaaacaataatcccaataatggccagttggcaaaattagggcaattcagtttctgcttacatcgttgaacaagacatgaaattgactaccttaaaagttacagcttccacagatgtgattaaaactcaaatgtattttcagaaaagaaaaatcagtaatctaataatacaacaatcatcacgcctcacaggtgtggctacagaaagccatcctgtttcttcccttttcagactgcatgacagaactcttacaatgcagctgtctgaacgtgcatgccatgcagcnctgtgcattttnttcccacgccagaaacaccaacgttagcagtgagaaacagcctcttg

SEQ ID NO: 521 - DNA, 6728 bp, Homo sapiens
agcagacgggagtttctcctcggggtcggagcaggaggcacgcggagtgtgaggccacgcatgagcggacgctaaccccctccccagccacaaagagtctacatgtctagggtctagacatgttcagctttgtggacctccggctcctgctcctcttagcggccaccgccctcctgacgcacggccaagaggaaggccaagtcgagggccaagacgaagacatcccaccaatcacctgcgtacagaacggcctcaggtaccatgaccgagacgtgtggaaacccgagccctgccggatctgcgtctgcgacaacggcaaggtgttgtgcgatgacgtgatctgtgacgagaccaagaactgccccggcgccgaagtccccgagggcgagtgctgtcccgtctgccccgacggctcagagtcacccaccgaccaagaaaccaccggcgtcgagggacccaagggagacactggcccccgaggcccaaggggacccgcaggcccccctggccgagatggcatccctggacagcctggacttcccggaccccccggaccccccggacctcccggaccccctggcctcggaggaaactttgctccccagctgtcttatggctatgatgagaaatcaaccggaggaatttccgtgcctggccccatgggtccctctggtcctcgtggtctccctggcccccctggtgcacctggtccccaaggcttccaaggtccccctggtgagcctggcgagcctggagcttcaggtcccatgggtccccgaggtcccccaggtccccctggaaagaatggagatgatggggaagctggaaaacctggtcgtcctggtgagcgtgggcctcctgggcctcagggtgctcgaggattgcccggaacagctggcctccctggaatgaagggacacagaggtttcagtggtttggatggtgccaagggagatgctggtcctgctggtcctaagggtgagcctggcagccctggtgaaaatggagctcctggtcagatgggcccccgtggcctgcctggtgagagaggtcgccctggagcccctggccctgctggtgctcgtggaaatgatggtgctactggtgctgccgggccccctggtcccaccggccccgctggtcctcctggcttccctggtgctgttggtgctaagggtgaagctggtccccaagggccccgaggctctgaaggtccccagggtgtgcgtggtgagcctggcccccctggccctgctggtgctgctggccctgctggaaaccctggtgctgatggacagcctggtgctaaaggtgccaatggtgctcctggtattgctggtgctcctggcttccctggtgcccgaggcccctctggaccccagggccccggcggccctcctggtcccaagggtaacagcggtgaacctggtgctcctggcagcaaaggagacactggtgctaagggagagcctggccctgttggtgttcaaggaccccctggccctgctggagaggaaggaaagcgaggagctcgaggtgaacccggacccactggcctgcccggaccccctggcgagcgtggtggacctggtagccgtggtttccctggcgcagatggtgttgctggtcccaagggtcccgctggtgaacgtggttctcctggccccgctggccccaaaggatctcctggtgaagctggtcgtcccggtgaagctggtctgcctggtgccaagggtctgactggaagccctggcagccctggtcctgatggcaaaactggcccccctggtcccgccggtcaagatggtcgccccggacccccaggcccacctggtgcccgtggtcaggctggtgtgatgggattccctggacctaaaggtgctgctggagagcccggcaaggctggagagcgaggtgttcccggaccccctggcgctgtcggtcctgctggcaaagatggagaggctggagctcagggaccccctggccctgctggtcccgctggcgagagaggtgaacaaggccctgctggctcccccggattccagggtctccctggtcctgctggtcctccaggtgaagcaggcaaacctggtgaacagggtgttcctggagaccttggcgcccctggcccctctggagcaagaggcgagagaggtttccctggcgagcgtggtgtgcaaggtccccctggtcctgctggaccccgaggggccaacggtgctcccggcaacgatggtgctaagggtgatgctggtgcccctggagctcccggtagccagggcgcccctggccttcagggaatgcctggtgaacgtggtgcagctggtcttccagggcctaagggtgacagaggtgatgctggtcccaaaggtgctgatggctctcctggcaaagatggcgtccgtggtctgaccggccccattggtcctcctggccctgctggtgcccctggtgacaagggtgaaagtggtcccagcggccctgctggtcccactggagctcgtggtgcccccggagaccgtggtgagcctggtccccccggccctgctggctttgctggcccccctggtgctgacggccaacctggtgctaaaggcgaacctggtgatgctggtgccaaaggcgatgctggtccccctgggcctgccggacccgctggaccccctggccccattggtaatgttggtgctcctggagccaaaggtgctcgcggcagcgctggtccccctggtgctactggtttccctggtgctgctggccgagtcggtcctcctggcccctctggaaatgctggaccccctggccctcctggtcctgctggcaaagaaggcggcaaaggtccccgtggtgagactggccctgctggacgtcctggtgaagttggtccccctggtccccctggccctgctggcgagaaaggatcccctggtgctgatggtcctgctggtgctcctggtactcccgggcctcaaggtattgctggacagcgtggtgtggtcggcctgcctggtcagagaggagagagaggcttccctggtcttcctggcccctctggtgaacctggcaaacaaggtccctctggagcaagtggtgaacgtggtccccccggtcccatgggcccccctggattggctggaccccctggtgaatctggacgtgagggggctcctgctgccgaaggttcccctggacgagacggttctcctggcgccaagggtgaccgtggtgagaccggccccgctggaccccctggtgctcctggtgctcctggtgcccctggccccgttggccctgctggcaagagtggtgatcgtggtgagactggtcctgctggtcccgccggtcccgtcggccccgtcggcgcccgtggccccgccggaccccaaggcccccgtggtgacaagggtgagacaggcgaacagggcgacagaggcataaagggtcaccgtggcttctctggcctccagggtccccctggccctcctggctctcctggtgaacaaggtccctctggagcctctggtcctgctggtccccgaggtccccctggctctgctggtgctcctggcaaagatggactcaacggtctccctggccccattgggccccctggtcctcgcggtcgcactggtgatgctggtcctgttggtccccccggccctcctggacctcctggtccccctggtcctcccagcgctggtttcgacttcagcttcctgccccagccacctcaagagaaggctcacgatggtggccgctactaccgggctgatgatgccaatgtggttcgtgaccgtgacctcgaggtggacaccaccctcaagagcctgagccagcagatcgagaacatccggagcccagagggaagccgcaagaaccccgcccgcacctgccgtgacctcaagatgtgccactctgactggaagagtggagagtactggattgaccccaaccaaggctgcaacctggatgccatcaaagtcttctgcaacatggagactggtgagacctgcgtgtaccccactcagcccagtgtggcccagaagaactggtacatcagcaagaaccccaaggacaagaggcatgtctggttcggcgagagcatgaccgatggattccagttcgagtatggcggccagggctccgaccctgccgatgtggccatccagctgaccttcctgcgcctgatgtccaccgaggcctcccagaacatcacctaccactgcaagaacagcgtggcctacatggaccagcagactggcaacctcaagaaggccctgctcctcaagggctccaacgagatcgagatccgcgccgagggcaacagccgcttcacctacagcgtcactgtcgatggctgcacgagtcacaccggagcctggggcaagacagtgattgaatacaaaaccaccaagtcctcccgcctgcccatcatcgatgtggcccccttggacgttggtgccccagaccaggaattcggcttcgacgttggccctgtctgcttcctgtaaactccctccatcccaacctggctccctcccacccaaccaactttccccccaacccggaaacagacaagcaacccaaactgaacccccccaaaagccaaaaaatgggagacaatttcacatggactttggaaaatatttttttcctttgcattcatctctcaaacttagtttttatctttgaccaaccgaacatgaccaaaaaccaaaagtgcattcaaccttaccaaaaaaaaaaaaaaaaaaaaaagaataaataaataagtttttaaaaaaggaagcttggtccacttgcttgaagacccatgcgggggtaagtccctttctgcccgttgggttatgaaaccccaatgctgccctttctgctcctttctccacaccccccttggcctcccctccactccttcccaaatctgtctccccagaagacacaggaaacaatgtattgtctgcccagcaatcaaaggcaatgctcaaacacccaagtggcccccaccctcagcccgctcctgcccgcccagcacccccaggccctggggacctggggttctcagactgccaaagaagccttgccatctggcgctcccatggctcttgcaacatctccccttcgtttttgagggggtcatgccgggggagccaccagcccctcactgggttcggaggagagtcaggaagggccacgacaaagcagaaacatcggatttggggaacgcgtgtcatcccttgtgccgcaggctgggcgggagagactgttctgttctgttccttgtgtaactgtgttgctgaaagactacctcgttcttgtcttgatgtgtcaccggggcaactgcctgggggcggggatgggggcagggtggaagcggctccccatttttataccaaaggtgctacatctatgtgatgggtggggtggggagggaatcactggtgctatagaaattgagatgcccccccaggccagcaaatgttcctttttgttcaaagtctatttttattccttgatattttttctttctttttttttttttttgtggatggggacttgtgaatttttctaaaggtgctatttaacatgggaggagagcgtgtgcgctccagcccagcccgctgctcactttccaccctctctccacctgcctctggcttctcaggcctctgctctccgacctctctcctctgaaaccctcctccacagctgcagcccatcctcccggctccctcctagtctgtcctgcgtcctctgtccccgggtttcagagacaacttcccaaagcacaaagcagtttttccctaggggtgggaggaagcaaaagactctgtacctattttgtatgtgtataataatttgagatgtttttaattattttgattgctggaataaagcatgtggaaatgacccaaacataatccgcagtggcctcctaatttccttctttggagttgggggaggggtagacatggggaaggggccttggggtgatgggcttgccttccattcctgccctttccctccccactattctcttctagatccctccataaccccactcccctttctctcacccttcttataccgcaaacctttctacttcctctttcattttctattcttgcaatttccttgcaccttttccaaatcctcttctcccctgcaataccatacaggcaatccacgtgcacaacacacacacacactcttcacatctggggttgtccaaacctcatacccactccccttcaagcccatccactctccaccccctggatgccctgcacttggtggcggtgggatgctcatggatactgggagggtgaggggagtggaacccgtgaggaggacctgggggcctctccttgaactgacatgaagggtcatctggcctctgctcccttctcacccacgctgacctcctgccgaaggagcaacgcaacaggagaggggtctgctgagcctggcgagggtctgggagggaccaggaggaaggcgtgctccctgctcgctgtcctggccctgggggagtgagggagacagacacctgggagagctgtggggaaggcactcgcaccgtgctcttgggaaggaaggagacctggccctgctcaccacggactgggtgcctcgacctcctgaatccccagaacacaacccccctgggctggggtggtctggggaaccatcgtgcccccgcctcccgcctactcctttttaagctt

SEQ ID NO: 522 - DNA, 5086 bp, Homo sapiens
  misc_feature (1)..(5086): n=a,t,g or c
agcaccacggcagcaggaggtttcggnctaagttggaggtactggnccacgactgcatgcccgcgcccgccaggtgatacctccgccggtgacccaggggctctgcgacacaaggagtctgcatgtctaagtgctagacatgctcagctttgtggatacgcggactttgttgctgcttgcagtaaccttatgcctagcaacatgccaatctttacaagaggaaactgtaagaaagggcccagccggagatagaggaccacgtggagaaaggggtccaccaggccccccaggcagagatggtgaagatggtcccacaggccctcctggtccacctggtcctcctggcccccctggtctcggtgggaactttgctgctcagtatgatggaaaaggagttggacttggccctggaccaatgggcttaatgggacctagaggcccacctggtgcagctggagccccaggccctcaaggtttccaaggacctgctggtgagcctggtgaacctggtcaaactggtcctgcaggtgctcgtggtccagctggccctcctggcaaggctggtgaagatggtcaccctggaaaacccggacgacctggtgagagaggagttgttggaccacagggtgctcgtggtttccctggaactcctggacttcctggcttcaaaggcattaggggacacaatggtctggatggattgaagggacagcccggtgctcctggtgtgaagggtgaacctggtgcccctggtgaaaatggaactccaggtcaaacaggagcccgtgggcttcctggtgagagaggacgtgttggtgcccctggcccagctggtgcccgtggcagtgatggaagtgtgggtcccgtgggtcctgctggtcccattgggtctgctggccctccaggcttcccaggtgcccctggccccaagggtgaaattggagctgttggtaacgctggtcctgctggtcccgccggtccccgtggtgaagtgggtcttccaggcctctccggccccgttggacctcctggtaatcctggagcaaacggccttactggtgccaagggtgctgctggccttcccggcgttgctggggctcccggcctccctggaccccgcggtattcctggccctgttggtgctgccggtgctactggtgccagaggacttgttggtgagcctggtccagctggctccaaaggagagagcggtaacaagggtgagcccggctctgctgggccccaaggtcctcctggtcccagtggtgaagaaggaaagagaggccctaatggggaagctggatctgccggccctccaggacctcctgggctgagaggtagtcctggttctcgtggtcttcctggagctgatggcagagctggcgtcatgggccctcctggtagtcgtggtgcaagtggccctgctggagtccgaggacctaatggagatgctggtcgccctggggagcctggtctcatgggacccagaggtcttcctggttcccctggaaatatcggccccgctggaaaagaaggtcctgtcggcctccctggcatcgacggcaggcctggcccaattggcccagctggagcaagaggagagcctggcaacattggattccctggacccaaaggccccactggtgatcctggcaaaaacggtgataaaggtcatgctggtcttgctggtgctcggggtgctccaggtcctgatggaaacaatggtgctcagggacctcctggaccacagggtgttcaaggtggaaaaggtgaacagggtcccgctggtcctccaggcttccagggtctgcctggcccctcaggtcccgctggtgaagttggcaaaccaggagaaaggggtctccatggtgagtttggtctccctggtcctgctggtccaagaggggaacgcggtcccccaggtgagagtggtgctgccggtcctactggtcctattggaagccgaggtccttctggacccccagggcctgatggaaacaagggtgaacctggtgtggttggtgctgtgggcactgctggtccatctggtcctagtggactcccaggagagaggggtgctgctggcatacctggaggcaagggagaaaagggtgaacctggtctcagaggtgaaattggtaaccctggcagagatggtgctcgtggtgctcatggtgctgtaggtgcccctggtcctgctggagccacaggtgaccggggcgaagctggggctgctggtcctgctggtcctgctggtcctcggggaagccctggtgaacgtggcgaggtcggtcctgctggccccaacggatttgctggtccggctggtgctgctggtcaaccgggtgctaaaggagaaagaggagccaaagggcctaagggtgaaaacggtgttgttggtcccacaggccccgttggagctgctggcccagctggtccaaatggtccccccggtcctgctggaagtcgtggtgatggaggcccccctggtatgactggtttccctggtgctgctggacggactggtcccccaggaccctctggtatttctggccctcctggtccccctggtcctgctgggaaagaagggcttcgtggtcctcgtggtgaccaaggtccagttggccgaactggagaagtaggtgcagttggtccccctggcttcgctggtgagaagggtccctctggagaggctggtactgctggacctcctggcactccaggtcctcagggtcttcttggtgctcctggtattctgggtctccctggctcgagaggtgaacgtggtctacctggtgttgctggtgctgtgggtgaacctggtcctcttggcattgccggccctcctggggcccgtggtcctcctggtgctgtgggtagtcctggagtcaacggtgctcctggtgaagctggtcgtgatggcaaccctgggaacgatggtcccccaggtcgcgatggtcaacccggacacaagggagagcgcggttaccctggcaatattggtcccgttggtgctgcaggtgcacctggtcctcatggccccgtgggtcctgctggcaaacatggaaaccgtggtgaaactggtccttctggtcctgttggtcctgctggtgctgttggcccaagaggtcctagtggcccacaaggcattcgtggcgataagggagagcccggtgaaaaggggcccagaggtcttcctggcttaaagggacacaatggattgcaaggtctgcctggtatcgctggtcaccatggtgatcaaggtgctcctggctccgtgggtcctgctggtcctaggggccctgctggtccttctggccctgctggaaaagatggtcgcactggacatcctggtacggttggacctgctggcattcgaggccctcagggtcaccaaggccctgctggcccccctggtccccctggccctcctggacctccaggtgtaagcggtggtggttatgactttggttacgatggagacttctacagggctgaccagcctcgctcagcaccttctctcagacccaaggactatgaagttgatgctactctgaagtctctcaacaaccagattgagacccttcttactcctgaaggctctagaaagaacccagctcgcacatgccgtgacttgagactcagccacccagagtggagcagtggttactactggattgaccctaaccaaggatgcactatggatgctatcaaagtatactgtgatttctctactggcgaaacctgtatccgggcccaacctgaaaacatcccagccaagaactggtataggagctccaaggacaagaaacacgtctggctaggagaaactatcaatgctggcagccagtttgaatataatgtagaaggagtgacttccaaggaaatggctacccaacttgccttcatgcgcctgctggccaactatgcctctcagaacatcacctaccactgcaagaacagcattgcatacatggatgaggagactggcaacctgaaaaaggctgtcattctacagggctctaatgatgttgaacttgttgctgagggcaacagcaggttcacttacactgttcttgtagatggctgctctaaaaagacaaatgaatggggaaagacaatcattgaatacaaaacaaataagccatcacgcctgcccttccttgatattgcacctttggacatcggtggtgctgaccatgaattctttgtggacattggcccagtctgtttcaaataaatgaactcaatctaaattaaaaaagaaagaaatttgaaaaaactttctctttgccatttcttcttcttcttttttaactgaaagctgaatccttccatttcttctgcacatctacttgcttaaattgtgggcaaaagagaaaaagaaggattgatcagagcattgtgcaatacagtttcattaactccttcccccgctcccccaaaaatttgaatttttttttcaacactcttacacctgttatggaaaatgtcaacctttgtaagaaaaccaaaataaaaattgaaaaataaaaaccataaacatttgcaccacttgtggcttttgaatatcttccacagagggaagtttaaaacccaaacttccaaaggtttaaactacctcaaaacactttcccatgagtgtgatccacattgttaggtgctgacctagacagagatgaactgaggtccttgttttgttttgttcataatacaaaggtgctaattaatagtatttcagatacttgaagaatgttgatggtgctagaagaatttgagaagaaatactcctgtattgagttgtatcgtgtggtgtattttttaaaaaatttgatttagcattcatattttccatcttattcccaattaaaagtatgcagattatttgcccaaagttgtcctcttcttcagattcagcatttgttctttgccagtctcattttcatcttcttccatggttccacagaagctttgtttcttgggcaagcagaaaaattaaattgtacctattttgtatatgtgagatgtttaaataaattgtgaaaaaaatgaaataaagcatgtttggttttccaaaagaacatat

SEQ ID NO: 523 - DNA, 434 bp, Homo sapiens
  misc_feature (1)..(434): n=a,t,g or c
agggaagatagtaaaattcatttaataggcatgttccatataaccattttgttacaaattttgcattttccacatgaaaaaaaatcacagtaggcacatactagaagcaaaatatgtcagacaaaaatatcctaaagatgtttctgttatcaaacttttacaatttttccaagacgtttttgaggtttgggaaaaagtctggggnatttttggcaaaaaacaaacacactctatccatgtgagttttgactattgttctttctcaccaaaaatgtccataattttctacaaattccatgaagttttaaatcaatcatgtttgatttacatttaccaagaatgatttgcccatcaccataaaaattganttaaaaatacatcaggctaaataaatccaaaagngaacagtgaattttgttgggtttacagacagt

SEQ ID NO: 524 - DNA, 403 bp, Homo sapiens
caaataattactgttttatattgggacagtacatttcagatttcaaccaaaagacaaaaatgcagtttaactcaaaggcacaacaattgaaacacagaaaataatggcatctcttggatgccttatttctaaattaaacaaagaagtacacaaattttgttcccttccctcccccagtgcaagcccacaagctttttccaaagtcttgagcttttgatgctgtcccgcattgtggacttgtgaggcgcttggatgtagcaatgaaacaaaatgcttgagaggtctagtgaatggcattcaaaagggacctcaaagtgcagacatatctttttcaaattatgttacaggctgaactggctctttgaacactatcactctgcttaaatccaggaagcaggcttta

SEQ ID NO: 525 - DNA, 453 bp, Homo sapiens
  misc_feature (1)..(453): n=a,t,g or c
ttttttatatacacagcatttttattaaatatactctgtgagaaaaagaacaccctaaagtgccagatttcatgtaaatccaataacttagtaaatacaatggtgaaaaaaaatcngagggaaacataatttaaataatcttataaaagagcaagaacatatcttaatcttaagaaaacaatcatcaaaatataaaagggaaagaaatctcttttgtagaagaatatatttcaaattccacctgttgatcatttcatttaaaaaattctattctaaacacatgggcagtctctcttaccaatatatatatttaaatcaatgggtagaaagggaatttagactactcattcacactgagataaagtgacatttttgttgcacaacagtattgctcactgggcactaacagtgggaagatggagaaagtagatttctgggattcaattggttagc

SEQ ID NO: 526 - DNA, 264 bp, Homo sapiens
ttttttttttttttttttttaaaatgggaaggtttattaaggtttttcctcaagaggaacagccaatctcttgcttcttgagagaagcaattagtgggaaatgtatgtcacaccttgggcccagaaccacaggaggccgcttctcagcatgcccaacgaacatacatcatccccaattcccatttaaagctcattaatgtctacaaaacagaatccacgttgccttcccagaaaacagaactaggaacccagtcaaagcctcca

SEQ ID NO: 527 - DNA, 484 bp, Homo sapiens
  misc_feature (1)..(484): n=a,t,g or c
atttaaaaaatcattttacttattaaaactttctcatttcccaaggcacttcagtagctttcacaaaaacatgtttgttcttttttaaccaggtgaggcatatgctttaggagtaccatggtaacataatcagcaaagagaagacaattacactgaacacaaaatatcacccaataaagttacaggactaaagtgagctactctgaaagactatgaacacaatttaaatttcttttttgtaatatcctcccatgactaagtatcaagaaaggaacacacacaatgacactgtttttggcacttagagaagtgctagaggctagggctggtaaggccttgcaccagtggcagctgcagacaattgccagagtgattctgttttaaaaaaaaaaaaaaaagacacaaaccaggaggctaaggaaccagcctttcccaagtgcattctgaagggccaatnaccaggagaanagggtncaccaccatt

SEQ ID NO: 528 - DNA, 456 bp, Homo sapiens
  misc_feature (1)..(456): n=a,t,g or c
tggcggtggtgaaatcaacgtgcttctttattttttaaactagataggctcattctactgtcttctccagggctcttctatgaaacagttacaaacctacggccaggccaggcagtggctcacacctgtaatcccagcactttggaatgctggggcaggaggatcacttgaggtcaggagctcgagaccagcctggagtatagggagacccccgcccccccccgccatctctacataaaatttaaacattagccaggtttggtggcctgtgcctgtagtcccagctactcaggaggctgagatgggaggatccgcttgagcctgggagttcaaagctgcagtgagccatgattgcaacattgcacttccagcctgggcgacggagcgaagaccctgtctcaaaaaataaaaaccaaaacctactgncagtttccccagggcttcatgcctcagcgn

SEQ ID NO: 529 - DNA, 337 bp, Homo sapiens
  misc_feature (1)..(337): n=a,t,g or c
tttttttttttttcaaaaccagcaaaaataaaatttaattgggctcaagtctgggcagtttgtccttcctcaggaccagccgtcagcagtccctgacgaaagcaccccattctctccacagacagctggttccagaaggaccctctgaggctggtcttccgggtaggatgtgctgtgggagggttctgtttccgaggaggagaggcgcgacacagcgtgcaaggacctgcagcaccttccacgcagcaccccctgctcctcctcctcagcccctgccgggctctgactcctaagtcaggcaggagcttcttcaggcccctgggntgaggaagagcca

SEQ ID NO: 530 - DNA, 364 bp, Homo sapiens
  misc_feature (1)..(364): n=a,t,g or c
ctatgtcagagctagtgatttcaaaaggtttcacaattccccaagacaaaagtgattttcgttcattataataaggttaagtgatatgtgattcatagcaattttgatgtgaagaagggaaggacatcattgacttaataatagtatcagtcggtgcaacagttggcaacatgtgccttcacactttaccataaagagacgggtttgagggtttgccttctaaagtctgcaacttcaagaaaaaaaatcgacactgtggattgactttcccggtcactatataaagcaaataaacttaaaacactttgtaaccatgtatttactctgccaggtgcctatattccaatanaatgttcatccttga

SEQ ID NO: 531 - DNA, 280 bp, Homo sapiens
tttagctttgaaatgcatttattttctgattattggaattcatccttcatgaaatttttagagtagtgttttaaattaagctccagagtgtaactgcaaccaaatagcaatacatacaagtggttttccattcaaatttacaaaagcattatttattagtaataaaaatatagaaggaattcagttttccttttatccccaattttttgcttttaaaagaccatttactaacatcctactgtagatatttcgagagacagatgaaaataataataataaa

SEQ ID NO: 532 - DNA, 402 bp, Homo sapiens
ctgtgagactgtcctttattgtgtatacaggttccagcgtcagggctctcccacggccccctccccagtcctcccccaagggcccagagtggtgggagtgagaggccaccctaaggcacactgaccagagaggcatggagggaggaggctgacttgccctggggacccctgctaactgagacccacccttcccctccaccctgcttctgtatgtgggagacgaaaccaagagtcactgggggcagcaggcatttcccagggttaaggctgatggaaggtccctatcccagatgggagatgggggcttttcctatgactccccccatcccccagctggaagacgtggggaggggtgcatagccttagagaggtagaatgaggggaaatactcctcagtgccca

SEQ ID NO: 533 - DNA, 413 bp, Homo sapiens
ataggtaaaatttttatttatgaatgtgtggacacatgactttggatccagccagccagtgacataaataaacttgagcaaaagtttcaagctagaggatatatatgtatagaaaattatatatttgtgtgtgtgtgtaaggcctcttggaacagtgccacaaacctggacaccaaccaacagaatactcccgtcctttgaaatttccattaagagcacaatgggggtaattataccaggatgctccaatcgctctttccatcttgtgcactcacatgcccgccaaacatgaaatgttcgccttctcccttccaatgtgatggttgttgaacttatctttagtgtcatttgataagcctttgtgctcacagagagacatcccactgacccagccactgggtcattggtctata

SEQ ID NO: 534 - DNA, 392 bp, Homo sapiens
  misc_feature (1)..(392): n=a,t,g or c
gactacaaccagtgtttattcttgatttgtcaccactcttttcatagtcttgttttcttccacatgttaaatatataataaccaaaactttactaacatacgaatgaagaaaacatgcgcaagtantngcatggcaggtagtgaggaaatctggccagccgactggttcctttaccaaggtttgcagagtaggttgtgtttgaacaccttctgtgggtctgtgtcatttccaagttgaagaatttcagccaaagagcaacatgtcacattgattaaagatggttaatgacacagaaacatttctgttaatactaagggaaaaggctgttcttttatttatttatttttcctgagtcctcacgtttttcttctctgacaaatgtttgaaattc

SEQ ID NO: 535 - DNA, 337 bp, Homo sapiens
  misc_feature (1)..(337): n=a,t,g or c
ttaagaatttccacccacaattttattattactgaaagcatttggaatgaagcaaaggatttaacaatatatataaaaatatacattttttaaaaaatcgcaagtagacaatagatttatggaattatttttctgatcatccagaaaagatagcaatagtaaactgcagttgggtngagaccagccactgngtccatgagacctaagcagccctaacgctgcctgagctctcaagagtagaagaaatgctcgacaaacagaaggaggctgtgggagggcagcaggacagccccaccagaaaaccagagcccaaatgggntggggcagggccaggggc

SEQ ID NO: 536 - DNA, 498 bp, Homo sapiens
gaagcaaggagctaggacccccagtcctgccccccaggagcacaagcagggtcccctcagtcaaggcagtgggatgggcggctgaggaacggggcaggcaaggtcactgctcagtcacgtccacgggggacgagccgtgggttctgctgagtaggtggagctcattgctttctccaagcttggaactgttttgaaagataacacagagggaaagggagagccacctggtacttgtccaccctgcctcctctgttctgaaattccatccccctcagcttaggggaatgcacctttttccctttccttctcacttttgcatgtttttactgatcattcgatatgctaaccgttctcagccctgagccttggagaggagggctgtaacgccttcagtcagtctctggggatgaaactcttaaatgctttgtatattttctcaattagatctcttttcagaagtgtctatagaacaataaaaatcttttacttctgaaaaaa

SEQ ID NO: 537 - DNA, 97 bp, Homo sapiens
  misc_feature (1)..(97): n=a,t,g or c
ttttnttttttttttttaacttttgaattccgtattttttaatggtctatggtctacaaacactcatgtgcaaacacatacacgcagaatagggatc

SEQ ID NO: 538 - DNA, 267 bp, Homo sapiens
  misc_feature (1)..(267): n=a,t,g or c
accgagtatattctgtttattgtttatgatttacacagaaaatgatgggctggggttatagaacaataaaccaaccattacatttagacctgggcttttgaaaaacttgcattccattttaacaattcgtatgtatctaacaaatacataaatccagatcacaaataatcttaagagttaaacaattaagaaacacaaagaataccacatagatctacctttaaatatcagcattcatattataagagataagaaaatgttanaaag

SEQ ID NO: 539 - DNA, 519 bp, Homo sapiens
  misc_feature (1)..(519): n=a,t,g or c
aaccacanaagagtagcagtccattttctggaagngcgcatgatattatgancaatacaaatgcattatttttatcattaatagtntaatcattaattatcncanaagtcaatgcagagagtgaaattantntgaattaaacttcngttcanaatgtacagtattttgcatatgtngactttacttaatngtncattnttgtttccaaagttaangttaaatacctggtgcataggttgttgtcaagcaattactctcattgtcttgtcatacatgctaacattttgctaaatataaatctacaagtatcacagctgcatatatttctgaagtggttagaacagaggaggatgctggaaagttgagttctttaaaatcttcgttcaaaacaagagattttcatctatgtcctcttctttaattccaaagcagtggncccactccttcagggtgatgtgcttatccttnttggggtcacactccntcaaataaacgggttatgccagtgttccatgggcc

SEQ ID NO: 540 - DNA, 359 bp, Homo sapiens
  misc_feature (1)..(359): n=a,t,g or c
gaagcttttatcaactttaattgatataatnatnntnggtatgcantatgtcntgcaacaaatgtggatacaatgacatcanntatcaaagaattttcccacctttccatctttaaatgacttcagctaacttaccccaagagaaaaatctggcattgatctcttggttagcattattaccaatatcaactagcactattaaaatcaaagttgaaatggtacattcatttgccaaaaaaaaaaaaaagaaaaaaaaggcttaaaggcaaagaaggtgaatcaacgtgcaaattagcatctggcccaattgcaaaattcatttcctgggatgtgagggattgaaccatgcacacttggca

SEQ ID NO: 541 - DNA, 328 bp, Homo sapiens
  misc_feature (1)..(328): n=a,t,g or c
tttttttttttgtttaaaatcatttattattatcaggagtgccttttaggtggaccgctctgtatgactctcatgcttcaaaactattttttattcaagtgacttacaatggccctaggaaacaagttctgttattatcccccattttaaaatgatgaaaatggacaaagcaaaagcaagcaacttaaccaataccccatggcctcacagcctttagaatagtcatattatataaatatggcaataacaatgcnctgaaaatgtctccaaaacaaactctacattttaaaaaatgtataacaggaatctaaggaaggggtcttacttc

SEQ ID NO: 542 - DNA, 358 bp, Homo sapiens
tatctgctttttgctgctagtttcaaactgccagtatttttccttttgcttttaaaatagttacaatatttttcatgatagccacagtattgccacagtttattataataaagggtttttatttgatttagcgcattcaaagcttttttctatcacttttgtgttcagaatataacctttgtgtgcgtgtatgttgtgtgtgtgcatgtgtggcgtatatgtgtgttacaggttaatgccttcttggaattgtgttaatgttctcttggtttattatgccatcagaatggtaaatgagaacactacaactgtagtcagctcacaatttttaaataaaggataccacagtgcaaaaaaa

SEQ ID NO: 543 - DNA, 425 bp, Homo sapiens
ttttttttttttaaaagcaagaataatctttattccttggaaacacatttgtaaaaatgctatcaataagatgaaaagattcagaacacatttatttgtatgcagcacatacactgagcatcagaacgtctgctaaaatggaatacacctgtaaacaaatgccttagggagagtttataggtagtcagctccactgtgcaaggtatgcagctgataccttcttgctgaatagatttttgcagtagccaaaaaagatcagattttagtaataaaatatctcaaaggatgtcaaacattttttagagggcctaacatgggcaaaattacaattacatatacaaaaatggcacaagaatcaactgatttcacagaaatactaataaaacatttcagggtctattattaagagaaaaaaatgtttgact

SEQ ID NO: 544 - DNA, 430 bp, Homo sapiens
gaacaaacagcatgcactgtggtatcctttatttaaaaattgtgagctgactacagttgtagtgttctcatttaccattctgatggcataataaaccaagagaacattaacacaattccaagaaggcattaacctgtaacacacatatacgccacacatgcacacacacaacatacacgcacacaaaggttatattctgaacacaaaagtgatagaaaaaagctttgaatgcgctaaatcaaataaaaaccctttattataataaactgtggcaatactgtggctatcatgaaaaatattgtaactattttaaaagcaaaaggaaaaatactggcagtttgaaactagcagcaaaaagcagataaaaatagaatggaagataacataagactaatatcaaaattctaatgttgatactgtgtaggattgc

SEQ ID NO: 545 - DNA, 616 bp, Homo sapiens
  misc_feature (1)..(616): n=a,t,g or c
gatttccatgcactttaatgaggtccagcactcaggaggattagcgcccaccaccagctgcctgggcaggggagggccggagcaggtngcaggcgtcaggcttaggacagggaagggggctcaggatggggaagggtcctcaggacaggggaaggggctcagaagagagcagggggcttaggacaggaaggggcactcaggacggggcagggaaggtgtggggggcagtcgccacctgggtaggaagcagtggtgttttggacaggaggggctggctctccagtgacccaggtggacaccccaggcctgactcacggctttttggggacatagtggtggatccagtccaagtagtaggtgacacgggtgtagatgccaggccggttgggctgggcacagctncgntcccagctgaccacgcccgcctgtagccaggtgccattcaccttgcacaccaggggccctccagagttcgccctggcatgagtccctccggtgttcccggcacacagcatgtcgttcacggatgatgccgacgtcgtctcccgtgtaggcgccaaagtggtatttgcgtcacaaatgtggtttccattatggggaccttcactgcttcagg

SEQ ID NO: 546 - DNA, 428 bp, Homo sapiens
tttttttttttttttttttccgaaaacatcggatttattaggattagctgtagtgtacactgattcctttagctctaaatggatacatatgtgccccgcagacagtatacacgcagggatgtgactgagccacagtgacatagcaaacccaacagctggcttgtgaagccatcgtgatcccaacaaggtctatgttagcaattggtgaaagaagaagagagtgagatgggacccaggtgggcctggaggtgggatcctgtgggttttcagagcacccaccagtgctcccttggtgagcccagcaccacctggaagtggagggaagctgggtcgctgctggaagggagagaggctgactctctacccctcacctctgcaaggaactgaggcctgtagggttgcggctgtcactggctaacaggtctgtt

SEQ ID NO: 547 - DNA, 436 bp, Homo sapiens
aaaattagaaagtggtttatttgcaatttacatggattcctctactttgtgaggtttagtataattgaaatgtattgcaattttcaggaacattacctacaaattgatattaggtggtctacagcttgtaattgatgtgcttcatgataaagatggcagtaatgatgttttaaatattctagtgctcactggatttcatttttgcaggcaatttgcagctcctctgagtaaaacatttatattcaattacagagtctgataaataggattcccgccaccccaccccttctaatcactgcagagtattaataagtgctttcttatggctgatttcttgcagggagcaaagataagattatagccaaatttctttcaaaacctcagcagcatctccttctgggtagccatttagatattttcttccacctctttgact

SEQ ID NO: 548 - DNA, 454 bp, Homo sapiens
  misc_feature (1)..(454): n=a,t,g or c
tatatgggaacatactgtttattcaataagaaattaattttttatcgttggatttgaataaattttcttctcccaagcaatctgattggcagtacaccattgcagcatatactttattattatcatcattattattttccacaacatttaataccaagtttccttctctcacatagaatattacccaatagaagtctccaaaaggggccatagcacattcataacaaagatagaaaagaaaactttcaatgtctgctttccaatatgatgattcaactaaaacaaagctgaatttctcagctatgaaactgaaaaaatgaaaatcagcccatgtgtacatcacggccagccatgatcattaacacctccatgganatgaggggagaaaagagagaaacaactgcttccttcttacccaaacttctaatattagcttcaaattactttaaaaaaa

SEQ ID NO: 549 - DNA, 436 bp, Homo sapiens
tactttagtgttgatcagtttattagtatttttccaaacctgaagaatggtgaaagtttgtggtacagtgtggggaaaacagtaagtgtggctttgggcaagccacttcccttctatggctctcagttttcccatctgcacaatgagggggttggagtgtgtggtctctaaggcactgaatttcagtctgttctccatccatcagtggatatgtgagatgcaatgcaggggtgctggcctgtccctggtaatgagcgaggatatgagcaaagcagtgagtacagcctggaattccagctactcaggaggctgaggtacgagaatcactttgaacttgggaggctgaggtttcagtgagctgagatctggccactgcactccagcctgggcgacagagtgagactctgtctcaaaaaaaggattctacgactatgat

SEQ ID NO: 550 - DNA, 421 bp, Homo sapiens
ctcacatctttttaatcattcatattgacttaatcaggttgacaaaatctcagggttggtctgggatcattcacaaatcagaattactcagagaaattttcacagcagttgcagcagcacaaactctaacgctgatttaaattaataactgttattaatgaacaaacttgaaaaaggaatttcatatagaacattacatttctccctgacactaccgtatcataaaaattaaaaatgatataaacatgttttaaagtcatagtggtagaaccagccacactacagtgcggcattgttagaagttcgctctcaagttgactcagcttagtaaagcaaattgttctctgagatttcagctttggttagtcctctttggctgacatgaacattatggagtgttaactggtggtagcaacacata

SEQ ID NO: 551 - DNA, 427 bp, Homo sapiens
tttaacaagccaaagttgtatttttttaaacaggaaaattatgtcaatataaaacagataaaaagacaaaaatcaaaacacacaacacagaaaagcacaacactcaagaccagtgcaaacccttcccaacccacttcccaggttttaaaaccttgattacagatccccaaggattagactgtatcggagaggtcacagtattgaatcagaaaaagaagacatgttttaaaaggtctgtacacaggtagtggtgtgtggggtgggggatgtacacttcatcactccaacatcaaaaaacatgatgcaaaaaggatttcagcgatgaccacagatttctagaaccctaccacgtatgctagcccccctccccatccacttttaaaagttgcttttaaaaaggataaaaagtgcacagacactttcgtaa

SEQ ID NO: 552 - DNA, 391 bp, Homo sapiens
tttttttttttttcaagtaaaaacttaaaacgtttatttctggtagaaatgataaatactttgcattaaaaatctggaattcaagttttcctcgtacttcatgctccctccctgccccagaaccttacaaaaatatttctgtctagagagggaaagagctggtgcctgctctggaggcaacgtccaggtccgggaaaggcactcgtggtctgtgatctgtctcagtgatgggaggtctccactcgccccacaggcagcctcggggccagagatgagaatatgctgtaatccagtacaggggctgcgtcgtgggtccccaacagctccttctttggggatagtgagcccctgttggggagtaggaagggactgaggggccgtcccctcgtgc

SEQ ID NO: 553 - DNA, 114 bp, Homo sapiens
gacaatactcaaagaatatttattgttgacgcttttttccttatatttaacattttgagataaaggctaaatgagtgtatttgtgtgcgtatacaagtacaatcaatgtagggg

SEQ ID NO: 554 - DNA, 325 bp, Homo sapiens
  misc_feature (1)..(325): n=a,t,g or c
gttcctaacacaaatgtgaatttattggttgatttgatatttaaaatagtacttttacaaaatcatctcagaaaatatactacatttattaaaattcctacaaaccattgcagaaaatattaaaccctctaaccaacctaacactcgctttcnnnggnccctggtgatgattttcacagcttccatagttgcaaagaacaaagaaatcatcttccaacaggggtggaattagataagaataatccaaaanatatttatttctttacagactcacagattgcttggatgtttaggggctcttaccctaggataccctaattattca

SEQ ID NO: 555 - DNA, 579 bp, Homo sapiens
  misc_feature (1)..(579): n=a,t,g or c
ctgtcacccaggctagagtgcagtggcatgaccttggcttactgcaacctccgcctcctgggttcaagcgattccagaagagagaattcttagagtcagagggaggagtagaaggaaaaagatatttaaaaagctatgcttcaagaggacatttcatgctgtcaaaatgagactgtgaatcagaaagttctcggggaactgcaaggtgctctcaactaggggtcggttccttctcagtcatggcactgactcatctccacagggttctcacctgcgggaggaaaatggaggagttgcgcctgtcagaaactgtctgtgtgattcggggaagaatatggagtatcttagtagcattccattattacttgcccctaaatacatgatgccagccccctgcacagataacctcctggcttttatagctgaaatatatttgatctaaaccacgatttgacatctcagagagagagaagtagataaaagtctccattccaggttggcagtagggatcctgcagaagtggctgaaatgaatttgggccaacagagaataagttctacagtcatttgttcngccaat

SEQ ID NO: 556 - DNA, 379 bp, Homo sapiens; identical to SEQ ID NO: 18

SEQ ID NO: 557 - DNA, 427 bp, Homo sapiens
  misc_feature (1)..(427): n=a,t,g or c
tttttttttttcntcccttgnacnataaatttttattggcaggtcagganaagagcngggggtaagggtcccttccttnccatccctctacncanaagacaccctccanagganagnagaagccccagagcctgctgcctcagaggaccttggaggcagacaaattgttgtagtgatcttcctgtccctcgagcaggctgcggttaggtggcaatctcctgctccagccgcgacttgatgtccatgagccgctggtactcctgattctgccgctcactatcagctcgcacatcgcccagctgggttcaataccgctgatcagcgcctggatatgcgccagtgggctccaaagcgcgcctccgtttctgccagtgtgtcttccaaggcagctttcatgctcagctgntgactgcagctcaatctcaag

SEQ ID NO: 558 - DNA, 424 bp, Homo sapiens
ggcagctcactccaggtttatttcagggcagtttgggggtgggggacaaagacccccctccagctcctaaactgggtcacttttctcccaggtgaaggggaccatcctcatgggatcctatcgatgtgagagctttgtgtccaccaggtgtggctgggtgcaccaaggtgaagggtttgagggctgcacagggacccccagcactgggagtttggcctcctccctcagactggatggtttcccagggttggaaaggggcaggtctcccctctcagcttgggacttctcagagggaggagctgagtgtctcctccctcagacccgcagcccctcaaggtgctgcgatctgtgccaccctctttgaccggtccctctgccctcagactagcggaacaaaattacacctgaaagtggaggagcgggt

SEQ ID NO: 559 - DNA, 432 bp, Homo sapiens
acattgtaacaggtttatgcattttgaagtgccttctacacatccacccagaggctctgctgatttcacttatgcccaggctataaaatgcctttctctcatcccccagtagagcactgggatcaccactaggcctagggggcatatcaagggtttaatagactgggggaatgggcaacagaactggctaccttagaggctctggaatgccccccacccatccacccaccaatggaaggaaagtcaggcatcgctaaaaggagtggtccctatctagccccaagtctggagcagaaagggcaggtccattctggcccaagtgacattgttaagatcctgtcccctcccccaatcactgctgcttgccagggtgcctcttcacagttcccatgtggcagcagtagtggcagaggcagaagtggacttattgta

SEQ ID NO: 560 - DNA, 411 bp, Homo sapiens
  misc_feature (1)..(411): n=a,t,g or c
gagagtctcactttggaatcagaattggaatcacattctgtttatcaagccataatgtaaggacagaataatacaatattaagtccaaatccaacctcctgtcagtggagcagttatgttttatactctacagattttacaaataatgaggctgttccttgaaaatgtgttgttgctgtgtcctggaggagacatgagttccgagatgacccaatctgcctttgaatctggaggaaataggcagaaacaaaatgactgtagaacttattctctgtaggccaaatttcatttcagccacttctgcaggatccctactgccaacctggaatggagacttttatctacttctctctctctgaagatgtcaaatcgtggtttagatcaaatatatttcaagctatnagagcngga

SEQ ID NO: 561 - DNA, 374 bp, Homo sapiens
  misc_feature (1)..(374): n=a,t,g or c
ttaagacaaacataacctttattctctctcaaaaacccagagaacagggcctggaaccatattcgttaatttaaccagaatcagaatactttaactttcatagtctcatttaaaattttatagcaatatactgaccattctaaaaataacaaaatacatgttgctctcaactacatagttaaaaaaggtagtaaattctcttacccaaaatagaggaggggtgggctagtgagctgctcaaacatttgtaacaaataaaaatgtatctatatacatataatgatcatgttttcatagcctaaaatcaccattaacaaaatctaataataaaattgtgtcgtgttcaggagttgggaagccaacacattaaattn

SEQ ID NO: 562 - DNA, 479 bp, Homo sapiens
  misc_feature (1)..(479): n=a,t,g or c
atcatcataaaaaatatttattataaaaaattatcacatttctctgtacatagcataaagacaaaaacacaatgtatacattaataaattaagtgggcctgagtattcagtatccatctactagaatcctaaagctcttccccagatttcacaaaggccaatgtagattatttctattttatcaaagttcatttgcacagttggtgtaattgagatactaacatttcttttttctagtgttttaaagatagttcacagtatttgagttaattaattaatcaactgatttaaatctttggtaaatacaagtatttacatgtaaaaatgtttagctcaaatttcagtaaaaaactggaaatgaccaataacctactgccaactgttttggtataatccagaaatgcatgagccggactcccaccattaagaaatggcactgtcnaggacctcngatgataaaactggaatccncaaaaaat

SEQ ID NO: 563 - DNA, 156 bp, Homo sapiens
tttttttttgcaaattttaacacaagattttattaaagacgggcaaattggtgaggcatacctgaatttctggagatatacaaatgcgtgaggctggcatcatatgcaaatgtggctttacaaattggttttattttctagctgtatttaaagagg

SEQ ID NO: 564 - DNA, 108 bp, Homo sapiens
tttttttttttttactttttaagcttttttattcttgaaaagttcaaagatatacaaagatagactatgcaggataatgagcccccacatactccgcatctcttgtct

SEQ ID NO: 565 - DNA, 213 bp, Homo sapiens
tggacatctcagatgtgactcttgctgccaggctagaatttaggctatgtgataattctcagctgtcctacaatgcctgcttcttgaaagaagtcggcactttctagaatagctaaataacctgggcttattttaaagaactatttgtagctcagattggttttcctatggctaaaataagtgcttcttgtgaaaattaaataaaacagttaa

SEQ ID NO: 566 - DNA, 559 bp, Homo sapiens
  misc_feature (1)..(559): n=a,t,g or c
tacaatgtgcattttattccatatcattatncaatgtttacatatagttaanactctcaaganaacgtcctttaccagttgtatgtggtgtctaaatctttaacatgaaggactgaaaagggtggaaatccacactgattgttatcctacagattgtcatgagctgcacgtgtncaatcaganaggaatggaagtctcagaagagcagcgtggcttacagacccttggctttagtgaattcaggcatgcgggatccatagtctcatcttgtaggtaaaactcaagacaaanataanttanntgttggacagagttcntacattggtacaatgnttnaacaaaaagacccacaggggganccttttngttcaaagtnggcnccaattccacacctgattgtggtntccaacattnaaccttcctgtttgnctccancattgggcccttttgaaagggaacttctcctgcnttagntgagggattcccangntnantaagcccactggtngtttgctaaanncncctacaangtnttggcggcatnaacccgggaaantgg

SEQ ID NO: 567 - DNA, 433 bp, Homo sapiens
ttttaaaaacaaagccatgaaaaagattccactttattttatttattattgttattgttatttttacaaacaatagatttgctgcaacatgctctggctcatattattgaattaaaaaatttaacacatttcaaaaatatcaaaaatacactataatgagtcttaagactacaatacgacaatgattgcacaaaaccgtaagatatgagcccactgtctggatgacatccattggcaacagtgagagaaaaccctatagcatctgggagaagtgcatgaaatttagaatacaaggaacttatgtgtgactgactgatcaccaaatgaggcaaacagagcaggattgactgtagctgctttttctcaatctaggaagtgcttaccccaactatggggcaaaagtcactaactgggaaagattaacttgccttca

SEQ ID NO: 568 - DNA, 394 bp, Homo sapiens
ttagcatagtcatcttagctttattgagtaaggcatcccaatctctgctaagattcttctaaatgaacggctgatttttctgccaaactatgcattggtcaaagagaaatcaccacctggccaccccattctgtccccctacaggacactaagggttcttacagataaagggacgatgcattcatgcctggagaactaatcacacctgatttctctgggatctaaaataatgtcaaatttgattcactttatgtaaagaaaatcttttttttctgcaaaccccttcagaacaatgctgccatccatgcaagatgtgtgtaaggccacctctgtatactaagaatggtgccccagcaggtggaaggatggcacacctgctgagcgtgggcacacg

SEQ ID NO: 569 - DNA, 325 bp, Homo sapiens
gaggtggaatgcgtgtgtttatgtaggtagaaaaagtgcacagaacagtgagggtgcagggagcaaggacgtcctggcctggcctccgattcgctggaattgcaaggaccctcccccagtaagggggctccctcaagggtgggaatagagtggaggcccgcacgggagttcttgtctgtgtgcaatccactttgtgggcgtgtgggtttaggtctggctgggccgtttctgaacttgacccctgagaactcatagtaccttaggggcggggctctccagtgggtggggcctcccgctctgagagcaaggcctcggggtctggagg

SEQ ID NO: 570 - DNA, 498 bp, Homo sapiens
gaagcagttctctttataaagtgttattttgatagtttgtggattctaaaatatatatatatttatataaacaccatataagtcaaatatgtatttaacaaagcaatatgtattcattcactttcaagatttgttttggtgtcaaaataacatgaaaaggtagatggagttgcttctgttgaattagctctgccaccaatatgtatcttcatacacgtttggaaatgtttcctgcagcattaggtatgacttgttctgagtactgcttccggtgctaaaatgaacaaagaatttgtacttaatggcatggactctggagaatctatgcgaatcaacctttctaccttaatatctccccaaaaatgtatagtgccttgtttttatgtacagtttatatacagaaaagtttgctctgcatttttgatgtacagtttatatacagaaaagtttgctctgcatttttgatgatggtttggaacattatctacaattttactc

SEQ ID NO: 571 - DNA, 456 bp, Homo sapiens
aaatactttagaagatcatacttttcaaagattttactaaatcatttttttaaacaaaatatacattaaatctcagatttacagaatatagaaataatttatccaaagaaatttgcatttaaaattgttaatattgcacccaacagtatgtctttgacacatttgcattgtcaatctttcccacaatttgcaaaaacaggagagaaatctgaaactaacagaattacacaagctaagttttctgtaaaaaaagaaaaaacttacaattttttatttacaagttaaggaaaagttgtaaacgttcaggattttacttccacagaataaaaagccatacattcttttatcatacctagaaaatgaacatatacacattgtgattacctcataggaattcaacaggactgatattgtgaacattcacagcccaatggtaaaaaacagaattctcgaact

SEQ ID NO: 572 - DNA, 382 bp, Homo sapiens
acaatttaataatttattacattacagtggcatcacaccagcagtcaataaggccactctagggaaaaatctttcagtatttccatgacacattctgtttacaataattcataaactggtaaaattcattctaagaaaacttggcaaatgaaactttggactggaattggcatttctttctctgcttttcgttcccaccatttctttcttttatactacagtattcatattttaaaatgttttaaattatttcagaacattaagatagcagttacattttttaatagttatattattttaaaatgactctttaaaataaagttttagagaaactatattatggatagggctgatttacattttcaaattttctaaaatcagc

SEQ ID NO: 573 - DNA, 262 bp, Homo sapiens
gcagtttaaaatgatttaattgacaaattcttgtgatttacatttcagtaatcaactgcaaaagtgaggaagtaattcatgggcctgtagtgcttttgaaaataatatttatgactcataaaaatgtacattcataatagtatgacatggacatattttaagaaagttcaagcatatacaagcattgtttaatctcacaaaatatattaattatgttggtaatatgtgcattataaaagggtctttagtttaccaaagggtt

SEQ ID NO: 574 - DNA, 398 bp, Homo sapiens
ttttttttttcttatccattgaaggtactttaattttgcagttattgattaattaaaaaacacagttgttttcagcatttcctagctacagtagtgcataggaaattccattctaaacaaagaagtaattaatgaaataacaacacaccttaacattttacattgataggttacagtttacaaggtgctttcacatacattatttcatttgattcttacaacaagcagaaaaaacagtgggaaagattttttttttcaggcttacaatgagtattttcaggccaatgggcagttaacacaagaatataccaagaatgagacagcaatacccataagccacaatatcgtttttggtaggttgacagtttgattcaactgggtattcagcatcggtgagt

SEQ ID NO: 575 - DNA, 376 bp, Homo sapiens
gttggaagcagccgcccacacgctcctaactctgctgcatggcagatgcctaggtggaaatagcaaaaacaaggcccaggctggggcaggggcagtagtgtgaaggccctggattctcactcatgtgagatcttgaatctctttctttgttctgtttgtttagttagtatcatctggtaaaatagttaaaaaacaacaaaaaactctgtatctgtttctagcatgtgctgcattgactctattaatcacatttcaaattcaccctacattcctctcctcttcactagcctctctgaaggtgtcctggccagccctggagaagcactggtgtctgcagcacccctcagttcctgtgcctcagcccacaggccactgt

SEQ ID NO: 576 - DNA, 342 bp, Homo sapiens
aaaatttaagaaatctacctctttatttaacaccaaagctaacatcaagtgtttatttaaaaaaataatggcacctgctttggattcattgatgacaccacaatggggtgaagatctacagggaatttacaattttaggctgacatgaaactaagtagtaactcacaaaatggaaattctgcaacaagcctcacaataaacatttccagtttctactttcagagttgctaactactgcctaaacatatcttaaacacagagcacgttttgttgaaatatttctcttaggacaaacacagtagacatgctttaaataaattaaaattgcaacacataaatcat

SEQ ID NO: 577 - DNA, 302 bp, Homo sapiens
gactgaaaactactttatttgaagacattttcttctatagttctaaacacaaaaggaatgctgttatagtgggtatttcataggcattcttgtattcaaatgaatcacataatgtttacacttttaagctacacttgaaattgaagacttaatacaaccttttaacaaagaaagtatcagtcatatcaaaacataactattcattctacagattatcactttccctaaaatgactactagatatgaaaacattgcagggacagctcaagtgccccattcttaagggttttttttaataggaa

SEQ ID NO: 578 - DNA, 410 bp, Homo sapiens
cccagcttttcaaaagtttattttaagtttggagactagacaaggtcatactggttttacatcctacgtgatataagtatatatacaaagaaaaaaacaacattggaatattacacagcttgaaggtttgcaaaggttatttgtgtcttagttatttctgcacttaatgacacatcagacgcattgagtatatttcataagttgttgactagcaaagatacaatcattagtaacccaagtcttcaaaattcacaccaaactttatgaagtcattcagaaagagaaagtcaatcctaaaattaaaattggcaactatgataaataccttcaaaaggatgtagatgtaatggagatgtttaaaagtttagtttcattaattgtaaaattagcatgttatatttactcaatat

SEQ ID NO: 579 - DNA, 376 bp, Homo sapiens
cacgtgaaaaaaagttttatttagggagctccagggaatgcggtgggaaaggagaggtgcagtgtcattgccgccctctcctcccacctagtgcattaatagtggatgggagcatctgacagaagtgagatcaggcagtgggtgtctgcaccccacagcgcatgttggctggaacagcaaagtctatctgctgaggtttaggcaagttcaggttgcccatgattttgacaaactcctcacagctgagggtgagccgagggttcagagtcctctcctcctccacggtggacactgtgaacccatggtaatcgtgagcagggtagatcagacagtctcctggaagtgtgaagatcttttcatggaccgagtggtaaag

SEQ ID NO: 580 - DNA, 275 bp, Homo sapiens
accataaacaaataaaattctttatttaaatttctcttgtggggaaaatatttttctttaaagcacacttaaaagtaatttgcatttacttcctgtaaagcatttccatttcacaattagcaaaactaaaaggctatgtctcttcatgcatttatttttgttagaaaaatgtcccatggtgctatcaaaccgattttaaccatcatcaagcttaactttgcctctgttgacaacatgactacaaacatgaatcaaaaaggagttaaggaatttta

SEQ ID NO: 581 - DNA, 435 bp, Homo sapiens
aacgtcccaataaaagtttatttatggacactgaaatctgaatttcatataaatttcatgtcataagttttcttttttcctccaaccatttaaaaatgtaaacattagtcttagcttgcaggcagcacaaaagcgggtggtagaccaaatgtggacccagggtgtagtttgccaaacccttttattagatcaccaaagttacttttcttaaaataccttctatttttcacagaaggtataaatggtaaacaacatcttaaagcatcggtagtagtggataccttggacatcactgtcactctcttaccgggtttaattttgcatggctggtgtgggcgtaattgagtgtgcatgtagagcatctttataatattaccatcagcacatttggtacttgcacccttgtagttctaggaaaagtcctaaaaatctata

SEQ ID NO: 582 - DNA, 425 bp, Homo sapiens
tttttcttaaaaagaaatggtttaatttcatttttatctgggaaaaaaaccacaaatacgagtttaaaatgaaatgacaaatacattgacatgtcaagtgtcattttttatggtattatgcttattcaaggtgtgaagatacagaacctctttataaatttctggcatcaaagattcccaccgtagataaaaacaggttggttataaaatgtcaattcattaaatattcaatttttgttctttgtttttataaggaatattttgtagaaacagtataaaatagagtagacttttggaaattgaattataaaattttagaaaaaagtgttaagtcctaacttttctttgcgaaccaacaagagagtctagttttaccttggggagttacctgtgaagtgcattaggcggctagagctgtttcagag

SEQ ID NO: 583 - DNA, 392 bp, Homo sapiens
ctgttagagacattttatttagaggcaagaaatggttaataagatgagacccttgggtctaggagcgttttgctcttttgttttcttccgttagagtgacagattttttgctgttggtgaaggcccttgaagactgtagtttaaattcaactggaaagtggtcgctgacatccagggcctccttttcagtcagcttgtaagctttctggaagtcaaaaacactgtttgacttgggaacaacagaactgacgatttcttgtcctctaagcacaatcctgtcatatgcacagttggtgctcttcttcaccgtggtgtcctcttggtccccgatcagccaaacaaacctggggtcagtcctcaagcggatgttcttccaggccttcttggggacg

SEQ ID NO: 584 - DNA, 353 bp, Homo sapiens
catttttgttttctttttttgattgaggtaaataaaaaagctttatccagcaacacggagataagagtctgtccaacccgacaagttccagaccccaccctgccctcacatcaggctcttccggtactgactgtgcggggtggtctgtctgaggtgggagtccggggtctgcaggtccatctgtctgtacaggtctctcagctccctgacctcctgcagcaccctctttgcctggctccaattcgatgatgcctctcccagcagccgttccgtctccagcagcagctgctctgactcagaatccggcggagaccgaggggggtccttggcctttcgcttcccatctcccagtc

SEQ ID NO: 585 - DNA, 460 bp, Homo sapiens
gtcctatgtatcatcatttactctgggaatcctactgtgaaatcatgtctgtatttttctggagcagttcacatagagtagaatgtggaatttcccgtgaacgtctccttcctcccccgtatctgccgcctgtcacttcgccaccgtgctagaatactgttgtgttgtaagatgactaattttaaaagaacctgccctgaaaagttcttagaaacgcaatgaaagggaggaacttgtcctttacccagtttttcctttgtaggatgggaaagtataaaaaggcacagaaggttgtcatgggctgttccttgggggtttttatcctgctcaccgtggagataagcctgcgctatgtctaaccagcgcacgccaaaggtctcaatgccttttggtaacatccgtcattgcagaagaaagtttacacgacgtcaaaagtgacgttcatgctaagtgtttttcc

SEQ ID NO: 586 - DNA, 491 bp, Homo sapiens
tttttttgaaggacagggttacgagtttatttcttggtgcctccaagagctcatggaaaagcagcacagtgagcaacaagcaacagtggtcagtaaatgtatatgactcaacacattgccacagtctcagcttggctgtgtggtacatgctgccaagggtcgggtgccaagagagagcagaatgaagccaggtccccaaggaagtgagggcccaaaatagggagtgtgggtgatgagggtggagttcaaatccagatgtcagagctacaatcgcccccagggtagcggacgtcatgggcaagggctgggctaaggggctccttcccgaagtccaccaggaagttggggttcaacttcagccctccttttactgtgtctacatcaacctgcagcatcacagagccttccctgatgagatcagggtaaaactgcttgtcccaggcactgtacagcgacgtggtgatgtagaggcgcttcccatccaggctgag

SEQ ID NO: 587 - DNA, 257 bp, Homo sapiens
aaatgtaataagaagtttattggatttctaaatataataaagtagttgcaactcttttacagaaaaaagaaatataatttccatattcattcttatagagcattgaaaaaacataattggtagagaaaactgatagaaggtaaatagaaaaacaggttttaatatagtcagataatgcataaacacaaaagaaaatacctaaatcacttgcttataacagattttattctcttattttcatactgaactatgtgtgc

SEQ ID NO: 588 - DNA, 313 bp, Homo sapiens
  misc_feature (1)..(313): n=a,t,g or c
cgttaccatcgtccgtgcgcaccgcccggcgtccagatttggcaattnttcgctgaagtcatcatgagctttttccaactcctgatgaaaaggaaggaactcattcccttggtggtgttcatgactgtggcggcgggtggagcctcatctttcgctgtgtattctctttggaaaaccgatgtgatccttgatcgaaaaaaaaatccagaaccttgggaaactgtggaccctactgtacctcaaaagcttataacaatcaaccaacaatggaaacccattgaagagttgcaaaatgtccaaagggtgaccaaat

SEQ ID NO: 589 - DNA, 299 bp, Homo sapiens
  misc_feature (1)..(299): n=a,t,g or c
gcaggccaaaaccntagtttatttcagcatcagcagtatcttagccatcaaaaaaataaactntaccaagggtgacggaagtntctacagcaaggntaagggctcgccagacggcgaacatcaggggtgcatggtgggcactgcccaggcaataagtnaggaagcagcagggctggtntcgggtgtgggccgggcttnatttctgggcaggcatgaggtcgtcgatggcctggccctgctccagccgctgctccatctcgatgagcagcttcactccgtccaccaccatcttgcaccag

SEQ ID NO: 590 - DNA, 413 bp, Homo sapiens
  misc_feature (1)..(413): n=a,t,g or c
attttaaggactataaagagtttgatttaaaattatgcagggcccctatgtgggattttttaaaaagcaaactggtgtgtattctcatgtggtttgcacagcccagcctcacagcactattgtaaaccctgctctttctgtctcgctagacagatttttttgtttgttttcttttttctggttgttttttgttgttgttgttgttgttttacagctgaaaccaaccagcaagcccttgatgaccaagaggcgtttctttcaaagctatagggcacaaacaattgaccatagatgactccgtttgcattcttctgcagaattatttccttcagggacagattttccaacctaaggaactacctaccgngtgtattctctttgacgggggagagatgaacccttcagctggttag

SEQ ID NO: 591 - DNA, 174 bp, Homo sapiens
tttttttttaatataaaaagatcaatgaaaaatttatttataaatttttcacgctgggctacaggtcaatatcgtacactcaggaatgtgctgcacaaactttatccagttagcagtgatcaccccgtgacccacacacagcttcgatataagcctagaaagtcttaacattaa

SEQ ID NO: 592 - DNA, 286 bp, Homo sapiens
ttcttttttcagtttaattccatttattattctttaaggatacatacatggagataaagtgatgaaagagaagaaggctatggtcaacacaaagttcagtacaggggttccctctatcagacagggatagagataggttcagcaaaccgcacacggtacctcaggggaaaggcaataaggtgggtggtaggcacacaggggtttgtttattgtcattattattactctttatactttagcatatatattatatgtgtatatacatatctatattccattgcatgta

SEQ ID NO: 593 - DNA, 340 bp, Homo sapiens
tttgtttaaaatcaaatctttattcaaaagatagtcaaggctgacaacttatgcagtctgtgacaaagagcaagtcaagccaaggaaaaagctctcacaaagaacgtagctctgttctcttaaaatgtgtaactgttttcctggtagagcaaaatttcttgaaaggggcccagttgcgactttaagcagcgtttaaacagcctgcctccgtgtccagcatttaaatcagcacaagagaatcggctgcctgtgggcctgcctgagcctcagcctagcttggagtctgaggctccaaggaggcctgtgtgtataagccatcccatggtcaccctcctggaca

SEQ ID NO: 594 - DNA, 404 bp, Homo sapiens
ttttttagggagagtaaagttattttattaaatcatgcacgtcacgtgtgttagtgcaaatagtttaatctgtactccagaaattctattgtactttatatctttacaaaatagatttaaaacaattatttactttaaaaaatgtaattctgaagttaagcatttcagaacaatatttgcaataacctatatacaagaggtactgggtacactggcatattagcattctgtggtggagtggcttcctgcaacagaaaatgatgaaatgaactatatgacagtattttctacaagtcatttgtgactaattcctccataaatctagtgatcttcccaaaagcaatctcaaatagcttaaaatataacctttaaagtataaacagtgactgccaaacatcacaagg

SEQ ID NO: 595 - DNA, 345 bp, Homo sapiens
gtgattccaaaatagagatttatttattaaggattatttagtttctgcataaaaatctccaattgttcctcattgggttttttcttttaaaacacacatcaactcttttggggttgctttgtttgccccagcactttaaaaaatacagctctttttagcgccaggaagaacagttaaggttaaggcagtgaggcgttttcttggatcttagcagctgaagggttcatctctccccgtcaagagaatacacacggtaggtagtttcttaggttggaaaatctgtccctgaaggaaataattctgcagaagaatgcaaacggagtcatctatggtcaattgtttgtg

SEQ ID NO: 596 - DNA, 491 bp, Homo sapiens
  misc_feature (1)..(491): n=a,t,g or c
tttggagtccaagtctcttatctttattttaacagactggcagcatcaggtcgcagcagcagtacagggttcctggctgggcagcacaggcctggggcgacagtccatgtcttgtctgcccagggcagtgtcaacttaggcctctactccatggctgtgaaaggacagcagcctcaaggcagtctagctcctgggcacaggcagccaaaccccctcccatatccagctaaaccagctccaggaaaggagaaggtcctgtttccccggcatccttggggcccagggactggttctttcaccggatgatcttgcctggttgaaccacagcagcatttgggctttttcatcctttcctacatcaagaactttcccaaatgtgggccctgggcgtaaggcaaaacagtggccttggccaaggctctgggcctctgggagggtcccatctggcatcaggtggcgnacaaacagggtgtcagcacggagagagctgg

SEQ ID NO: 597 - DNA, 488 bp, Homo sapiens
ttttttgcgtttaacatttttatttttaactccgctttggtagtacaaaagtcataaaagtacaaaccagacagttaaaaatacacttgacactcgaaatggtgaaaattttccttacaaatttttacatcaaggtagtagccaactcattgatgacaccaaaaagttgtccatcattagtgttttctagagaaagtctgttgtggattccctcatccttagaaaggaggaggagaaacacaagacctgtaaacatcagttgctttgggaacacaggaattctcatcagatagttcagtataaaccagtaaaaagcgtatgtgttgaaaatactgaacgcttaattttggcaaatttggaagcctgccagacaaaaaccgctcaagtatttattagaaaatatttaaaacatactcttggtatcaatacagttttaaatatttttgagtattctcttgcctgttgtattgctatttaaaaaaaagtgc

SEQ ID NO: 598 - DNA, 412 bp, Homo sapiens
tttttttttttggagaaaacagaacacccccaaaacatttattttttttttagaaaatcatggctcactatggtagtatacaatattgttttcacacatgtacacttgaaaccaaatttctaaaacttgtttttcttaaaaaatagttgttgtaacattaaaccataacctaatcagtgtgttcactatgcttccacactagccagtcttctcacacttcttctggtttcaagtctcaaggcctgacagacagaagggcttggagattttttttctttacaattcagtcttcagcaacttgagagctttcttcatgttgtcaagcaacagagctgtatctgcaggttcgtaagcatagagacgatttgaatatcttccagtgatatcggctctaactgtcagagatgggtca

SEQ ID NO: 599 - DNA, 366 bp, Homo sapiens
taggaagggattccttggggaccactggatgctggtagttaaatgccaggagctgaatggacctgaagatggaggagactctgcagtcttggtcagccacccttggggcattgccaccttgcactctagcaggattgatggtctctggatttgtagctgtgaccggtcatggtggaatgctcggtggtttgcactggagaggcccacatggtggcgactgaggccctgtgggttgaggttggctcatgatagctctgaaagttgatggcacaattgagacaaggacgtggagttctggaactttcccagggtccttgcagcccgagatgaagccctccaacattgcagctcactgctgtgaaggct

SEQ ID NO: 600 - DNA, 418 bp, Homo sapiens
tttttcttccataattctttattaaatatttgacaagttgcatcgcttctttacaatgacttcattttgtcacattagtcttttgctgtcaggaaaacaatctacagtttctctttagatctctcaagaaaaaagaaaagcgaaaggattgttcttcaagaaaacttcctgtgtgtatcaaattcaaccatattttaaagctattctgactgtgaaaatgagcattattcataagttgccttaaaaaaattcaaggtagtttggtttttaccactgtatcaaatagtacttggcttcctattaggaggtgggtttataataaaaagttatgaaacattgataatttatttggaatgcttgaaactcttttcaccttaaaagtcactgtttttttcatgtttcatttgatgatagatcc

SEQ ID NO: 601 - DNA, 412 bp, Homo sapiens
ttttttttaactaataacttcaatttttaataatggaaacaattttgccattctagaaactattttaggggagaaaaatcttccctacaaaaataaacttaaacccatcaaaattataaatattataactttttacttctgccatttaaaatgctctcctgcaataccaccccttcatttaacatccttcctgtaccatcacatattgaagagaaaacagtattacagcaaagcttagatagtttaacataatgatttgtacaatgattcttaaaaaatctttggccttagtggccttttttcttcacttacacattaaaaatgctgctgcagtaaccagtgtttgggaaaggacatcagtcttcaagaaccataaactgacagaatttcaatacagtaggtttccaaattg

SEQ ID NO: 602 - DNA, 309 bp, Homo sapiens
tttttttttttttttttttttttttttcattattggtagctttattaaatttgtttaccttctaaaaaaaacgattacaaaaaagaatacttcatttaagtgtaatactggctttatggacgtaccgtgatcagaaagtgaaattaaagctcatggatatgcgtgagaagagaatgggcgcagaggcacgagtccagtatcccacggagagaaggaagtgtagagagatgcgtggacccatctcaggggtcacgcattcctgggccaaggagttgcttctaagagcttaaaataaatgcactggctggc

SEQ ID NO: 603 - DNA, 404 bp, Homo sapiens
acatttcaaatatattttattactttccatcttagaaagaatatgaaacctgcatgcaatgctaatggtttctgacatgtacatagcatataacacagcagtacaatgcggcatatactggggggcagtgtgtggagggggcgttcttaagggtatatgtacagaggaaagggcgcatggtcatcttagctttcgaaagaggactgcactgtttaacattgaagaattacatggggaatcacaaatatattgctttagtactgcatgttctgttgtggtgagggaaagaaacatgctttgaaggttttcccttgtcaacagaatgtgtgtctgtagctgtgtattgcgcatgtattcatatatttttaagttttctcctaaggtttttgctgacagtgttggga

SEQ ID NO: 604 - DNA, 566 bp, Homo sapiens
tttgtttaaatgaaaaaaagaaaactgaatatctccattaagaaggcaaaaaagtgccaggcacgttagcacacacctgtggttccagctactcaggaagctgaggcaggaggattgcttgagcccaggagtttgagaccagcctgggcaacatagtgaaaccctgtctctaagggtgaaaagaaagaaagaaagaaggcaaaatattagcacagattcattgtagagaaaatgttatgtatcctcacagactggagccacatacaaagagataagtagccttctttcccatgcttccagataaccaggatgcatctaaggtaagaggttggaggaaagaagacacattgctctgattccaagggtagagggaataatgaccagatttcaaccctaagatagaacccaaatacttgggaggcttgtggttctttcttcttaatggttgataacacagtgtccctacagagaggtcatctgaaactcagaggcaaataactcatcaggggcagcaacactggcaacctaacttagaagccccgtgtggccccttttttatttggagt

SEQ ID NO: 605 - DNA, 432 bp, Homo sapiens
tttttttttttttttttttgaaaatggtgaagtcatttttatttcagtacttgacaaaataccccataaaattcaaaacttctaccattatacaaaaataggtctctacaagtgatattatctgtcttcatcaccagtagaatatattaggcaaaacatgtaacttcagtagccttataagaaaagtgcaggacacctcgagctacacattcagcagtattgtaatgcgtaaaagtttaatcttttcacccatttgataaatacacaaggtttataatttaatgttttaaattagcattccacaaatatacaggtaattcaataattattgtgcatgaatacatacacaatgcttatatatacaaattccagtttgttttcatgtgctggcaagggatttgtatacaatcataagctgtgttcatattggtc

SEQ ID NO: 606 - DNA, 281 bp, Homo sapiens
tgttgtgtataaatactatgctttaatgagccccttaaatagaaattccactacaaaaatacagaggagatagggtgtttcctgtatccgcctcattcccatagaaaactataagggaagaaatagaacttggaattaaagcagcagcaaggcgaggtgagaatgcgatttctaggccatcttgttgggactgatgaacagcatctctgatctcatgatttaacatctggttatccagaagggatgggattggcctaaaaaaaccgatcaatttctggatt

SEQ ID NO: 607 - DNA, 263 bp, Homo sapiens
cgggcccaaactcgtgttatattatcgaggtggaaaacagccatatgtattaggaggggaaactgaggcagaccacaggacggggctccagagggaggacaactaggcccagaaccccttctggaggctcagagatgccagtgttccaggaggtctcacagcatgaaaggggcctgactacattcgcttttagcagtcggaatggcggatggtcaggcggtggctggaatcacatttacatccttcaaatcagcatcctgggc

SEQ ID NO: 608 - DNA, 424 bp, Homo sapiens
ttttttaacagtggtaaacagtttttattcaggcaatgaaacatggaaaaaatatattagtaatcattataataatttgtgagtataacttttacaaatagttacttgacatataaaaagggaaattactgtgcatataaaatttatgtagatgaatattccacacaacacaatcctgatagcagtagtcaacgcagcactcatccctccagatgaggggctcctcacacacttcatggcacccgtgggaacacagtggaagcagatgtgcaatgaacatttacttggcacattagtataatgggtatctattggcaaacacacacttgctaacagcaatactgaaaagtttactgctacctctgagatttaaaagaaatgcctggatcctatcccgacggctgagaaggaccgaggctgaggc

SEQ ID NO: 609 - DNA, 400 bp, Homo sapiens
tttttttgataggcaaaagcttttaattgtatagattaaaataactttggacaaaaattaaaactcaggcagagaatgttttttttttcaacaacacaaactagcaaaaacaaaggcacagtaaacattgaggcagaaagtttccagcgtagagatatgaatataataatagacacaggcagggatgattaataaatgataaaatgtttacaggatgatcatcggaatacaggacatttctacttttgaaaaccaccctcccaaatacttcattataagtaaggtgtctctaaaagggacagatctcctagacccctccttaaccaagtaaccagtcctgatatcatgataatgctgatggacaaactagaccttctctgcccgcagatggcctaaggtt

SEQ ID NO: 610 - DNA, 441 bp, Homo sapiens
ttttttttttttttttttgtgctttaaatatatttttatttgtttttctttatattaatttttttctcccatagaggaatagcattacagtctaacaatcagaattctgttacacacatacacaggcatgccacatgacccagttgaggtggttgtctccttgagtctgttgacacgtcacatggtcaaagtctcctcatttcagccagtctcaacacaaaacacccaacagggatgcactcaacttgttggttccatgtggaactaggtggcagggcgagagggaaagtagtagaagggggctatggtgtgtctgcattcagtcccctcacataaagccacatggatctaggggggtatccaagagctctggtggggtccgtgttgcacctaagacattataggtcagagcaagttgctcagagggttccaggcaggggg

SEQ ID NO: 611 - DNA, 406 bp, Homo sapiens
tttttttttcggcatcttatttggttgtttttattgttctgtggcctcctcccacctgctaacatttaggcctcagcacatccggtggctacaactaggaatcacacattagtaagcaagttcatttccatttcctgaaggatgaatttatcttgggaacatttgagatgggtacatacctcccagagccagacttgggaggaatctgtcaaaaatatcaagatgctgagccttgtcttagaaaggggcttcagaaatgctttcatgggcggcggcttcttcccggggtaaaggtctcgtggagctgcagggccttgctcccaggatggtaaaacagggacccagagctgttaagtggctcccacaaagtcacccaaccaggctgggccaaactgggtttgatggc

SEQ ID NO: 612 - DNA, 305 bp, Homo sapiens
ttttataaatatgtaactgtatttttcttcctgtccagaaactgttattgaataaaattcaggtatattcctccaaaacccacacagttcagagattttcaaacaccaggtttccatttgtattaaaatgggcaagataatgaaggcacaggctcactttgtatcaataaaggacatcaaacacagtcatgaggcactaatgacataagcaatcacaaaaagcaagtgttcaaagtcttcagtaactcttctccctttaacatttggcaaaactcagtccagatattttaatacctcagaaagaa

SEQ ID NO: 613 - DNA, 284 bp, Homo sapiens
tttttattatatagaatttgtacaatatatttcttttcgtttgcatattttacccacagcttaacatcctttttacaggctgaactcactcaggctgatagaatcaaaattctttcaaccaaataagaaaaattcaaaatcgtaaacccgtaagaaaacaaattaaaaacggtgatgaaaatacgtcactcctctcgttaggaacagtgtctgtttgtacaacaggtatgctctggaacaggatttctttacagcgtaggcacgtgtttccacctttgctctgc

SEQ ID NO: 614 - DNA, 430 bp, Homo sapiens
ttttgcgatttttcttttttaatgatcaccatgaaatccactgggccaggccctggtgttctgctgccatagtcagagtcagagtggagggatgaccccaggaggggacaagaagccaagactgggctggggagccgagaaggagatagataagggggagagggtgcagtggggcaggcagaggaggaagtctggagccctggataacaacacagatataaggtgaaggcctccctctgccaccccagccctgagccacagacgttgaggtgcaagaagatggggattttggccacaactcctttcccatgtcaaagggaagacactgagagcagacaaaggccaagtgcccaggggcacaagaacaagttaacaagtaaaacaattagggacaccacctcctttccccagcccatttttcacatttaca

SEQ ID NO: 615 - DNA, 318 bp, Homo sapiens
ggttactcattacacatttattgtacattttcacaatctggatgcgccacagaatttggggcatggggtggtggttgaggcgggcaggggacactgggataatatggggggtctaaaacacagcacccccacctccagcatctctcctaccctttcacaccacagcttagatatccctgctccccctccacacagaaaaccagaagtgtggggggaagaagctttgtggggccccctcgccgtggcagggttaaagggactggtaccctacaaaccctgtaaatattgtgtccatcttaaaaaggacaaataagaccc

SEQ ID NO: 616 - DNA, 400 bp, Homo sapiens; identical to SEQ ID NO: 55

SEQ ID NO: 617 - DNA, 364 bp, Homo sapiens
caattttaaaatgatctctttttaatttcttaaaaagcacattcacagcacactccaagaatgccacacagcagtggtttgctgctctttgtcagaatatgtcagaaaacaaaacaaaaaaagttttaaatgctaaagattttaaaaattagttctctgaaatttctgtaaagccagtatcaccagtcatataaatctttattttggaatcataaacctttcaaaaatgtaatgagcatctacccaaaattacacctctctgaaatgtaattaaaagctatccagcaaaaacaaaaataaatatttttctagaaagaacatatttggcattttaaaataatgttaaaaacagctttctcaaatg

SEQ ID NO: 618 - DNA, 402 bp, Homo sapiens
tttgcatttaggaacaaaatttattccaatttaaaacagagttcatttcaggagaaagatatgaaaagtcgacttccatcggtgtctggattaagggtcagggccggtggctgtgggaggtgacactgagccgctcctcagcccctcctcccatccccaacgcgcacaacacatgcatttcaaatggtaaaaggcttaaaaacagcttgtatagaatattcttttttaaatagattaaggttgaaattgtctgaaatcaggactgtgtaatatacaagtatcactgggtcccgtccaccaggccggccacaggatctgctgccaccactgggggacattggcacggggatgcctccctgggggagccgggggacccagggcatgggtttgcagtggccgggg

SEQ ID NO: 619 - DNA, 129 bp, Homo sapiens
gcaatattcaaaatctaaacacactgataaattattaagattaagattatttatgtgataaatgaaatctcctaccaatccatccagcctttaccagggaagaaaagcaattatttcatttcagataga

SEQ ID NO: 620 - DNA, 419 bp, Homo sapiens
tttgttgatggagaatgttttatttatgtaattttcatctgtagagatgcttctgtcctcatctttatatttgtctccctcttctcattgaactgcaaaattcctgaaggatgagacctgggatgtttaatgcaaactgtacattctcagcagagcacaagtatcaaagggacattggatatattttaataatgatctaacacaagcaaaaataaccactgaaaatataaaactcaacaagagacataagaaaaaagcagacagaaaacaaaaaaaattcttattttagaatgatgctatatgtaacttgtaaaatatttaagtttttatacatgagattatattggtttccttatttaaagaaaaaaattacaattaagaatggaaattaaaatgtaaaaccaagataaatatttttg

SEQ ID NO: 621 - DNA, 427 bp, Homo sapiens
tttttttttttttttttaaatcatctttaatgtatttttaataatttttttgcctcatttaccagataaatcatctaaataaatagatgctatacagtctcttaccaatgtcagtacaaaaataaaaccgcgctctacatccactctgactctcccagcacacacacactcagcaaaggcatgtgcttggaatcaactcgtgcccccgacccctcccagatacattcatttagtctgaacaaagctcgaagctcattctgtgcaaaggaagcgctcttgtgctgagacctggtggccgcagctggccacttcgaaagcaaaagctaaaccacctcacagaagcacagcgcctgcccccagaacaaggggacaggaggagcttggcaacgaggtcatcacccgaacagcagtgacagtcctgcattcc

SEQ ID NO: 622 - DNA, 123 bp, Homo sapiens
gcttagagaaaatgttttattttcattagttgacaactagttgttcagttgaatggtaagtttcacactgcatcctaaaataagacagatactctgctggcaagtagaaaatagactaatttc

SEQ ID NO: 623 - DNA, 357 bp, Homo sapiens
taatatttgaaaataaaccaactttatttgaatcagtcaataccaatcaagactggaacacaaattggtaattggttcagattcatgaggaaaacactcagctgtatcttcattaaaaggcattttacatttattaaggcttgaaagcaagtcctgttattcatcaccatagttaaaggtctcgagaaaatcaagtaactatcatttggagtgtctttgtaaaatgaaacacttgttcttttacaaaagctaagcatcttttgttaagctagttaactccccagcttataaaataggacaacgaggtggccaggaaagtaagacaaattcaaacatcagctggataatttatatttt

SEQ ID NO: 624 - DNA, 302 bp, Homo sapiens
caaatatttaaatcatttattgccattaagttacagcatctcaatatatacactgcatggaaatacacaggtaacatttttaaacagtggggacaaaattttaagtacgtggccagctgttggttgtcttgtggtcattaaagacaatgttaagaatcaggagtacttaagtgctagtggttacaaattttgttctcttcagtttttcattaagtaaattctaatagatgatatacatattactgcagataaaaccatcatcagaaattattaaattaattgcatattttgagctactcttt

SEQ ID NO: 625 - DNA, 438 bp, Homo sapiens; identical to SEQ ID NO: 61

SEQ ID NO: 626 - DNA, 376 bp, Homo sapiens
ttttacttgatcattctttttatttttacaaagcatggcaaaatgaggaaaccactgacaggtgaagaatttgcacaatggaaaaccaccttgaccatctcatgactttatacaggaatcggaggtaagtgttcctttaaagtgattttgtcatgaaagagtcatctgaaatgactctcgtgatggaggaaaggaaagtaatgaaatcaacattcatggttatttaaaatgccttaaaagctaagcataatatacatagtaactccttttcctagtataaaaatagtgccagaaactatatttgttcaaatatattgaaaaggtataagaatacaaatagatattaacagtggctagtgatgcctcataaggtttt

SEQ ID NO: 627 - DNA, 493 bp, Homo sapiens
ttttttttttttttttttgttactaacgttttctatttattcattaataaaaagtgcatagtacaagccctttatcccaatccaagtactcagaaaaagattaacaacagaccctggatggcacagacataatttgtttggcgtgatttaaacatataaaatcagtaattaacatttagcatatcacacgaccacttttgcttttaacaaactaatcttcacacatggtaacaaatacctatgatttttcatttagaaatattataagaagactaaacttactattgcaacaacaaaaatttaacccattaaactagaaactctcttcatttttccttcttcaaattactgttttgtgtcttaaactgagttggtcaaatttgagcacataattcatgtagagtgacagactttcatttagagtgatagacttccaaggttcctttgaaaatttaagatactggtaattccataaacactcccacaccacata

SEQ ID NO: 628 - DNA, 396 bp, Homo sapiens
tttttttttttttttttttttcacaagttatattttattttaacacgagattaacatatagttacaaggtcaatacaagcctccagtggaagctctttatttggtttaattccatctccagagacaaacaggcaactctaggacctttacagtggcgatcggcctcacacagcaaaatgcctccaaagtttagaattagtgcaacacacatacgaacgttttaaaggtgctcaacatcaggttaaaatagaattctggacctttttaaaaagtttttggatgatataagcacaggaggcagagcacataagaaacatgaaaccaatatttctggaaaaacacttagcatgaacgtcactttttgacgtcgtgtaaactttcttctgcaatgacgga

SEQ ID NO: 629 - DNA, 336 bp, Homo sapiens
tttttttttttaatgtttgacttatcttttaatatttagataagagatgatacttaacattcacaagttactgtaaatgctggggaccataagcatggggcaggccacggtaaagatcattttgaatgggcaagtctttcaatttcccttacatcacaccaagcaggcaaagcctaaatacagggcaggacttgcctatgtgatgtaccattccagccctccttttcaaagaaaacttgagcagggaccctgggataccaccagcgatggtgggactcccttttgcaatccaaataagcacgatctaaatgagtccaggttggagcagataaggaa

SEQ ID NO: 630 - DNA, 438 bp, Homo sapiens
tttttttttttaagtgtgatccatttattattgctgccatttgtgggtacattctctcaattctccttaaatcccagtgatgcttttatacttgcaacacgtgtatccacctctagcttccctgtgcagaaatgtttggcattggaatgtgaggtatctctcaggaaacagagtggcaatgggtaggatgaaacctacccattgagagttcatgatattcattgtgaaataccactagatatagtccttcattttatttagagagcttgaagtttctgattttatgtagaacagaaaaagaaacacaaattatacaaaatttaagtgcaatcaaaaataaaaatatatgttaaataaacggttatggtacaaattttgcaaagccttcaggtgagccacaaataatcttggaaattattttaataaagtcattttggt

SEQ ID NO: 631 - DNA, 398 bp, Homo sapiens
tttttttttttatcagaaacgtgtattctttttcttttaatagtaaacctctttacaacaaatatagtgaaagagttttcaaacaaaactcataagaatctcgaggactttgtcttttcttattgtgtagaatactaagaaagcatcaccatacagcacgaaaagaaatattgaaaacaaatcaacagcctcacacttggactcgccctgccccaggacccaggaagagccccaggagtgtgggtgattgtcaggtgtgggggtggggcacctccatggcccatcctgcccctcccttcctcttcctcaccacctccctccctctggagaatggggaagaggagagaatccagattctccattccagcctccctccccccatacaaataccattcctt

SEQ ID NO: 632 - DNA, 387 bp, Homo sapiens
tttggtggcaatcacagtctttaatcattaattgtcatatttctgatttgttagcaagtgccagcttgtaggctggttgaagtacagaactcagaggaaaaaagaaattaaattttagctttctggagagcagcccctctctggcaccatcaaacacttctttgtttcccttcaacttggaactcttcaaacatcaggggttgtgagggtttggccattcttttatcttgggtccatgtgagtgacagaaatggtgcggcctgggaaagatctccctcctttacattttctcttctccctcctcctccttattctaaaactgtgcctccaacagaggggcaggggctcttgtagagagatccctggcccaggacaggagatgccaaa

SEQ ID NO: 633 - DNA, 331 bp, Homo sapiens
ggctgttatatagatatatatttaatataatatgtgtgattgtggttacagatacatatttggtgctttatttatccagaagcatgagtcacatagtacataaagtattgaatacaaaattctaaagataaacacaatttttcttgaatttaaaatatatgggataaatgcttacaaatggatttataaacctttcacttctacttcattctcctggctgtgtcttccgaagatgagttgctagttgcaacattaaaaaaaaatagctccttcaaatcctgacactatatgacataaaaagaacttttggcaaatatttattcagattgct

SEQ ID NO: 634 - DNA, 460 bp, Homo sapiens
tttttttttcagtgcatttgccatttttatttcgctatgcagaaacatacattcaccatgggctgtgatgcaggtgatcgtgtaatggagaatctctctttttgaaggctatttataactaacactaaatagttttaattacagtggaaattctgtacagtttaaggcttggctctgaactagaatgtaaatatggaccagatttgaaaataaaacactttcttttcaagtaaaagaagaaaaatcaattaaaaaatacacggcacggaaaaagtaactaagaaaacaaagccacaggaagcccagcagtttctcctgaagtgaaatttcataatattgtaaactaacaaaaatacaggttttcttcccaaaataatgacaatttaagctctctggattgaacacagaccaaagcaaacaacaaggaagaaatcgcattaatatgctaaaatcagtacta

SEQ ID NO: 635 - DNA, 521 bp, Homo sapiens
tcagagttttctttaactttatcatttataaagccatacaatgcattgcaaagaaacaaagcagctgtacaggagtggggacgcgtcagtgtacaatacattcatgtccaggataaggagcatacaccaggatttatacacggtggcagcggctataggcacgatgatacaaaatataaagtatatttccatctatataaatacacagctggggtggggaaggatgctgggtgatcttgtttcccccgcagagggcctgggaggcagggagggtggtgggaagggatttcttacatttgttctcaatgatgggtctgaagggaggagagaaatggggaaacacagcctgcacacactggatgtgctctcacacacacgcacaaacaaaacacagacacaggagagtttcaaacagcttaacactgattggaaaacaagcttggggacatccctctacagtaactccactgctggcaagagcccaggcgtgggatatgaacagaggtcctccaacattttgg

SEQ ID NO: 636 - DNA, 271 bp, Homo sapiens
tcacatgatagttttaatatttatttagcagaggggtaaattgaaacatcagttctctagaccagtcaggaaatgtatgctttgtgctttataagcttacattcaacatagatgacataagttaccatactcaaatgtaagatagggagaggtagaagaaatagctgagaacttgaaaagatgtactgttattgtcaacaaaccaatgtcttctcccttcataaaattgtgtttagggaatattaacaattaagcttgtatacaatagtaa

SEQ ID NO: 637 - DNA, 386 bp, Homo sapiens
tttccaaaagtgttcttttatttctagtaacatatattgtataaatactctattttatatgcacttccacaaaagcgatataatttaaaagtttttttcattagaaataaatgtataaaaataaatatgttattataggcatttattactaactatagtccttcttggaaggaacacccaaaccaatacttataaagtacatgtaatttatagtaacatattttactatatacatatggaaaaaatcatattctcacagaagagctgaacagacattcaccaggatacgactgttggacaagctgctggagatggacctgctacccctcagcagcctccccaccacaagacaagtgatctcaatgtccccaaacctgtgggaccct

SEQ ID NO: 638 - DNA, 386 bp, Homo sapiens
tttcaaagttaaaacacagttttatttactcatttataaatactgttgtgtttacaggcatcatatagaagtgaatattattattcccaaactttcaaacacagaatactcaaaactatataacaacaaccagtaaaacaaaaccattcatcttagggttgaaaggccactcaaaattgcataaaaatacattcagttcacaaagcaagtctggctgcttctccctaaacaaccccaaccccaccccatcccaggtgtatttacagtggactgaagttaatccatacaactcagctgaaaaacagttacatctggtgtgtgaaccttggtggaactagggtgaagggtggagtaaagacacaaaatgctaccactaaaatgggaga

SEQ ID NO: 639 - DNA, 471 bp, Homo sapiens
ttttttatttttttttttttttttttacttgaagtagattgtctgaataggcatcctcatctatatttacccaaaacctcgcttactgtcatgtgcactacaaattgcaatttggaaacctactgtattgaaattctgtcagtttatggttcttgaagactgatgtcctttcccaaacactggttactgcagcagcatttttaatgtgtaagtgaagaaaaaaggccactaaggccaaagattttttaagaatcattgtacaaatcattatgttaaactatctaagctttgctgtaatactgttttctcttcaatatgtgatggtacaggaaggatgttaaatgaaggggtggtattgcaggagagcattttaaatggcagaagtaaaaagttataatatttataattttgatgggtttaagtttatttttgtagggaagatttttctcccctaaaatagtttctagaatg

SEQ ID NO: 640 - DNA, 470 bp, Homo sapiens
tttttttttttttttgagaaatcttgcacaaatggcattttattaaagaaaatctaatttacaaagctttgtaaattttaagaaaaacattcatagatcataaacaaaaatttcaatatgcaatattcaaatttacaagaaaataagcacaaacttttagacagtgcagttattgctgcactcctttaattccttatccagagcccaaaaaatgtagacaaaccctaaaaatgtagcagaagcatttccgcacactggtgtccagaatctagtttgtgcagaaatgtttccactagatttatagagtactcttcagaagaaagaggcgagggctcgtcatttggtcaccctttggacattttgcaactcttcaatgggtttccattgttggttgattgttataagcttttgaggtacagtagggtccacagtttcccaaggttctggatttttttttcgatcaaggatca

SEQ ID NO: 641 - DNA, 311 bp, Homo sapiens
tttctccagggagttttatttcctcagcagctgtttctcccatgcctgggcttgtgctaatgtggggcctgggcggacgtggggtcgggtgggcatctccctcagactgggcaacctcaggtgccccagccgagttcctgcagcccgctttggccccaggcagtcctggagagggtctggctgttttctttgcctgctggtgacgtgatagcagcccctgcctcatggcctgcatgtgggccggctgggctgtgctgaggcaggttctagaacagtgatctgatagcatccaaggcagaccatgtgggtga

SEQ ID NO: 642 - DNA, 394 bp, Homo sapiens
attttggcattttgatcactttaatcacagcaattccaaagttttaaattggacagtaaatgtgtattttctgtgcaatgtgtatatttgtattagcattatctacttaaactaagtttggtatatcaagtaagaaaaatattattttggtgtttttttttaatttcttatagtcaaaggtatgtttctgccttttacataatgtgacaaaggaatatgttggtcaaggcaatggctgtttcagtgtttcagctttaacaagaatgctggattacaggtcctcactttctaccaaggcagtattcagtgtcaggtgagatgggttggcctcaggttggaacgctgctttgatgtctagtccctggtccgaaagtgctgcatagcgactggctga

SEQ ID NO: 643 - DNA, 308 bp, Homo sapiens
ttttttcagataaaatattataggtttatttaaaacttaattctcaccttgagtatgcaaaatacaaactccacaaaatgttcattttactttgtagtttacaaatatacaaaatagacgtttgcttaaatttatattacatatttattaaggcaaggaactatatagaaaaacacatttgttctgcttaaggcatacttgggaataaaccattgtacaaattattgcacatctgaaaccacagtgcataacagactgtctgcataaaaatgctaaagaagtaaaccaggtatattacctgacttagg

SEQ ID NO: 644 - DNA, 5654 bp, Homo sapiens
gctttgtttgatggtgatccacatttatccacagagaatcctgccttggttcctgatgctttgctagcctcagacacttgtctggatataagcgaagctgcctttgaccacagtttcagcgatgcctcaggtctcaacacatccacgggaacaatagatgacatgagtaaactgacattatccgaaggccatccggaaacgccagttgatggggacctagggaagcaagatatctgctcatctgaagcctcgtggggtgattttgaatatgatgtaatgggccagaatatcgatgaagatttactgagagagcctgaacacttcctgtatggtggtgaccctcctttggaggaagattctctgaagcagtcgctggcaccgtacacacctccctttgatttgtcttatctcacagaacctgcccagagtgctgaaacaatagaggaagctgggtctccagaggatgaatctctgggatgcagagcagcagagatagtgctttctgcacttcctgatcgaagaagtgagggaaaccaggctgagaccaaaaacagactgcctggatcccagctggctgtgctgcatattcgtgaagaccctgagtccgtttatttgccggtaggagcaggctccaacattttgtctccatcaaacgttgactgggaagtagaaacagataattctgatttaccagcaggtggagacataggaccaccaaatggtgccagcaaggaaataccagaattggaagaagaaaaaacaattcctaccaaagagcctgagcagataaaatcagaatacaaggaagaaagatgcacagagaagaatgaagatcgtcatgcactacacatggattacatacttgtaaaccgtgaagaaaattcacactcaaagccagagacctgtgaagaaagagaaagcatagctgaattagaattgtatgtaggttccaaagaaacagggctgcagggaactcagttagcaagcttcccagacacatgtcagccagcctccttaaatgaaagaaaaggtctctctgcagagaaaatgtcttctaaaggcgatacgagatcatcttttgaaagccctgcacaagaccagagttggatgttcttgggccatagtgaggttggtgatccatcactggatgccagggactcagggcctgggtggtctggcaagactgtggagccgttctctgaactcggcttgggtgagggtccccagctgcagattctggaagaaatgaagcctctagaatctttagcactagaggaagcctctggtccagtcagccaatcacagaagagtaagagccgaggcagggctggcccggatgcagttacccatgacagtgaatgggaaatgctttcaccacagcctgttcagaaaaacatgatctctgacacggaaatggaggaggagacagagttccttgagctcggaaccaggatatcaagaccaaatggactactgtcagaggatgtaggaatggacatcccctttgaagagggcgtgctgagtcccagtgctgcagacatgaggcctgaacctcctaattctctggatcttaatgacactcatcctcggagaatcaagctcacagccccaaatatcaatctttctctggaccaaagtgaaggatctattctctctgatgataacttggacagtccagatgaaattgacatcaatgtggatgaacttgatacccccgatgaagcagattcttttgagtacactggccatgatcccacagccaacaaagattctggccaagagtcagagtctattccagaatatacggccgaagaggaacgggaggacaaccggctttggaggacagtggtcattggagaacaagagcagcgcattgacatgaaggtcatcgagccctacaggagagtcatttctcacggaggatactatggggacggtctaaatgccatcattgtgtttgccgcctgttttctgccagacagcagtcgggcggattaccactatgtcatggaaaatcttttcctatatgtaataagtactttagagttgatggtagctgaagactatatgattgtgtacttgaatggtgcaacccccaagaaggaggatgccagggctaggctggatgaagaaatgctaccagatgattgacagacggttgaggaagaatttgaaatcattcatcattgttcatccatcttggttcatcagaacaatccttgctgtgacacgaccttttataagttcaaaattcagcagtaaaattaaatatgtcaatagcttatcagaactcagtgggctgatcccaatggattgcatccacattccagagagcatcatcaaactggatgaagaactgagggaagcatcagaggcagctaaaactagctgcctttacaatgatccagaaatgtcttctatggagaaggatattgacttgaagctgaaagaaaagccttagttggccatgctggaagaagaggatgcttttctggttcatggttctgttgaaacatatctacctgaaagagacagggctgatgttacctttttccactttgcactacctggtgccattctaaatttctaaggggaaaaatagaaagtttgtttactcttaagatattttatgaaattgtgtgtactttcctattttgccaattatgtgcctcaaagattttagttgagccttagcaagaaagtaggaccttccatttcaatacttcattaacacggtgtagtgatactttgtcccttagactggtgtttaccagtaagatacctttaatccactgttaagtatgagtggatttgtttccatagattagctggatttccttttggtgattgcattaggtttaaagtacacaggtctcaactctccccaggaaagtttcccctgtttgactccacctttaaaatcctaagcctgactaggacagccacaaaccacacaaggtgtaaaaccatcatcagctaagtgcccgttttgttcttgtttaccagaatctcctttaacttctcaaagggaagccgggctttctaatccacgtcaactttattttagttgtcaaattgggcattatattttatgtaaattggtcttttaacatcattttcctgatgaatgttggtgaccaccacattgtgaaatttaagaatccgtgttgcatgtttggtagctctctgagtttcaggccataaactcagctccagaggttaccttttaagtgccaagaactcaagtgcaaggtggcctactcaaaaatcatttggtagcattcagttattcatgaattcctctctcgcatgcattataaaaagtgatctgctttaaaacaccgtaatctgatcataggcttaaaattaaatatgagtattactttcatgtacaaaatatttcctttatagtcttcatatgccctttaaaatgccaacaagatttcaagtctgtaggcctctagtgaggtggggtggcaaaccacagctaagtctcgctcaccactgcaagctaagaatggtttttacattttgggttggaaaaattttttttgaatatttcatgacacatgaaaattattcaaatgttagtgccgataaataaagtggtactgaaacacagccacacaaacttgtttttgtactgtctacagctactttcacactacagccgcagagctgagcagttcagcagaccgtatgtcccacaatgcctaaaacattgactatgtttacagaaaaagtttgctgacccctgctctagcaaacgcatcctttcctactccaccccaatttgtatttagatagtttctctaacagaacggacaaatgaggctgcaaactaatttatttttgtcaaaaatcaatgttttgacatccacagacagtgaaataaaagaaatggcttgctgaaaaacatgaggagtcctagccacaaaatcactgcttaggttgcaattgccaaaatgaagccttcttagaagcacttctttagtatatacaggtgttggctgaagtccgtgcctcactctgggaaccattcttagtctccagtgtctcctattacaaagaagctggcagaaataaaaatgaaggggtgagagcggttccaccctagtctcatggtggaaaattcattggggagagctgtccaggatatttggagtcctgggtagaaggagcttgtaactactttaaagtcgacatctttgcacaggtgattgagtttctctgacctcattgcttcacctctgtctcctcccgtccttccgcacgtgcccacacacacgcagttcagccctctttcctccataagcctccatcgttttctcttttctcctcttgatcctttcaagcgagtatcttgttgaattgtatgttctgttggatctcctccttcataacatctggcttgttggacagaaaaaccctacagcccaccccctcccacagcccacctccacttttgaaagcccaaattacacctctcccagaacacagtgttgacgtaaatacagttacccaatattcctgtttgttcacctatttgctactttcactcagtagcatcccattttgtaaaatgaattccatggtcaccctgtcacaggaagtaatgaaaaatccagtgttcagtgtagtggtgcaaacctgagggcatagagctgttcatagagggctcttgttatagccaaacagacacagcaacaatctcaccatttatatatatatttttaacttgtccagctcatctatggaaaactactcaggtggtatgctgtttgaagcctcatcttcctacatgaaaattatgggcatttgtcccaatgattttgtttcagctgttctgtaggctgcataaccactctgatatttaggtatctgctattttattatcttaaaagacaaattaatttaattgcatgtgctagggaaaagctaccatgtacattcaccccaagtaaatagaatcctagatgaatcctagaaaaataatccctaagcagataggtagacagaggtaaacattcacatgatttagctctctagctcttgcactctgaacattcttgctttggttctgacttctgggaactgctttgcatttctcctatagatctgtagttaagggaaccaaggggtcattggggcaaaagcattgtttctcaaagctccttgattaagagaaagaacagaaatttgcacagaagatagtgtcaaggagtgagaaagtttgtttgagggcagtagctcagtgtggaagaaaatcctgaagtttctgttgaagccatacaatgttctatggggttactctctaagacattctctgaggtgtgtgaggaagtcactactcctagcctttgttaagatgtaattttaaatattcagttatggtactatgtttgcaactctcgtcttatcacaatgcctcagtagtttgttcccttagaaacatttagatgtgcacaaattaatcttttatatatctaaaggtttttctatcatgcattggattgctcagaataaagtgtctgttagacttcgttttggtaaataaattctccataatgtagattaataatataaaagtctttaatgacacaatatatctatatagcctcactgtataattcagaaataaaaattgattctgc

SEQ ID NO: 645 - DNA, 1113 bp, Homo sapiens
atctcccactcctgcagctcttctcacaggaccagccactagcgcagcctcgagcgatggcctatgtccccgcaccgggctaccagcccacctacaacccgacgctgccttactaccagcccatcccgggcgggctcaacgtgggaatgtctgtttacatccaaggagtggccagcgagcacatgaagcggttcttcgtgaactttgtggttgggcaggatccgggctcagacgtcgccttccacttcaatccgcggtttgacggctgggacaaggtggtcttcaacacgttgcagggcgggaagtggggcagcgaggagaggaagaggagcatgcccttcaaaaagggtgccgcctttgagctggtcttcatagtcctggctgagcactacaaggtggtggtaaatggaaatcccttctatgagtacgggcaccggcttcccctacagatggtcacccacctgcaagtggatggggatctgcaacttcaatcaatcaacttcatcggaggccagcccctccggccccagggacccccgatgatgccaccttaccctggtcccggacattgccatcaacagctgaacagcctgcccaccatggaaggacccccaaccttcaacccgcctgtgccatatttcgggaggctgcaaggagggctcacagctcgaagaaccatcatcatcaagggctatgtgcctcccacaggcaagagctttgctatcaacttcaaggtgggctcctcaggggacatagctctgcacattaatccccgcatgggcaacggtaccgtggtccggaacagccttctgaatggctcgtggggatccgaggagaagaagatcacccacaacccatttggtcccggacagttctttgatctgtccattcgctgtggcttggatcgcttcaaggtttacgccaatggccagcacctctttgactttgcccatcgcctctcggccttccagagggtggacacattggaaatccagggtgatgtcaccttgtcctatgtccagatctaatctattcctggggccataactcatgggaaaacagaattatcccctaggactcctttctaagcccctaataaaatgtctgagggtg

SEQ ID NO: 646 - DNA, 145831 bp, Homo sapiens
aagctttaagtgcagagcaagaaggaattgaaccttttattatgattccttgagcacctaactaggtgctagactaatgattacaacctgctaacacagaggagtgatttttgtttttaaattgagttaacttaatatatcaaaaaaagaaatctgtttctggcattgctcgaaaaagcagaggacctgacactgcagaatgcagagtgcgagtagcagtccctgtgagatgggctttttgctctgcttttccgcagacctcaccactccctgtcgtctcccaggccatggtaaccattgaccgtggcacctcttttgttcactcacacacgccctgcttcactcatgccttacctgctttgtctctgtagacagtgggaccctccaccctataccaaacctctggggttgggaaaatcatgatccagagccaaggtggatgggcccccctgctcattggaactccaagcccaagtccctgaaccatgaaccccaaaggacatttttccagttctggttctgcttctggaatgcccagggggtcaggagaagccctccttccaaactttagcaggtgacaatttttccgccttagagacctggcccagcaatcttagcctactctggaagcagtgtccacccggggacacaaggaacaagcagattgtgaacagaggcctcctgggtgccagccactgcactggtccctagagggtagaaagacactgtaactggaagctgccctttgtcaagccccaagcattagcccttctgatctttttttttttttaacatggagtctcgctctgtcacgcaggctggagagcagtggtgtgatcctggctcactgcaacctccatttcctgagttcaagcgattcttgtgcctcagcctcccagtagctgggattacaggcacatgccaccacgcccagctaatttttgtatttttagtagagaagtggtttcaccatgttggccaggttggtcttgaactcctgaactcagatgatcctcccacctccgcctcccaacgtgctgggattacaggcatgagccactgcacccagccttctgatctttcaagtcattattgcttcaaagaacctcctccagtaatacaaggataatctatgcaaagacctcaggagaatatttaaaaataagtatgtatcacaaaaagcagccctcttccctggaggcaaacatgattcacaggttcatgtatgtacacacacacacacacacacacacacacacacaccccaaacataagaaaaagtcactccttgtatgttttgcagtatgattttttttccacttaaccctaccttatagttttttctgtctgttcataactatctagtcagacttcaaatatgtttttgaataggtaagacatgcaaatatgaaataaaatagtgtataagggaatatagaacttcccccttcgttcctatttctcgcccttccagttccccttcttagagacactgtggttgctggttacatatgtagccctccagtcatgttatttatttatttatattatttttcgagatggagtctcactctctcacccagactggagtgaagtggcatgatcttggctcactgcaacagccccctcccaggttcaagcaattctcctccctcagcctcccaagtagctgagactacaggcgtgtactaccacacccagctgatttttgtatttttagtagagagggggttttgccatgttggccaggctggtctcgatctcctgacctcaggtgatccacctgcctcggcctgccaaggtgctgggattacaggcttaagccactgtgcccagcctattgctttttttgtgataaagtctcactctgtcacccaggctggagtgcaatggtgcgatctcggctcctgcaacctatgccttctggattcaagcgatcatcccgccccagcctcctgagtagctgggattacaggtgtgcatcaccacacccagataatttttgtattttttgtaaagatgggtttttgccatgttagccaggctggtcttgaactcctgacctcaagtgatccacccacctcagcctcccaaagtgctacaattacaggtgtgagctgctccatccagcctccagtgatgttttatacacatgcagccacatagagagcccctcctgcacccctccaaaatggcagcacaggccccggctgttgtgcgtctcaatctttgcatctaactgtgtattttggccattcatccatggtagtagagagagggccactgcacagtcttctgctatagggatgaaccataatgattaagcctgtctgctattgacaggtatttaggttgtttctagtctttttgctcttaaaagcaaggctgcagcaaaagcacgtgcttggtggaccacgtctgtctctaggttgggtatttagaaagccgtgatattgcactgcagcttcataaagaagccgtgattatccatcactttactgaggaagctcaggggtaggtctgtatgcacaagtcaggcaggtgataaggcaaagccaacactctgcccaggcctgtgtgtctttttttttttgagaccaagtctcgctgtatcacccaggctggagtggagtggcacaatctcagctcactgcaacctctgccacctgagttcaagcagttctcctgcctcagcttcccgagtagctgggattacaggcacgcgccaccacaccttgctaatttttgtatttttagtagagatgaggtttcactgtgttggccgggctggtctcgaactcttgacctcaggtgatccacccaccttggcctcccaaagtgccgggattacaggtgtgagccactgcgcccggccatccctgtgtgtctgaaagccagtgttccttccacttccctcccttccctccctgttcctcatttctgctgcaggccccgggagcaccccctgctcagggctctgtggctgaccatataaagcgtcagagaaaaactggagctgcttcctaatacggtcacaagagggaaatcctgggcctgcagctgggacttgctggtggcacagggcccatgagatgccggctgggacacaggaggctgggatgttgaaacctctgaatttaaccagctggagaggggctcgtggggccagagaggcagaaacacagccaactatggttgggctgggtcgaggtgaaggagaagtggctgaataatgtgggaggaagagcccgatgctgaagccccacgaccctgccgtgagatgtgcggctgcctgcaccagtcttaccttcactccatcgtcataccctggcttgcttagaaagcttttacagaactcagcagagattcagatctacctggaagtatggattaagtgcttgttgtgtgcacggcactgggagagatgtcccaaacaaagaggatggaagtcatattcctctttcagaagctagtgatggagttgaaaaggcagtgtggtccttccttctttttaaaaattcattttattctttttttttttttctttgagacagtctcactttgtcacccaggctggagtgtggtggcatgatctcggctcacataacctctgcctccttggttcaggtgactctcctgcctcagactcctgagtagctgggattacaggcatgcgccaccacacccagctaatttttgtatttttagtaaagacggggttttgccatgttagccaggctgttctcaaactcctgacctcaagtgatctgacctcctcgatttcccaaagtgctggcattaaaggtgtgagccaccatgcccggcctcttccttctttttaaaaattccttttattcttttcttttctctatctctcatctctctttcttcctttctttcttactttccttccttccttccttcttttttttttttttttagagtctcactctgttgcccaggctggagtgcagcaccatgatctcagctcactataacctccacctcctgggttcaagtgattctcctacctcggcctcccgactagctgggattacaggcgcctgccatcatgcctggctaatttttgtatttttagtagagacggggttttgccatgttggccaggctggtctcgaactcctgacctcaagtgatctgacctccttggccacccgaagtgctgggattacagctgactgagtgtctaccctgtccctggcactgtgcggggtgcaggagatacagtagtgtgtgggtcacagtccaggaggtaacatttaggcagagctctaaaagaggagagggaaccagctgtgggaagatgaggggaaaagtgttccaagtggagagaacagcatattgaaggctctaaggtggcaagacttccctctcgtgaaatgaagggagcatagtaagagtcactaaataacattgattgagcacctactacataccagccgccatgctaaatgcttttcgagcattatctcgcagcacatctatgaagggcttgttcgtatgcctccctgttttgtagatgaggataagtgagactcagagaggttaagggacttgcccagggtcacacagcgaagaagtagcaaagtgaaggttcaaattcaagtaccccatacccagttctgagcccttagccactgccctttactgcctccaggtcaagggcttgagtgaggacaggttgggctgtaaatgatacctacattcaaaaggggcgtggcagtggacatggccccagaggagctggagatggagtcgaggcctgaaggagggtggggcttgattgacctttgttcaggtgaccacagactgggctcttctctttgggaggcttgtcctggggacaggggacactgattgaacaggaaatagcccctggcctggctcagtgtagtccactgagtacctactgccgccgtgcaaggcccccaggtcacggaggtgaagtcaggctgtccctgctcccaggaagctgtatcattaatttattcccctggcatgcatttagcaagcatttagttagcacctattctataccaaggcctgtgctgggactgaagaggagaaagggggttccccggactcaaggcacttgcagctggtgtttgcaggatgggtgggagggtcctgggtgatggaatggggaagaggggtgtccaggcaggcagccccccactcccagccccaccaggctggatgttgctcctgggccccgcttacctctaacccttgctttgcttctccatttcggtccgatggagccgcttataccaagctgcttatagttcacccccacggaccccgtgtcctgtttttctgcccatgtccctgctttgtcttgagctggttaacaccttgttgtcctttaagactcagtgcagggaatacctccccacctggaggtttccctgaccacccccaatgtgggttagggccttcccttccttgttcctatcattctctgttcttacgacgtgttttaatgtacttgtctccccctctgatttaagttctttaagggcaggagctatcattgatttctttatctccagcctctgacacagatgtggtatatagtaggtgctcagtaaatggttgatggctatttagacaggcatatgttgactcattcattctccttttaggggatggtgagaacctccgtctccatcaatcctgtttccttttttttttttttttttttttttttgagatgggttctccctctgtcacccaggctggagtgcaatggcaccaccttggctcactacaacctccctccacctcccaggttcaagtgattctcctgcctcagcctgccgagtagctgggactacaggcatgtgccaccatgccctgctaattttttgtatttttggtagaaacagggtctcactgtgttgcctaggttggtcttgaactcctgagtgtgagcaatctgccctccttggtctcccaaagtactgggatcataggtgtgaaccactgcgcccaacaatcctgtaccttcaaagaatattcctctgcagcacccccagacattacataccattgtccctgagtggactgagccctggaaggaccttcccactctctctttttctttctttttcttttttgagacaaggtctcaccgtgtcacacaggctggagtgcatggcacaatcacggcttactgcaacctcaacctcccaggcttaagcaaacctcccacctcagcctcccaagtggctgggactacaggtgaatgccaccatgcccagctaatttttaaatttcttatagagatgggggtctcactgtgctgcccaagctggtctcagacttctgggctcaagcaatcttcctgccttgacctcccaaagtgctgggattacagttgtgagccaccacacccagccagactttcccactctctaattggctccagcccttgactaaaaggcccttgagggctgggatcctgtgtttttttaatgttctaatgtagtcccagcaccttttgcatggcatctgggacgtacagaatgaatgaatgaatgaatgaatgaatgaatgaatgaacgaacgatcagtagtttctgtttctgttggatgggcctaggctggatagcataatggaccatgctcatacctgggggcgggccaggctgggcttggtgctgccaggatcttctttggtgacctcggtcaagtcacttaaccctctgttgcttggttcaccctagctgtaactgagagatggatctgtggttctccctaagtcacttgcagggaagaggatacgctttatggccatcagagtcttgggcagtactgatgtttatcgtttggggaaagcagttcctgtgagacgggttggagcctgtctcctgaactgtgacctcaaccatgggaaaatctagtatccagtaaggaaaaatcatgacaatagtgccttaccacgtacagcatggcgggactcgccttgtgccttgactcctccgtccctgatctgattattttcagatgctcctattcacccagtaggagaggactgctattttttaaatggtaaagtgcatatgacataaaatttaccattttaaacattttaaagaaaacagtgccattaagtgcattcacaatgttgtacagctatcaatttcaagacagggtcttgctctgtcacccaggggctagagtgcaatggtacaatcatagctcactattaccttgagctcctgggatcaagcaatcctcctgactcagcctcccaagtagctgggactacaggtgatcaccaccatggccagctattttttttttttttttttttttgtagagagggggtccggctgttgttgcctgagctggtctcaaacacttagcctgaagcaatcctcccaccttggcctcccaaagtgctgggattacaggcatgagccactacacttggccccagagcatttttatagcctcaaaaggaaaccttatacccatgagcagttcctcctcatttcccacctctttccagcctctgggaaccacaagtctgttttctgtctccatggctttgcctactctagacacttcacataaatgagatgatagagtacgtgacttttcgtgcctggcttctttcactaggcatattttcaagcttcatccacattggagagctcatgtcagtgttggtctctgttttgcagatggggaaggtattaatgatcaggagcaggcgctgtggggtaaacaggagttctagttcccaacttccctccagctgtgtaacctggtgacaacctcaccatgcctcactttgccctcctgtcaaacaggcggtggggaaatcactgttactgagtagttgtgaagatgccacgaggagatgcctctgccatcttctagagactgagtcactggggtttcttcttagatatggacattgggaggtcccagaaagagatcagagggtggtgggaggagagagagcttggaggattattaccttttcctccctccctcctggaccacagttttggcagctgtgtttctgtatgactgcggatccctctggacagcccctttttaggggtgtgtggctttctatgcctccaatgttcagttaacgacattccctctctggctgagtgcggtggttcccacctgtaatcccagcactttgggaggctgagactggcgcatcacctcagctcaggagttcgagaccagcctgggcaatatggtgaaaccctgtctctacaaaaaacaaaataaaaattacctgggcatggttgtgcacacctgtggtaccacctacttgggaggctgaggcgagaggatcacttaagcccagaaactcaaggttgtagtgagccaagatcaccccactacactgcagcctgggcgacagagcaagaccctgtctcaaaaaaaaaaaaaagtaaacaacattctcttctgttcttgctcttcagacttaactgctcccgtcactggttgggtttctttaattctgcacacatatctgtaaacactttctttattaaatgttcctgagttaatatcttaagcacactgttcattttctgtgccacctgttaaatgatgagcatttaatatgattgtcagcatccaaaaaagatcctgcgtagtgcttagttcggtgcccaacacatagtaagtgctcaatgaacggtggctgttatttaagccagtgaggtccggggaggtaaagtggcaggtcggaggagtggagctgagatttgaacccagagctcttcaaaactccacagtttggccaggtgcaatggctcacaactataatcccagtgctttgggaggctgaaatgagagaattgcttgagcccaggaatttgagaccagcctgagcaacacagtgaaacccatgtctctacagaaaatataaacatcagccaggcctggtggcgcccgcctgtagtcctggctactcaggaggctgaggtaggaggatcacctgagtccagaaaggtcaaggtttcagtgagtcacgttcacaccaccgcactccagcctaggtgacagagtgagaccccatctcaaaacaaacacaaaaccccccacagttgcaaaataaaacataggcagcttggaaacccactctcgccctttctcctcttcccacgtacctggaatatcagtgaggcccagggtttccactaagactccaagctccagtttccccatctctaacatgagaatattgagtgcttctgtgcaatctgtctaccctggaggaggtctggaagtaagctgggttctctgtctgcagacgtactctggcctcttctgcgtggtggtcaacccctataaacacctgcccatctactcggagaagatcgtcgacatgtacaagggcaagaagaggcacgagatgccgcctcacatctacgccatcgcagacacggcctaccggagcatgcttcaaggtgagtgaactcagggctgcacggggccagctccagggagcccctcctgtcctgcttgtctgcagttcttgccaggaatgtggagtttggcaggcactgcgagggaccaggagttactgtggctgaaaaagggaaaaagcaaaaggaacatctgtgtttgcagcctgggagggtgagggagagccaagagcttgggcaaatacgggcatgggcccgctccagctccagctccggggctcgctgcccaaggtccccgtcgggccagctgtctgcaaaggatggaaagagggtggggaacagccctggggctgagccattgtggtctgtgttgacacctacctgtccctcaacccctgtgggactgtgggtaaatatcttttcctcttcagcctcagtttcctcatttgtcaaaaggggtgatagtctctatcttgtagcttcttgtgaagattgttaatgctggtttttccaaacttaagacttgtgcctattactttcatgtttatacgttattatttttactattgttttattatttttgagacagggtctcactttctcgcccaggctgaagtgcagtggtgccatctcggctccctgcaacctccgcctcctgggctcaagcaattctcctgcctcagcctcccaagtagctgggactataggtgtggactgtcatgtcaagctaattttaaaaaggtgggtttttttgttttgtttttgttttgttttgttttgtttttggaagtgacaggatcttgctatactggttggtctcaaactcttggcctcaggcgatcctcccactttggcctcccaaagttctgggattataggcatgagccactgcacccaggccttctcaccttctatttagaacactttggagcccctgaaatagccacccccaagtcaaacagagggactaggcagttaatgcaaacaagtgtaccaggtcaggcgaagagtacaagaaactcgaaaactcacaccccctctgaaagggcaccaacaggtgggaacccagggatctgagttgggagttgagaggagcccaattctggaagttcttgaggccggaatccaggtgtgcctgagagatgccacgaccccgcccccaagatagagggactcaggtataagtgccccaactttctgacagtgagccagactccacaggtaggaccagaatcttggcccttctaggcagggcctgccattacctccaaagaccagcaggtggagccttgcaaaggcaatcttggagctgtaatctcaggttgtaaagtgatggctcctggagtcaggtatctgtcttttttttttttttgagacggagtctcgctctgtcgcccaggccggactgcggactgcagtggcgcaatctcggctcactgcaagctccgcttcccgggttcacgccattctcctgcctcagcctcccgagtagctgggactacaggcgcccgccaccgcgcccggctaattttttgtatttttagtagagacggggtttcaccttgttagccaggatggtctcgatctcctgacctcatgatccacccgcctcggcctcccaaagtgctgggattacaggcataagccaccatacccagcaattcctggttcttttctggagctgaggtcccactaagcacattttaatctaaataccaaaaagaaagaaaattctgttagcaaaggagaaggagggggagcgacagatgggtaagcatttctacagtgctctgaaaaaatttatttgtaacttgaaaaagtctttaatattgtatattcattctagaaaaacttaaacatatatttaagtaaaagagaacttgctggcacctatgattctatcatccaaaactcatcaccattaacattttgttacgtgacctttcattacactaactgaactaaatggcatgaaatgaaggaaatttttactatctgaagataattcgttccagaaaaagatcacttaaaacagagaccaaagtttcactgtagatagtatgtgtgtggaggagggaaagagagtgggcaaaatatttgactgagcttgaaaaatgacattgcaggccaggcacagtggctcacgcctgtaatcctggcactttgggaagcccagatgggtggattgctcgaggtcatgagttcgagaccagcctgggcaatatggcgaaaccctgtctctacaaaaaatacaaaaattactttggtgtggtagcacatacctgtagtcccacttcttgggaggctgaggtgggaggatcgcttgagaccaggaagtggaggttgcagtgagccgagatcacgccactgcattccagcctgggtgagagagccagaccttgtctcaaaagaaaagaaaagaaaaccaacattgcaaattataaaaataggttaatttcagcttacatgtaataagaattttattttaattacaagtaggtgctaatttgtagattcagtataaaatgaattaagagtgggtgtggggtttttttctgtaactttttctgggctgagggatgaaatcatgtgagcataaaacgacatcttcatgtcatgcttgacttctgcagcccgagctaaaaaggatcattcttacagatttatttgatgggtcaccagttttcctaagggcttcttttacttctttagtgtttaagtctctcaaagcccctgtggtcttagcgttcattcagctgtgaattgccctgaatctttttctttcttttgtctttctttctttctttttttttttttttttccggatggagtttccctcttggtgcccaggttggagtgcaatggtgtgatctcagctcactgcaacctccacctcctgggttcaagcgattctactgcctcagcctcccaagtaactgggattataggcatgtgccaccacacccggctaattttgtatttttagtagagatggggtttcaccatgttacccaggatggtctcgatctcctgacattgtgatctgcccgcctcagcctcccatagtgctgggattacaggcatgcaccatcacaccaggctaattttgtatttttagtagagatggggctttaccatgttggtcagactggtcttgaactcctggcctcaggtgatcctcccacctcggcctcccaaagtggtgggattacaggtgtgcaccaccacacttggcccctgaatcttttttttggcctttccaaggccactgactttgccagtcactgcaccttgttttccagaactgccactttgttttgtgttcatatcatgatggtggctattgatacccaataattggcaaggtgaagccactgaatcgtcggagaaggaggtttcggtggagtttgatcgctcttgtagtcattgaagaatacttttgtgttgtggggacttttgctttcctagaccagcagtccccaacctttttgacaccagggaccagtttcatagaagtcagtttttccatggaccgcaggggagagatggttcgggatgattcgagcgcattacatttattgtgcactttatttctatgattacattgtcatatataatgaaatcattatacaactcaccatcatgtagaatcagtgggagccctgagcttgttttcctgcaactagacggtcccatctgggggtgatgggagacagtgacagatcatcaggcattagattctcataaggagcacacagcctggatccctcttatgtgcagttcacagtagggttggtggttctataagagtctaatgccgcctctgatctgagaggaagcagagctcaggcagtaattggagtgatagggagtggctgtaaatacagatgaagcccactactcacctcctgctgtgcagtaccagtcggtggtttgagatgcctgcgctagaccacctcttaactgtgaggcaatgttgtaattgacaaggacaccctgtgttcatatatttgattcctcatggtctctaggttttaacacaaaattgcatagtcagctctcttgaaactacttagaaatgctcacttgacacatagtaagctccaataggaaatgactatcatgattgagcacagcagcatgtcttcagtcctagcactttgggaggccaaggcaggaggatcacttgaggccaggagttagagaccagcctggccaacatagtgagctcttgtctctacaaaaaaataattagctggccacagtgcgtgagtctgtagtcctagctactctggaggctgaggcaggaggatggcttgagcccaggacttcaagaatgcagtgtgctatgatcgtgctatggtactccagccttggcaacagagtaagaccctgtcacgaaagaaagaaagaaaatgaaaaccgtgaatatgcacatccataaaagataaactctttacttaatttaaatgttaaccaacacctgctatgccctcgtctattttggcatgacctggtgctttctggcaaatcattgatggcggactccaaaaataaaaagaatcgggcacggtggctaacgcctgtaatcccagcactttgggaggccaaggtggggggatcatgagatcaggagatcgagaccatcctggctaacgtggtgaatctccgtctctactaaaaatacaaaaaaaactagccaggcacagtggcaggcgcctgtagtcccagctactcagggggtgctgaggcaggagaatggtgtgaacccaagaggcggagcttgcagtgagccgagatcacgccactgcactctagcctgggcaacaaagcgagactccatctcaaaataaataaataaataaaaaataaaaagaatgtcaaaaataatggagaaaaatttaagcttgggaagaattccgttcacctgcttaattttttctccattcccaagtaggaaattggtttttgtgaagaaacacgtaggcccagtgtgttgactccattgataaatggcacgatctcattctgttaagtcactgggctgcgatccacactaagcttaccatgaaggtggagagagaaagctagcacatgtggcttcttccttgagttcttcatggaaaagatggggtgtgaaaaggcgggattgaggagggatgggtaacacacatgcactgaatataagatgaagcattgcagttgtgtcacatagacagtaagttcctgaggacctataaactccatccttcttgcatgtgcatcattgtatctccagcacattttctggtgcctggcacatagtagctgctcagtatttgttgaatcaatgaattattagagttatttatagaaaagaacctaccagggtcaggatggatggggtgggttatttgagagaggtggggctttataagcctcgaagaatggtttgctaaggtgagagaagggggcagggatggctttctagccaagaataataaaagcataaatgtaggggtgagaatgggtatgatgagtgtggcaggagctggtttagaggggttgactagtatactgtggcagggagctcagagccagagctcagccctttgctgcctcacaggagttgggaaaatgggagggactttctaagagatacttcacaacatggcaccctcccaagtggaagccaagccccttgagggtatgggaagagaagctgatatttaaaatatgtatcttatatctgcatatgcataaattatgtcatgtttattttttaaattctccccccctttttttttgaggcagagtctcgccctgccacccaggctggagtgcagcagcacgatctcagctcagtggtatgatttctgctcactgcaacctctgtctcctgggttcaagcaattcttgtgcctcagcctcctgagtagctgggactacaggcacacaccaccatgcctggctaatttttgtatttttagtagagatggggttttgccatgttggccaggctggtttcaaactcctgacctcaggtgatctgcccgcctcaacctcccaaagtgctgagattacaggcatgagccactgcgcccggccgtggtttgtttttggaaagatgttacatacaaattcaaaaggtgaacttctcccttcaacccttgtgcattagacccttagcttccctcccaagagacaattatggtttctagtgtatgaggttttctcctagagatatttttgcaagtataagcaaataggtatctattttcttccctaagatttccctacaaatactagcattccatatatatacagtcctatattttgccagaggatgttacatatcagtgcatgtaggaattccttgttcccttttttaaaaaattggtttttatttttgttaaaagtattcatgcagacggcttagagtcaagtaatttttgaaggcttattaagaaaaatagccatcctctgctacttctcaactcctttaattgattttttttttttttggtatttaccaccatatctctgaaaacaacacttgatcattgtgctgctatcttaattttgttttcaattttaggtatcatctattgactttcctccatgaaagatgaaatttagctcattcaccctctggatttgcccctatttcctcgttccaacacacatgcctcatatcagagtcccagtataattttatcttagttttgacaaactcagtgttcagagtttccattattatgactatgtaatgctatctagagtttacattattatgattatgtagatgttattcaaagctgagctttgcactgctttgtgactatttttcttctttctgtatgacttttctttttcctggagttagcaattgccttttttttccccaatcttgttttccatgtatttaaccaccaattctgccccaaaatctctttctaaatgtgttaatctccttttaatatgtccagacatgtattggatatcatattgatatcatctccttgaatgtgatctctactatagccttctgatctgccctggctttctctatagctagtaactgtcatataggatctttttcaccatccttgaaattccccttagtgctttcatagtggattccttgtttcccagttttcatgtcttcctctttcttgctttactctcctgcttaaatcaagcactttgtccagtagcttcccaagaaagaatgtacgtgatcttgaggcattgagaacttccatatctgagaggcttgatgcttctctaacacttaaaggatagtttagttgggtttaaaatttcaggcaagaaagttgttttcagaaagttataaataactttttttgcctgagctttttaaggcatttgtgttgttgccttctagtttcagttttgagaagatgaaacccaatctgattcgtatgtgtgtatgtttgtgagtgtgtgtgtgtgtgattatattcaccttcctggctgggaatattcttgatcctttgtacatgaccagtttttgtttttcctccttctctagaagcttttagactgtctttgtacccctattcaggatgatgggacttgctatgagtccatttttatttgttatcctggacacttagtggcccaattaatctataaacgtgtgtccacaaattctgggaaatgttgcaaattatttcattgatgctgtctttctccctgtgttctctgtttctttttcttagaagtctttttatttccataatggaattcctagaccaatcctataatttaaatctctttcttttgtcattttcatcactttaatgtttttaatggtattttctgggcacttacctcaacttttttccctaacccttccattgcgttttaaatttctggtatatattttattaaattccaaaaattctattttatttttaaatgtttctttcatatgacattctttttctgtggttgcaatatcctgtttctcagaggatatttaatgcagagtctatttcctccaagatacatattttcctaattgttttaacttctgtctgtcatattagtggatttcttcagatgtcttgggattcttggctatccattcatcttggatgctttagtacacaggataccaaattgttgatggaagctcagtgcttataggatgggcttgctgatgtgcttggctataatatgaaagcactgggctaccccattaggacacttctgtttcgtctttcagtcttttgttcatgggctaatctgattcttcagagaaggtttgtagaaaaatcttctgcctggaggttaaagatttgtctagcatcattttgagggtctagttgaaaagaagctgagggtttcaaaatgtgcagtgaaatttgtacattataccttccttctttcagtatggttcctggtgtccccccaggacggagaccctctgtttaaccctcaccagagactaaacccaccaccttctgtggggtgtgagaagggcagtcacttggcttcagggagtgtagaagatatgggaggggtctaacagtgccttatatttgacccagtccttatgtttttgtctcctccttgatcttttcttccagaggcccctggcattgccagtttctgaggtttggggcagaaatggggaattcggtgttgaaattaggtcgtttcccacctttcctcactgctcacctagacttttttcttggtacctttttttttttttttttttttttttttttttgagatggagtttcactctcgttgtccaggctggagtgcaatggcatgatcttggctcactgcaacctccacctcccgggttcaagtgattctcctgcctcagcctcccaagtagctgggattacaggcatccgccaccacacccggctaatttttgtattttaaatagagatggggttcaaccatgttggtcaggctggtcttgaactcccgaccttaggtgatccacccaactcggcctcccaaagtgctgggattacaggcgtgagccacggtgtctggactttttcttggtacttttcaacgcttatcccattttctgtcttccaagatggctttgctgttctcccctctctagttctttttaaactgcctcatgtatttttacactttttggtttgtttgtttttttttgggggatggagtttccctcttgtcgcgcaagctggagtgcacgatctctgctcactgcagcctccacctcccaggatcaagcgattctgcagcctcagcctcctgagtagctgggattacaggtgcatgccaccatgcccagctaatttctgtatttttagtagagacgggttggccaggctcgtctcgagctcctgacctcaggtgatccactcacctcagcctcccaaagtgctgggattacaggcgtgaaccaccacgcccggcctttttacacttttttttttttgccttttcccccctcttttgtgtggagaatggggtcttgttatattttccaggcaggtcttgaactcctgggctccagctttcctcatgcctgtgccttcctaagagctgggattccaggcatgagccaccatgcccggctaaactggttcatgtatttttggaaagtcttttacagttattttagtaaggtttaggaaggaagagagctaaatgcatgcactcagcctaccatcttctcatgggaattctctcatgccttcttttacaaagaagtgataataataatcatggatttttattatatgcttcctataaagctcagggctttacagaaatattctcagttaatctttaccacaaacctacaaggtggacaggaccagattaggaattttaaaattaagccctgaaactattaaggtgcaggcatatgtcataaaaaaaaattaaattataaagtaaagaaggctgacaaaattgtttttgtttttgctttttttagagacagggtcttgctctgttgcccaggctggagtgtaatggtgcgattgtaactcactgcagcctcaaactcctgggttcagcaatcctgcctcagcttcccaagtagctgagactacagagatgtaccaccatgctcagctaattaaaaaaaaacaactgttttttgtttgtttgttttgagacagagtttcacccctgtcacccaggctggagtgcaatggcacgatctcagctcactgcaacctccacctcctgggttcaagtgattctcctgcctcagcctcctgagtagctgggattacaggcacatgccaccatgcccagctaatttttgtacttttagtagagatggtgtttcaccgtgttgaccagactggtcttgaactcctgacctcaggtgatccacccaccttggccttccaaagtgctgggattacaggcatgagccaccgtgcccagtcttttttatttttgagacaggttctcactttgtcacccaggctagagtgcagtggcacaaacacggctcactgcaggcttgacctcctaggctccagtgatcttctcacctcagctccccaagtagctgggactgcagccatgcaccaccacacccggctaatttttgtattttttgtggagacgggatttcaccatgttgcccaggctggtcttgaactcctgagctcaagtgatccacctgcctaggcttctcaaagtgctgggattacaggtgtgagcccactgtgcctagtgaaaaaactttttttttttttttttttttttttttttttagagataagatcttactgtgttgcccaggctggtctctcattcctggcctcaagtgatcctcctgccttgacctcccaaagtgctgggattatgggtatgagccaccgtgcccagcctaaagttgctatttttcccatgatgtttatcttcgtggtgcttatgaaatggcaactatggcattcttccttctcgtgcatgcctgtgtgggtgtgccctcagcatatgcttacaaggtttattgggtgatccaacgctagccgcaagagctattattagctcccttttacagctgggaaaacagactcagaggagtggagaacttgctgcagatttgttaagtgtcagagccaaatatacacttggattatcctgactccaaagccggagccctgctggtcagtcggtgacaccgggcaaccacagggatccccctcaatcccacggaaggctgtctactgtcttcatctcagagtgttgacagctcaaagcttaggaggctggagctaagttcaataaatgaacgtgatgaataggagaaaagcgccattaaagccctccagacaagaaccactttggagcccctccatgggtccctggggtgtaggaggggcaggaaagcagataagattccattctgagcctctgcacttgccctatgcaagatagccacaagtaatgttttgtcctcacctcattagcaacaaatggccacactcaggggattaaaaaaagaaataacagccagcctttatcagcttggggctcttggctaattcctctttaagcttaagacaactctgcgggtggagtgatccaaacgactttctccactttgcaagttcccacactcggctgtatccttctgcttgagattggcagccccctggggatggttcctgctcacccaactcccctgaggctgctccccagtagaggcagagagaggaagggcactgatgtcctcagggcccctgcaataggtcaggacctgggttcactgctccatcaatcccacattgctcggccctcactagcaccacacagggtgggtggcagcctccccatttgatcaatggggaaaactcagcacacctacttggccccagaactgagagtcaaacctggggacccagcttcgctgccctcagaatgttactcttccctcctgggtagcgtggtatagatagtgtagtattcttgtccccatataacggaagaggaaactgaggcccccagaaggctaagggactagcataggccttgtgtcttagcctgttaaggctgctatatcaaaataccatagactgggtggcttttaaacagatatttgtttctcgtggttctggaggctgggaagtccaagatcaagcttggtatctggtgagggcctagtgctgccttctcgctgtgtctcacatggtggaagggacctgctagctctctgggtctctcccccaatgaggattgaacccccatgatctcatcacctcccaaaggccccacctcctaatatcatcactttaggggtaaggattccagcatatgaatttgagggagacatgagcattcagaccatgacaccttgtaatcagaaaggggttaaatatctttggttgaatatcctgtcctgccgattcagaatcactgctgtctataacctcttccctagatcactgttttagatgatgatgataaagatgatattaacggcaattaccaagctcttaaatgtgctgtgggtaaaacaattttaagctctttctgaatccagtctctttcaatcatcttcatgcccttgaaaggtctggatttttgtcgatttccctggtgaggaaacgggccctgggggcagaggtgatagggtggagccaagaagtaattcccagctgtttctctgcagaggcagtgctgctacaaacacatctccaggaaggggtacagccaaatgcttctctgtctcttgtgggttttgcagtggctgtcagctatgtgtctggcccggttgggaatgatgggggactgtgtgtgggaatgaatggctctgtctggctggctcagtctttacagaggtgctaggagtgtctgtttggtgctctgactaatcatgaaaagttcacgtttttatctttattttatttttatttttggtacccatggtgcattacagggaagggagacagcaaaggagaattatttgttataaaatagtaaatattggccaggcacagtggttcacacctgtaatctcagcactttgggaggcagaggcaggcagatcatctgaggtcaggagttcgagaccagcctggccaatgtagtgaaaccccatctctactaaaaatacaaaaaattagccaggcatggtggtgggcgactataatcccagctactcgggaggctgaggcaggagaatcgcttgaacctgggaggtagaggttgcagtgagccgagattgccccactgcactccagcctgggcaacaagagcaaaactccgtctcaaaaaaaaacaaaaacaaaaacaaaaaccgtaaatattaaattgaaaaagggacatacttaagggagtgaacctgaaaagccccagctgacacttggcaacaccttccttgtttgttttgggcttttttgagacagagtctcactctgttgcccaggctggagtgtagtggtgtgatctcggctcacctgagcctcagcctctccaggctcaggtgatcctcccacctcagcctccagagtagctgcatacaggcatgcaccagtacaactggctaatttttgtattttttgtagagatgaggttttgctatgttgttcaggctggccttgaactcctgagcccaagcaatccacctacctcggcctcccaaagtgctgggattataggcgtgacccacagtgcctggccagcaccttccttgttaaattgcatgtgtcagccacctccctcggtgtcctcccagcctctgggcagtctggctccccattcctttctttatccaacagcatttttttgtgagacaaggccttgccctgttgcccaggctggagtggagtggcacactcatagctcactccagcctccaactcctgggctcaagtgatcctcccctctcagcctcccaagtagctgggaccacaggcacagatcatcacgcctggctaattttttgattttttgtagagatgaggtctcattatgttgcccaggctggtctcgaactcctggcctcaagcaatcctcccgcctcggtctcccaaagtgctggaattacagatgtgatccaccacgcccggtcattctaacaatattgattattagatgttgccctagacacagcctactgtgcgtatgtgtaaatacgaattgaatcatcccacaagtagctgctaagtagaggaggtccagagagtggggaagtgtagccctggggaccttgggaggacaggggaggcttccttggaaggtgaagtgtaggcttggctagggaacttgatataggttctatgaggctgctggggctggagcagagagaagggggagaatgtaggaggtaggagtggaggcccaagagggagagcgttggttttcctgtctcctacaccccttcactggccagttctgctttcatgtttttatttattatatattttttgagacagagtttcactctttcacccaagctagagcgcagtggcacaataatagctccctgtaacctcgaactcctaggctcaagcaattttcctgcctcagccttccaaatagctggggctacaggcacacacctctgtccacagctaattaaaaaaaatttttttttcatagagataggggtctcgctttgagtctcaaactcctcgcctcaagcaatccttctgcctcagcctcccaaagcactgggattacaggcatgagctcctatgcccagcccagttctgcttttacaataccagggcttcctgtaggtttggaaaacacctgttgggttgcagcaaaggctctcaaagtatctcttcttactcagcatgtcatcctaaccaactctgccgggagagtagagtggggagatgaaggctggagaaagagaagggccctcacttacagaatggcttaggtcatgggctctggagctgggttcacctcccagctctgccccggctattactttgtgcctcagtttcctcacttgtcccgtgaggatgatgactgtgcttactccagttgttacaagggtgattcggtcagtgtgtagggacacggtgcatggacaggacaagttcaacaggcattagcagtcagctgccgaggacccaccgtcaagggccatgcagtggccaccttcacagtcacaccacagaagatccagaacctctggcatctgcctccgtgcggggcattaggtagagagccacttttctgcaggcaatggaggctgagacctttcttctttactagcccaggggtattgatggccctgcagagacgggttttgattacctctcactggatcccccagcagcctgttaccagaaagaagggcagacgcagggagcctgggtctgtgctcagtccccgctgggttttctccttttatggtcagcctacagtgctctggcttcccagacagaatccaccagcttgtgtttgggcttgggccgaaatagctggtctgtggggagctgggtacctcctgggagtcctcaggcccacagcgggggaggaaccgctgaagccctttatcttctcaggaaacgtgcctggggccttacacatccgaggctgggtggggagtctggggaggaggaagggagagaggcatgtttaaggatggggtgtgaggtgacatgagccccagggatctgggctgggaagctcagccccaggcgggtcctgatgatggccggccgcccccagctccagccttcccagactccacggaggctcggtactgtgtccccgcccactttggagcttctgtcccaggccctctgcttgggatgctctgcctcgacctctccccaggagattctttcacatttttcttaatgctgttcagtggtcacctctgccgtgaaggcttcctgtcttgctcaggtcagtgtgaaaaaacaaacaaacaaaaaacctgacgtctatagcacttgggttcacatccatcgtagcactgctcatctcttacggtcatttctttgcccatctgactcccaccctgggtcatgaacttctcaaaagcaaggataagcaagtcatgaagctcggtgcattggcttgagcctgtgatttcagttacttgggaggccaaggcgggaggatcacttgaggccaggagtttgggaccagcctgggtaatattactaagttaccttactaggccctgtctctacaaaaaaaatgaaaacaaaaaacaaaaaaaccattagccaggcgtagtggcatgcacctgtagtcccagctgctcaggaggctgagatggaaggatctgttagcccaggagttccagactgcagttagctatgatcgtgctactgcacttcagcctgggcatcagagtgacacctcatctcttaaaaaagaaaagaaaaaaaaaagcagatcttattgacttttgtgctttcggtacctggctcaggactcgtttgttgaatgaatatgtgaacacgtgaatatgcattttccattgcttctaccttggttgcctctctgagccagagagcaattcaaaataacaagcatttcctgagcacctactgtgtgtcaggcattgttccttgtaccttcaggagctcattggttcaggggaaaagcattgaaaatgaacaattttgtaattgttggaaacctaatagagctgcatgaagtggaagaagtcagatttataatcattcagaggtggtataaaatgaacatcatttttaaaaaaggtttatgcggtataatttaaataaattcattttaaggatacagttcacacctaaaattgcagctatgtctgcataactgtctaaattcactcataatttacatggttatgcagccattgctgcaatataattttatatttctatcatcccccaaagaaatcttgtgcacatttttttgtcactccatattcctacccgcagctcctggcagccacgaattcacaaatctactttctgtctctatggatttgcctattctggacatttcatataaatggaatcatatgtgaccttttgtggctggcttcttttttttttttttttttttttttttttttttttttgagacagagtgtctcactgcactcgcccgggctggagtgcagtgatgtggtctcggctcaccacaaactctgcctcctgggttcaagtgattctcctgcctcagcctcccgagtagctgggactataggcacgtgccaccacacctggctaatttttgtatttttagtagagacggggtttcactgtattggccaggctggtcttgaactcctgacctcgtgatctgcccacctcagcctcccaaagtgctgggattacaggtgtgagccaccgtgcccagccggctagcttctttcacttagtataatgttgtcaaggttcatccacgttgtatcatggattcatactatttatatattttttaagacagggtctgtctctgtcaccccagctggagtaccgtggtgcagtcgtggcttactacaacctccacctcctgggctcaagccattgtcccacctcagcctcttgagtagctgagaccacagggattgtgccactatgcccagctaatgtttgcatttttttttgtagagatagggtttcaccatgttgcccaggctggtttcggactcccgggctcaagcaatccacctgcctcagcttcccaaagtgctggaatttcaggcatgagccatggccgccggccataacatcctttcttttcatggctgaatactatcccactgtctgggtagaccacattttgtttatccatctacccattgatgaacatttggttgtttctattttttggatattatgaataaagtccataatttttaccaatatggaaaagaaaaacaagaaaaactctgaatgccatatcatggatagatggcctattatcattccatatcatctgtacctttttccgccagaatgttttgagacatttattaagtaaggatcacaatgatgataattactaaaatggagagaacctgtggaccatgggaaccactaggccatgtgacactcatgtttatattagagaaaggcaccgttttctcaaagcacttttcctccatctgctgaaagattattacaataaatacacaatgcaatacaataaatgaccaatgcaaatagtttctccatagagttatgcagtgtacaacatgcaccacggtccatggccatcctgcaggtaggaggtcaagtggaaaggtctccaactcagctctagaaaagtgcagagttagagaaggtatcatagaagagttgactcccaagacgatgtttcagatacagattagggtatgtacccgaagaattgaaaaggtactcaaactaaaacttgtacaggaatgttcatagcagcactatgcagaatagccaaaaggtggaaataacccaaatgtccgtcaactgttgaatggataaacaaaatatgatccatccgtacaatgtgatatgactcagccacaaataggcataaagtctgggacctgctacaacatggatgaacttcagccacatgctgagtgaaagaagtcagacatgaaaggccgcacatgttataattccatttatgcaaaaatatctagaataggtaagaccatagagacagaaagcaaattggcggttgcaagggcttatgggggagtggctgcttaacgggtagagggtttcatttgggggtgacagaatattttagaactagataaaggtggtagttacgtaacattgtgaatgtactaaatgctcctgaattatgcactttagttatttttttatctttattactattttttgagatggagtctccctctgtcacccaggctggagtgcagtggcgcgatctcagctcactgcaaactccacctccctggttcacgcgattctcctgcctcagcctcctgagtagctgggattacaggtgtgcaccaccgcgcccagctaatttttgtatttttggtagagacggggttttgccgtgttggtctcaaactcccgactttaggagatccagctgtgtcggcctcccaaagtgctgggattacaggcataagccaccgcacctggcttgaattattcactttaaaatggttctttttatgtagtgtaaattttacctcaatggaaggaaaaaagagagagagagagagaatggattaggccagagaagaagtggtggtgggtgcactgggcagaagaaatcacttgtgcaaagcaaggagggagtgaaactgctttgtacggtggagaacactgcttttgagtccaacacaagctcaggcttggggaaggaatcagataaaaatttccaggatctcagagttccctgtgctccacacgggttggcagacagcacccacatggagtccttctgctcgtaaccagcaccctgcaagcttcccacgcctggaagtggtgtgtttttgatgggaacgtcaggccagaggtctcccagcagcccccagctcggagccgcgctggcagctcccaggccttctcctggagcccgctccctctcctgggggccctgtgagcatctgagcctataaatctctcctgctctgggcctaggattcacaaggctgccaggaaagcctgcctctctccctgaagtagtggatcaacacagcccatctgtctgtccatctcaaaatctttccttaagatagtggaggttgtctgggccggtcccaggaggttctctctgtctgggttctaatcacagggtacctggttcttctatccttcaccctcttttaaaaaatcactttttagtactttgggaggctgaggcgggcggatcacctgaggtcaggagttcgagaccagcctggccaacatggtgaaaccccgtctctacaaaaaatagaaaaattagccaggcgtggtggcacgcacctgtagtcccagctactcggggggccgaggtggaagaattgcttgaaaccaggaggcagaggttgcagtgagccaagatcgagccactgcactccagcctgggtgacagagcgagactccatttcagaaaaaaaaaaaaaattaaactggtttcccattttgctctgtcctcgagtgaatttctccccctgggtggaagctaaaggcacgggtatctgtctgtctccagagtataatggagagattaaagtttgattgcttttttcctgctttttttttctttgagatggggtcttgctctgttgcccaggctggagtgcagtggcaaaatctcaactcactgcaacctccacctcctgggttcaagtgattctcctgccttagcctcccgagtagctgggactacaggtgcctgccgccatgcctggctaattttttgtatttttagtagagatgggtttcaccatgttgcccaggctggtctcgaactcctgacctcaggtgatccacccacgtgctgggattacaggtgtgagccaccacgcccggcctcctttctcttataaatagggacaccattgatttaggtctcactccaagccaggatgacctcatctcaacatccttcccttaattacatctgcaagacccttattctaaataaaatcacaggtgggatacagtggctcacgcctgtaatcccagcactttgggaggctgaggcaggtgggtcacttgagcccaagagtgtgaaaccagcctgggcaacatagcaagacccaatctctacaaaaaatacaaaaattagccgggcatgctggcatgtgcctatagtcccagctacaggggaggccgaagagggaggattgcttgagcctgggaggttgaggttgcagtgagctgagatcacgccactgtacacccacctgggcgacaaagtgagaccccatctcaatcaattggttagtcaataacatcgcagtctgaggttctgagtgaacatagcttttgggagtcacagttcaacccaccctagtgaccttgggcaagttgcctcacttctgaacctcactctccttatttgtaaaatggaggcaatgccagtgcccaccccaggagctgctgagagaattcagtgggtcacttcaacacagaagttcagcatacgcctgcagtgcagtgagtgctcgggagatcggagctgttagtgggatcctaatgcggtggctctttcttttctgtctttttttagctttgtggtcatgatggtttcataaagaacaataccgactctttttctattgaccatttttggtgggatgaggaaaagattgtatgtgttcatagcacaaacataaccaggatagaagtagaatgggtgaaagtaggtcttcctcctgtcccttttctcaatacttcaggctcaggcctgtttgttggttttttttgtttgttttgttttgtttttggagtctcgctctgttgcccaggctggagtgtagtggcatgatctcacctcactgcaacctccacctcctgggttgaagtgattctcctgcctcagcctccggagtaccttggattacaggtgcatgctaccatgcccagctaatttttgtatttttagtagagacagcgtttcaccatgttggccaggctggtcttgaactcctgacctcaagtgatctgcccgcctcagccttccgaagtgctgggattacaagtgtgagccaccgcacccatcccaggtctgtttttagagatagggtctcactccattgcccaggctggagtgcagtggtgtaatcacagctcactgcaaccttgaactccttggctcaagggatcctactgtctcagcctcccaagtagctgggacaaggggtatgtctatcacacatagctaattaaaaaaaaatttttttttgtagagactgggtcttgctatgttgtccaggctggtctggaactcctggcctcaagtgatcctcccatctcagcctcccaaagtgttgagattacaggcatgaaccactgcatcctacctatatatctgtctttttaaaacacaaaaggtataacactatgctacctcatcttttatttttagcttaatatattttggatatttttctgtgtccatccacaaagctctgcctggttcttttcaatggctgcctattttatttatgtatttatatcttatttgtttttgaaacagagtcttgctctgttgcccagcctggcatgcagtggcacgatctcggctcactgcaacgtccgcctcctgagttcaagcaattttcctgcctcagccttctgagtagctgggattacaagcgtgtgccatgacacccaactaatttttgtatttttagtggagatggggtttcaccatgttagccaggctggtctggaactcctgaactcaagtgatccaccctccttggcctcccaaagtggtgagattacaggcatgagccactgcgcccggcctgcctatttttaaatgtgccattatataaacacaccagaattgaaaccccagagctgactagtctttaggccttttgtcttgaggatttcgttcaaccaggccacccaaacatccatctataatccgagggaagagagagagaactgattggagttgggcatagaatctgaggaacgtgcccacatccaatcagttctctcttaagattacagatggaagaaagagtcatctctttcaccttgccttcttcagtcccatccatcctcccattcatattcccatccatccatccatccatccatccatccatccatccatccatccaactcatttaccggcctatacactctgtcctccctcccattcacccacccatccactctctcatccactcactcatccttccctcctccgtccaaccatccgtccaaccagctatatacccacccatctacccatctacacacccttccctcctttcttctttctttcttcctatctatccatccatccttccttctttccatccatctattcgtccacctacccacccacccactcatccatttgtcttcctgtctctctacctgtccatctatccatccttccatccagccatctgtctgcctattcacccagcctcccatccatttatcctcccgtccatttacctatccatccattcttccatccacccatcctttcttccttccttctttcctttcttccttccttccactcacttgcccatccacctcttcttccatcctcccatccatctactcatctatccatccattttcccacccatctgcccatccacccacccacctactcacctactcatctgcttatccaccctcccgtccatctgtctattcatccacccacccacccatccatctacctacccatctacccacccttccattcacccatctacccttccttcctttcttccttccttccgtccactcatcttcccatccatctactcatccatccctcaatccatccatctaacaagcataattcagcacctaccatctatgtgccagtactagagatacaatgtaaaaccaagcctaggagatttttgatgaaatgaagcttgtgagagctgagcactgaactagtaggactgaagccagggagtggatttaagaaatgcttgccactgtggcattgtctaccagcagatatgatgctgggatttctacattgttaggtgaccattgaacgtattggtaactgttctcagatctctctttgggaaggaaatgggtcttcagagcctggctccacctcagaggcctctttaagagtagaaggtgatggataatgtctgcttaatcacatctagttctttgatgacctctgtatcttttgggtttctctggtggtaaacaagagagactgactctgtcatctagtagaggaaagggatttgtaggggagtatggaggagctcacagttgcagtgggaacactaggaatcaggctaggtaaatgacagaaactgggctgcttgggcccaggggcagaaaggaagtctgcctcagggctctgtccacctgctgtgcttccctgtccttgactgagcttggagttttaggccagagagtctgaccaatgcagcctggaacacattcttacctctttgttgaaggtacttatgaggcagtcccactaagactgtacatgacggtaggggtgatgggggaaacctcaaggaccacaggatgcttctggaagaagaggaaatggatgctggatttacaaaaaaacacaaatgtgcacaatactatattacagatgaaggaactgaggcatggagtttaagaatatttgcccaaggccacagagcggagaagtggctaagggggaccccaatctgtatagatccaacatctgcgtttggtccctaacctaatctgggtggggtgggcctcccgggacacctccagagctgatgtggctggatgctaatgactcctggatcagtcaggctccagcatctttctggggctgcctctgggactttggggctgcccttttggctttggtcgtggcccctgtagcctgggcaatgagcccagctgacctgttgtcacttccaatgaggccagcatggagaagctttagaatgggagggccctgggaggagccaagtccagacccttagctcagagctcattttaattcatggctcttttttcttctttctgtttgcagatcgggaggaccagtccattctatgcacgtaagtggaactgctttttcttctgttttttttttgtttttttttttttttaatctgtagtcgagatccaacctatgaaagaaaagatccatgagtgcagagatctttgatttgttcatggttccaagtgcctctctttatacctggcaccatgtagatgctcactaaacatttgtgatatatggtcttctgcggaggcaggcaaacttaaactcttaatgacacctgctatcatttggttccatacctctcctccttctaaaaaactagcatttattgaacatgtactctgtgccaggacttgaactaaagattttatatgcagaatcttatctaattgcataacagccatctgtgttgatagggaagatgttaaactgtcactttagtatttcacatttatcaagccacaaacacatcagtgccatatttggtgattggtatcactgtttctttgaagacctaggtacataggcagaagatagtaactcaattttagaatcattgagagagttttcactattgtatttatatgcaagtaacatatattaatatatattgttgattcattgacattgaactcacagccagcagctctgtggctgatgcctggatgaagtttatctgatgtgtatttattacataatgggtatcacaactttattgtgcttggaaacatgagccaacacttgagcactatgctggggacatttttgtatgtgtgctgccgaagggagcacatctgaggggacattttaaactgcaaaataactaacaaaaagccacaaaaatacaaaaaaaggtggcactaaatacactacagaaaggacacttgtttacagtatgagagttgaaactagaaggtagagcattcccctgttcaacctgagctgggaacgtgtgcattgggggaatcgaattttccttactctgcacatgttcacaaatgactacaaaagtgccatgaatattgattttggggttacaaataactttcagcaggtcggtgaatttgaaaatatagaatatataaataatgaggatagactgtgcatatatatatttacataatatataatatgtattatatttaatatatttatatttatatatatatatatttgaaggtctggaagcaactaaagctataatcaacagaggttatttaaataaaatatagcatttccaggtagccactacaaagagtgaggctgatctatttatgctgagagagaacgctctttatagataataccgttgagtggaaaacacaggggcaaaccagcatatgcataatgtaaccgtgtgtgtctttaaaaagagcaggattgcatggacgtgcatatgtttcctatttgcatgaaattatctggaaggacaattaaaaactagtaattagaatttcagatggtgatggatggtaggatggcaatgaactgtattgagagaagattgaaacaattaataagtttggggttgatatagatagaaaacctggaaacaataaaacaaaggcaattataaactccaggaaaaaacaaaagttgggatggaaggagaagtaatcacattggactaaggagcccagctgtgcaagtttggagtatttatctaaccagaataactccctgtgatggacttggctctgtggggaaagggaagaggattagatgggaactgaattctcatattccatggtaggatgtacacatttgatgtttgacaatgaatagtctggatctagagatataatgctacctagctatgaggatataaatgctaaaacaacctgccgacttggtttcctagttttctggcttctaggggtcacctgcattccttggctcatggtctcttcctccatctttaaatcctgcagcatggtatcttcaaatctctttctctggtccccctacctctctcttataaggcccagtacctttgtggttatattagccccacctagatgatccaagacagtctcctcatctcaagcaaacatattcacagattctgaggataggccatggacattcttgtgggggctgtttttcagctagccacagaggcatttgatcccctaggagccaaacccatgtgtgagccacatgtcatctccccaggaaccaaaatagtgtagctcaactgccctctgttgagtgaatgaattaagtgtggtaacagagaggtgcaggaaagagtaggactttcagatggcttcctagctatgtagctatgcacgggtcacttgacctctctgagctgagcttatggagaggctgtgaagatgaagaagaggccaccctgctctcatttccagcacccatgccatcagcaggtgctgtttcatctaaaacggtgctatccaaaagaactttgtgatgagcacaaagttcacttaaaagttcacttaattgagctcttaaaaagtggcaagtatattgcagaactgaatttttaagattttagttaatttagatagcggttcctgccttggacggtatgatgctgaaatatttctcatctctgtccattcctctgactccaccgcctcttcctagttcagggtcccgtcacctctcaccagggcctctgtagcagtctcttaagctccctgctcccattgcttgcttgcttccttcctttaataaatatacattataagaatattcactcattattcattgaataaatattcattagcatgctgtcataaagtgtggattccagaacctaaccccttgggtttgaattctggccccatcatcgtctagttagttgtatgctccaggaaataagtcagttcacttctctgagcctcagtttccccatctgtaaaatgggaacaataagcaccccattgggttgttggaaggatgaaatgagtcactacatgtgaagaactgagaaacaggccactgccccatggtgagcactttgtaaggatcagctgctattgtagtgaaagtgctcactattttttaaaaatccttcctgcaatccagtatccatcttgcagtttgtttgtttgtttgtttgtttgtttttgagatggagttttgctctcattgcccaggctagagtgcaatggcgtgatcttggctcacagcaacctccacctcccaggttcaagtgattctcctgcctcagcctcccgagtagctgggataacaggcatgtaccaccatgcctggctaattttgtatttttagtagagacagggttttgtcatgttggtcaggctggtctcgaactcctgacctcaggtgacccggggagcctcggcctcccaagtgctgggattacaggcatgagccgctgagcctggcccatcctgcagtttgttgttgttgttgatttttttgttgagacagagtctcactctgttgcccaggctggagtgcagtggtgcgatcttggctcactgcaacccccgcctcctgggttcaagcaattctcctgcctcagcttcccgagtattatgccatcatgcccagctaatttttgtattgttaatagagatgggttttctccatgttggccagcctggtctcaaactcctgatctcaggtgatccacccacctcagtcagcctcccaaagtgctgggattacaggcatgagccacttcgcccagcccatcctgcagttctgattctccccacactggttctaaagtcccgttcccctcgtgaaatggtttcctgcacccatgagaataaaactcagattccttactgtgacttggaagactgagtgtgatctgctcttccctcttcacttcctgctgtcctcctctgttgtggccctccagccatgctgggagccattctgtctcatacctgggcccagcatttccctcccttggacctctgtccatactgtttgccctgcctggcccacccttccctccatccttcccacagggctctcttgtaactttcaaggctcagcaactccctggcttccccatccacagcctcccctctcctcccttcccctcgatcttctcagtcacatcacccagatgtagcaatgatatctccaccacgaactatcttgattatttgtttacttggctattgtgtatctccatctcctggaatgcagcgttagcaaggacttggcacactgcccacacacagccagtgctggagaaggaggccttagccattgttaggaaggaaatcccaaaacgatcagacttttatttgcaaatgcatccagtcagcccagaaccaccaacatcttcagtctctgtattcaattttattttgcttgttgtgaaattcagccaaagtgacttgaaggacctacaagttgacagcagggctgagcttttacgcgtagttggtgcttaagagaagccaggctggagccaactgtttggttatgcagttaagaaactgaaaattggccgcgcactgtggctcaggcctgtaatcccagcactttgggaggccgaggcgggcggatcacgaggtcaggagttcgagaccatcctggctaacacggtgaaaccccatctctactaaaaaaatacaaaaaaattagctgggcatggtggcgggtgcctgtagtcccagctattcaggaggctgaggcaggagaatggtgtgaacctggggggcggggcttgcagttagcagagatcgcaccactgcactccagcctgggtgacagagcgagactctgtctcaaaaaaaaaaaaaaaagaaaagaaaagaaactgaaaattggccacgcaccgtggctcacgcctgtaatcccagcactttgggaggccgaggcgggtggatcacgaggtcaggagttcgagaccatcctggctaacacggtgaaaccccatctctactaaaaaaaatacaaaaaaattagccgggcatggtggcgggtgcctgtagtcccagctattcaggaggctgaggcaggagaatggcgtgaacctggggggcggagcttgcagtgagctgagatcacgccagtgcactccagcctgggtgacagagcgagactctgtctcaaaaaaaaaaaaaaaaaaaaaagaaaagaaaagaaactgaaaattggctgggtgtggtggcttatgcctggaaactcagggccttgagaggccgaggcgggagggtggctggaagccagaagtttgagaccaaactgaggaacacagtaagaccccattactacaaaaaatttaaaaattagctaggtgggatggtgcatgcctgtagtcccagctactcaggaggttggggagggaggatcacttgagcttgggagttagaggctaagtgagctatgatggcaccactgcacctcagcctgggcaacagagcaagacccagagacaggaaggaaggaaaggaagggaaggaagacaagaaaggaaggaaactgaaagctgaataaatgtaatttttaggcctgagttgtattttgtctagcatgtaatccatccagtataatcagtttaattagaggccatgggcctggctggagatagagctgtgtgatcagggggctaaagtaagaggaggagggtggtttcacataaaattagagagaggtaagggggtgcttccaggccctggggaggagtttaaactttcgtctaaaatggatgacaggctgggcatggtggctcatgcctgtaatcctagcacttcgggaggccaaggcaggctgatcgcttgagctcaggagttcaagaccagcctggccaacatggccaaaccccctctctacaaaaacaaaaattagctgagcgtgatggcatgtgcctgtagtcccagctacttaggaggatgaggcaggaggatctcggttcactgagcctgggaggcagaaagttggcactgagccaagactgcaccactgcacttcagcctgggtgacacagtgagaccccatctcaaaaaatatatataacaataaaataaataaatgaaatggatgagaacgtgctaagggactcaagccaaggaaggacaaagtttaaccagtgggtcaaatcaggcccttgtctgtctgttccagataaagttttattgaaacacagccgcacccacttgtttacgtatttgcttttgtgctgcagtggagagctgagcagatgtgacaaagaatgcgtgaccctcaaagtctaaaatatttactgtctgaccttttacaaaaagagtttgctaactcctagcttaaacagtgggaaaatgtgaatattatttatattgtaatgataggatgaatgctgaaaatcattatacaaacaatatataacttctgtggaagcagtggttataaaagtaataataggtgggcacagtggctcacacctgtaatcccaacactttagggggccgaggcaggaggattgcctgaggcctggagttcaagactatcctgggcaacttagcgagaccccacaaaatcaaaaaattagctaggtgtagtggcacatgcctgtcatcccagctactcaggaggctgaggtgggagggtcacttgaacccaggagttcgagattgcagtgagtcaagattgtgccactgcactccggcctgagcaagaagcaaaactctgtctcaaaaaacaaaagtaataataactaacattttggcataccaggcattgttctaagcattttatataaatgttcactcatttaatcctcataagaatcatataaaaggtcaggcatggtggctcatgcctgtagtcccagcactttgggaggctgaggctagagatcacttgagaccaggagttcgagaccagcttgagcaacatagcgagacccctgtctctacagaaaatttaaaaatcagccagctgtggtggtgtgcacctgtagtcccagctacctgggagattggggcaggagtatcacttgagcctaggaattctcagctgcagtgagctatgattgcatcactgcactccagcctgggccacagagtgagatcttgtctcaaaaaaaaaaaaaaaaaaatcatacaaggtaagtgtttttattatacccattttataatggggtaaagaaactgaggtatggagaggctaaatgacttgcctaaggtcacccaggtaactggcagaggagggatttgaacttgagcaacctggtcctggagcccattatgctattctgccaattgatgctataggggagagaggcgttgcttctgcctggggttttgcaggacgtgtaggagttgtacagtacaaaatgccagggtgctttgccagtcacataaagaccagggactgaatagctgtgaggttcatcagagacaatttggctttcctaccagtggcaaaccacaggctgcaatggacttggcaatattcgaccctgggagccaggaccagctgcagaatttgtagaattttgcaaaatgaaaatgctggctgagtgcagtgactcacacctggaatcccagcactttgggaggctgaggcgggcagatcacatgaggtcaggagttcgaggccagcctcgccaacatggtgaaatcccatctctactaaaaatataaaaattacccaggcatagtggcgggcacctgtagttccagctacttgggaggttgaggcaggagaatcacttgaacctgggaggtagaggttgcagtgagccgccatcacacactgcactccagcctgggcaatagagcaagagtcagtctcaaaaaaaaaaaaaaaaaaagaaaagaaaaaaaatgcagagcgtttataaagaattaggaagaatttccagatggcaacattagagtatgaagcacagggtggtccctgtgagacggtacaggtcacactcatgaagccagcctggctgggggattaagtggccattgggtggttcttcccagctgctggggctggactgattaaaaggacttggcactggggtagttacaaggccaggaggccataacgtggtcatgagtctggtccttctccgggaagagggagctcagtaccaaattccccaagaaataagaaaggagtttagggtgctcagaccaggaaggcatcttcacccctagaggtcaggggtcagaaaagccaagctatgaatgtttctagaaccagctctaagcacatcaaccttcagacgcccacgagcctggagcttgggatgttttctttggcagaacctcccagggcaatttatttttctcaacagaacttggaaacagtggagcccagcagcaacatgggaaggggtagatgcccagagtttatgtcccactccccatcccaggcaaagtgggagaccatagccacggatagggcacattgatgtctttgtttttttttttgtctgtctgtttgtttgtttgtttgtttgttttttgagatggagtctcattctattgcccaggctggagtgcagtggcacgagctcagctcactgtaatctccgcctcctgggttcaagggattctcctgcctcagctccccaagtagctgggactacaggcacccaccaccatgcccagctactttttgtatttttagtagagacagggtttcaccatgttggccaggctggtcttgaactcctgacctcaagtgatccacccgcctcagcctcccaaagtaccgggatgacaggcgtgagccaccacacccggtgatgtctttgttgtaaaagggaggaggtgagagaggttcaaggccagggtggaaaggaaggaactattgtgggaaaggagaagtgagcagcagcagtctaggagcactggtttgtcagcatgaagagtgtgatccacacatgttgtttgtgcacactgctgtcctgattcttgtcttggatctgaataggttcatgaccacctacgcaagtggtttcctacatccaaaaatttctctcctttctcttgctttaatcagaatccaaccccttcactttagaatgaagtcaagcaaggttctgacgttagcctgattgaagtaattcatacttaggtgtgaatgactgagtggcttggttcattgattggggcaagtaaagcctcctggaatatatggcagaattccagtggagtggggctgggacttcactctgtcttttctctttgctgatttgttaaaataaaagggtaggaggcagaacatgggccctggtgtcaagtggacctacgttcaaatcctgcttctcctccatttcctatctgtgtgaaagcaggagcaattgtgggctggagcaatttacttcaaacctctctttgcctcagtttccccggatgggtgatggggataattaataactctctcattagattgctgggtagagtaaatgaaaagatctgtgagcccaaagcctagtactgtgcaggccttcaacaaatatcaattccccttcccctgcccttcttctggccttagaaagcaagtccctagagggttgggcctgtgtcatggaacaacttggtgaaatgtagtaaaaggaattctgactgcattagaatcagagacctgactttccattctgactgtatcccttctttgctgtgtgacctagggaaaattgcttacccactctgggcaagactcttccttctataataacatggaagcaggaagaggataaaggaaataattcatgtagagcatttagcaaagggacccttccccctatatccccccaatgacaaacgccaattcttctctgtcttaagagatgggatcttgctatgttgcccaggcttctctcaaactcctggcctcaaggcatcctcccaactcagcctcctgagtagctgctattataaacgtggccagttctctgctgcacctggccagttctcctcttttacacacacacacacacacacacacacacacacacacacacacatatattctggtcttagtttccccttctggggaaatggggtaatgccttcatggtccccatttcataaactgcctctgaggccatgtgaaataatgtggccattgggaaggaaggcctctaggaagggaagggaccacacaaagtcaccgcaagatgtttcatcattcttggccatcagacacttgatttctggacagtgggacctgtaggattaggcacagcaatttggggcactttttttttctttctctttcttttttcttttcttctatttcttttttaagccatgagccaagttattaatgggcctttggcagagaaaattaatttctttatttcctaattaggaagaagagcagagactgtactagctttggtggcactggttcagcacagagaaccttgggctgacctcggggtgaacaaattcttttttcaacttaaaaaaaaaactctcttatattttagagtattaagtgagctcagaaaataaaagagataaggcaaagaaaggaaacacaaaaaacaaaagtaaactgaaaaatagaagaagacgataaacaagtgaagttttggtcaaggcactgtccttatctttcactaggagtggtggaacatagaggcagtatctggatggagcggttccattgtgatgatttctggtggccaaaacaggcagctagtgcacgaaagccatcttggtaaaaaaaaaaaaaaaaaagatctaccttcatattccaggaggacatacttttttgatacgacaaaccatgtcgtgctgatctaaacatatcagtcatttacactttagtgtgaattacttcaactgggtttattcttagatacttggctgagatcatcagccagcttcctgatacatggggtgggattcctcagaggataaaggggcttgcatctgcccagtgaccaatgggataaccggttttttggtaaatttttctttccataagggagcttcttaaactttaggtcctggtactccagaggcacttacatcctttcttgaaggctgccttgtgcctggtctttccatttctagcaatgctaatgatgtctgcaggcggatcacgaggtcaggagatcgagaccatcctggctaacatggtgaaaccccgtctctactaaaaatacaaaaaattagccgagtgtgctggtgggtgcctgtagtcccagctacttgggaggctgaggcaggagaaccagggaggtggagcttgcagtgagctgaaattgtgccactgtactccagcctggggacagagtgagactccatctcaaaaaaaaaaaaaaaaaaaagtagataattccaaataaacctgtttggacctatgtaagaaaactaaggttttcttgttcactctatttttttagagatgaggtcttgctctgtcacccaggctggagtgcagtggtgtgatcatggctcactgtggcctcaaactcctgggctcaagccatcctcccacctcagcctcctgagtagctgggactacaggcatgcaccaccaagcctggttaatttttcttattttttatagagtcagggttgtgctgtgttgctcaggctggtcttgaactcctggactcgagtgatcctcctgcctcaacttcccaaatagctgggactacaggcatgtgccaccatgcctggctaatttttaaatctttttctagaggcagtgtctctctgtgttgctgagctggtctcacactcctgggctcaaatgatcctcccacctcagcctccccaagtgctgggatcacaggcatgagccaccacatccggcccaccttttcactctttgtatctgaattcttttctatgtcctcttggaaggaatagattgggcattggacctaggctggggacccagttccgctcactaccagagatgtggccttgggcaagttacttcccctctgggagcctctgtttcaccctctgggaaatggtggtgatgatcattattgtcctgcctggctcatggaactgcggaaaggtcaccatggaacgtgtgcatagatgatgttcccgtgtctttcagaggcgagtctggagccgggaaaaccgaaaacaccaagaaggtcattcagtacctggccgtggtggcctcctcccacaagggcaagaaagacacaagtatcacggtgagtggcagttcccaatcagaggccatgatttagccaaccggtctccagcttgcagcccaaccgagatacaaacagaacatcattgcaagaactcaggccccatctgactacccctcccctgaagactcaaagagggaccgtctttttggcgagcaggcctgttgagtgtgggtgatttcttggctcagctagaagcatccctccagaagggggcccgttttgtgaaatgagaataagccctttccttccatagcgagatcttcctccacgtcggggcttctcagtggtggcactgatgtcattttggaccagataactcttccttggaggggcttccctgtggctcgtagaatgtttcacaacatccctggcctcgacccgccagatgccgacagcccccttccctccagttgtgacaaccaaaaatatctctagacattgtcagatgttccctggggtgggacagttgcccttgattgagaagcactcctttcatgaatctctgtaacgtcccaggggttaaggtaccttttgggttcccggattcctccacgtgtccccctgtccctgggatggagatgctggtatcactcggcccgtgggcttcagtgcaatgccattcagtaactgtggattgagcacctactgtatgccaggaaccacttggggtggggacctggggataagtctgagagatgctgttattctcttctctgagcttccagacctgtggaagagcatgtagttgtcaaagaatccctcaaataaacagatgatgacacggtatgactaagagcttgggaggaaaagaagagcaggtttctagagtcatcacctctagggcccatccttctcttcctcctcgtgtgtcagccctgccccatctatcccacaggagggggcacgtggtagggccgctaggactggccggtgcctccgtctgcaggtttgtgggtgggaagatggtaggatggagatctgaccacggcatggggtgtctccagtgttcgccattccagatgtcactttgcgtcctcagaggggactctggggcagccaccatggccggcttgtctggaggcccttggagatctaggatgggcgctggtcgtggctttggagaactttccttctccaaacaaatgcaggaaactcaagattcagcatcctagaattgtctctggcaagttggtttccagccatagtgagtgggaacaatggccccagaggctgtgtggcagtttaaacacagtttccactgccttccctttccctaaagagtaaacacaggagataatactttctaacaactcatcgttatcaagggcctactatgtgctgcttgttttggctgcatgcgtaaacacatctcagacattgtctcactggatactgttttaaggagcctaatgtggccccagtaattatgaaaacctttgaaatgtctggatctctaagaaattagaaaaaggagggaatggctgagcatgggggctcatgcctgtaatctgtgttttgggaggccaaggtgggaggatggtctgagcccaggagttcaggaccagcctgggtgacatagtgagaccctgtctgtaccaaaaaaaaaaaaaaaaaaaaatcaagagaattagctgggcctggtgtgcatgcctgtagtcttagctacttgggaggctgaggcaggaggattgcctgagcccagtaggttgagactgcagtgagctgtgatcgtattcctgcagctaaacagagagaaaagaaacagtatcaaggaaaaggagctgaccagtctgtctgggagactccaggctgtttggggggatcaaagtcatatattctccagcccctgatgtccatgtgatggaaataacgctgacatttgttttatactgtgttgttcaaccacagcaaggcccatcttttgcctacgtgagtaactgagagtgttttcctggtgtgtaggggaggcacggagtgaacttagatctgcatgatcctcttgcacccaccgagtcccgtagctggtggtagaaatggggtaggccctagagtttcacaacttaaatcagtaaatgcaccaaaataccatcctgtgggtgtctgatgccagggaagggtgtgggggtgcatttaccacccacgggacgcctattggagtccccagggttgcgctccagcctgaaatggatttctccggttcagaatgaacccctgcacccttcaaagcatccgctcctggtacccttgactggaacaacctagacagagatgtctgtcccatctggctgagtgttttaggactgtcaggccccaaagcttccctggctcgatggacagtcgatggcacagctgtggcatgcctccctcttctctccctgccatcatccctaagtgtcttccctcagccctgtccctggtgcaccagtgtgtccctgtgcatgcgtgtgcagtgcgtgtctgtctcttgcatgctggttgcttgactcaagcctccagaaacagtcttggaggtcgcgatgcactagctttggtggcgcggtaaggccccagctacgcaacgcataacctggtcctgcttggacctgtgcatatgtaaactcatctctaacacagagcttggggggctgatgtgtgggtcccagcctagaagaaacccacaggtgtcttccttggctcccgaaaagatcattcaatccatcttagttagaccctgggtgactgtgttgcagatcagaaggagaattacagttcttatttgggatctgcttttgtgtgaccttggccgagtcagttaactcctcggggctatggtttcatcatctataaaattgagggtttgaaccaggtcccccgatttaaagctctcttgccaagacttttcaaccttacctgccagaatccccattctagaaagggagcctttttcagagagcatggagaccccaagtttatgtgaacaaaagtgattcctttagtcgtcttcccaccaacaaagaaatgcccgtggtgctccttgtaaatttccaccagtctcagctgtggtgattccacttgtagctgagatttgtatgcggatgaggcttttgcttcatctttctctgggagctacaaaaaggaggatgtgtggacaaatcaaaacagaaacaaatagcagcttcctgctttgtcctgtagaccaggtaccctgatgccttcctagcatgcggaggaatgaggaggaagccatgcccatccttgtcccctctagacactttcccggctcctgtccagcccagccctgatgcctggaaaaataaggaagggaaagcaggaggggaggacaaggagaaaaactcccagaatccagggcctggaggcctcggggcccaactgcagccgccatgttttagggctaggccaagagcagctcgtttgctttcccagcttaacttaccacattggccctttcctgccatgattaatcacgtgaccgcgtttgtgcaaaggcatcccggcagagggggccggtgggctgtgtacagtctcagcttcctttaacccaatgaatggagctcaggcaacctgctttgaagctttattccgcagtccgctaagaggattcctggtgggttttgtgcattccttacttgtctgctgtagaagacttcagaaaaccagtcctgagaaagaaaaaattgcaacttaaaaaaaattgcactaaaataattagaaggaggcttgtagtggtttaacttgaagaaggctgcttgttaaacatgaacagcagcacgactgccatgtacagtgggacaggtggtgcactgcacaactccggggggcaccattcatcatgatgtaaatgacatcaccgacattgtgcaaggcagtggctttgagtggcagtgatgttgcacagatgagcaggccctggtcttgaaaaaagtgaccttcctagggagcagatgtcctagctattagagagctcagacagttgcttctcttctgaaatcctcctgtaaatctgaacattagcatcagggtctaagaggaggtaggagataggagagaacctgtgggttaagggcagagttttgtgacaacatccatccaaggtagaactgtcaggacctaggttgctttctccaataactagatgtgaatgaattttagggagagctggaaaagcagcttctacaagcaaacccgattctggaggctttcggcaacgccaaaacagtgaagaacgacaactcctcacgattcgtaagtagcaaagccacatggattttccagaaaagctttggtgtcatctcctgcctggggctgcagagtgtttgcgtgcagaggtgggaggggcatctgaccctggagagatgggctgtatctcacaatcttgcaagggctcctgcctctcactctctcattcattcattaatttattcactattcactcaacaaatattgattggcctggtgcggtggctcacacctgtaatcccagcactttgggaggctgaggtgggaggatcacttgagcccaggggttctagaccagcctgggcaacaaagcgagatcccatctctattattaaaataaaatttaaaaaattaggtattgagcacctggtatgggctagacccttatatccgataccattttatgtaacaaaacatgaattgagtgccaactgtgtaccaggcacacacctcctccaagaaatacttagtaagtacctactgtgtacaattactctggtaggcacttttacatgtaccaccattctctttgtttttttctcatttgctgtttttattaagtgcctactgtataccaggcactcagcgagtctcacaggattgcgatgaatagttcagatatggttccagccttcatgaagctggttcttccaactgaataacagagagtaagtgaggcagggggtactaccttcccatgcacactcccccaggctccaaagcaaaaagtttttgcctgagcccaacagggcaggggaactctgaaagtggatggttgatgataggtagacaacaatggttttattgtgcaaaagaagcggttgtctccgtaggagggtcagaaagatattttagtgagaaaagatgaaggaaaaattgcctctgcattccaggagaagggggtctctgaactgttgctcgctgagatggggccctgtgaaagactctttgcagaaagctctgctctgctgagcaaatgcacatggtggtccctgaccctgtgatccccaaggcccattttagtaacaaacaattacataatgtctcctttcctcgcccgaaattagaatcatagatagtatcacctcctacacgtattagatgaatacacatcagcataatgccctaactggaatatgaagaagaaataacataagacaattcataatgaaagtgtgcatttcaggccaggcgaggtggctcatgcccgtagtcccagtactttgggagactgaggcgggcagatcacttgagctcaagagtttgagaccagcctgggcaacatggggaaaccccatctctacaaaaataaataaataaagtgcatttcagcatatcaatgctcgggccaggccacaccaacagaagacacagtaagagacagacacttaggtctatccacggcgacagctacaaatacaaggaaaagggtcaagttcaggcactgatgatgttggcatgggattttccagaatggcaactgactctcagtgaagcgctgaaccaaagaacaatcttctctagagtcacacagatgggatattcttgtattagaacaacattttaaacacttgttaatgctttcatttaaaagcataaaaatctagaccaggcacagagtggctcacacctgtaaacccagcaccttgggaggctgagttgggaagatcacctgaggtcaggagtttgagaccagcctggctaacatggtgaaaccctgtctctactaaaaatacaaaaattagctgggcgcagtgacacatgcctgtattcccagctactcgggaggctgaggtgggagaattccttgaacccggggagatggaggttgcagtgagccaaagtcacaccactgcactccaacctgggcgacagagtgaggctcttgtctcaaaaaaaaaaaaaaaaaaaaaaaagcgtaaaaatctaaagtcataaaggttaggttctaagcctggctaattacaaacagatttttacctccatgagtggcaggtgagacattggaagagtcataagggatatagacaaggattggcatcagagactctccaggtcattgcaggactcccaaaatatccttggccccactgttcactaacaacagcggcccccccccaacatgtgacaagccaaataatggcttccaccgatttccaaaatctccatagcagatgtgccgcctccactgagaagcactgcgtttgcatgttccaattctgtgcaatgtttctagcctgtcataaatggaagcacgtgcaagacaaatccctaaaaacatcctccactcactggcgtccctgccatcttgggaaggagagtgaagaaggtgcctgggccttgcctgtgaccagccggctctccctggctccatctgggatatggtcatcccaaatcactctactgcatgtttcccaatggggaaagtttgaaggttttgtcaaggactgagcaagcctaggggattgtgtccacacacgccaacacttcccaccatgttatgtcatgatgggggaaaaggatgaaatcctgtctcacctgttgaggaaacaggaaaagggttcatgccaacagatggaggattgggttccatccttggtttcatggcttagctgaggcaggtagatagggccatctttggagatacttgttgagcctctagggccaggaacatgagccattcctgcctaaaggacatcctacacagggcctgcttgggcagtgtggccaatgcatactcacctgtcccacagaaaaggtttaatccatagttggatgatgtggatgttttggagcagggtggggtctggggagggagccctctagcccctgaatatggaaaaaccttctttctgcttagggccctacctctcaggagcaacgtcacgttggacaagtcacttgatctcttttagccttagttttcccagctttaaaatggggatagtgggctgggtgtggtagtttactcctgtaatcccagcactttgggaggctgaggtgggaggattgcttgagtgcagcagtctgaggccaacctggacaacacagtgagatcctatctctacaaaaaaaaatttaaaaattagccagatatggtggtgcatgcctgtagtcctagctgcttgggagggtgaggtcatggggaaaaggggattgcttgagcccaggagttcaaggttacagtgagctgtgattgcaccactgcactccagccctcgctgacagagcaaaaccttgtctctaataaataaataagtttttttaaatagggatagccatgatggactacggtcattgcaaaagccgaatgaaattgatctgtgaacatgttttacacgttctgttgctgtcaggcctggggtggtttcagctcagcagatgttggttccgcctgacaacttgacctgtggggttctgagtgttcgcaagaatctccccgccccacctcccatcctctgtaccatctgcctcctgcttgcccacagcatggggttaacggctgaagttgggcagcaaagcctgaactgtgttttcctgttggcagggcaaattcatccgcatcaacttcgacgtcacgggttacatcgtgggagccaacattgagacctgtatcctttccctgagcctgggccaaatgggtacccctgccccctaccaatctcctgcccagaggctgggagagtccaagagccacctctatctttccagcctcttaggtttcttccagaacaaatctccccttaacagcaggcattgtggtgcagtggttatacatgtgtggaccggacccctggtttgaaccctaaacaagcagcctaggctgcatgtgatgctcaaatgatctgtcccttagctgagtgaccttgggctggttactccacctctctgtgcctcatcagcaaaatggggatgataatgaatggtacctgcctcatagaaatgtgagaatagagtgaatgaactcatataaagctctaggcaccatgcgaggtgcagagtaagggctggctacgtagtgtctatcgtatgatcttcacttcatccttattcagccattgtccgaggccaaattctggacctgtcgtcctcttagagagttggtctgtgatcggctccacttcttaggtaggaaattgatgaaaacagagtttacccagaagaatgctggtatcgcaaggaacaagtagagcatctctttcatgaacctgagcggtgaagtggagccaagttagaaatttctggacgtgggggaacaaccaggtctagagttcagtgactgatcagcctcaggagctttgcaggcggccctagggctcaggcttcctgtggaacacgtgcttggcaatgtataggacctgggggcctgacttagcttctttctgcacctgaggtcctctagcagcacctagtggtcccatttttccacgttatgtgccctggataagagggtgggttgtggagtagcttcctctccactgtacttgtctaagctgtggggatttgggaaaatcactgaagctctctgggcctcagttttgcctcggtaaaatgggggtgattgcacctagtttctggagctggtgcaggggttaaatgaaataatatgcataataatatgcacagcccttggtacggtactgggcccaaagtgagcatctcataggtggtggctattgcgttaactcaatgttttctacgtttctactttaatctgcccaaaccagccaggattcccatcctgcagctaggagggctgtcaggcttcggtcaagtccagagccagggccctcttgtcctgcagccctgcacacacctctcagcaattcatttcctgtgtttagagcgagccccaggcatagccccgtccttctggcctcagccttccttttagatcagtggttctcaaagtatgtttccaaaccagcagcatcagcatcacttgggagctctttagaaacacacatctcagccaggcacggtggttcacgcctgtaattccagcactttgggaggccgaggcgggcagaccacttgaggtcaggagttcgagaccacctggccaatatggtgaaaccctgtctctactaaaaatacaaaaattatccaggcgtggtggcatgcacctgtagtcccagctactcaggaggctgaggcaggagaattgcttggatccgggaggcagaggttgcagtgagccaagatcacacactgccctccagcctgggtgacagagcgagactctggctcaaacatacgtgcgtgtgtgtgtgtgtgtgtgtgtgtatgtgtgcgtgtgtatacccatgtacaccatgagaaagtctgagaatcactgctttccagattggacatgggctgtggtagcccgggcactgctagctggctttaggacttgaagaagacaaggtctgctgatctagccccatcatcccgcaccatcatgcttagtgctgtggaaatccacccagtacagtagcccagcctcccagctgccctctcccatcaccccggaccctgtgatctccatgccaccctcacctgccctcccctctgctctccctcctgccaccccgcatcgcggagaagctctcctgaaattaattagtgtggcgtgtttacggtctctctcgcctccatcccgtcagaccccactcttggaacagagggcatggaagacagctttgccacttgttagctgtatcatcttgagaaaggacttctcttctctgagcctcagtttccccttattgaaaacaccgataatagttgcacttatttcctagcatactttgtgaggcttcagtgagacaatttatatcaatcatttcacacaggaatgaatcataaatcataggatcatagatggtgtcattatttgtattctgtcatgtctgaagacagctcattttaaagaagatttgctggtgatggctgttaggggaacatctcgttaccattaccttcttcctggagcctttttatgctttttcttttcactctattcccctcccttttttttgcatctgaagtctgctggcagcacccagcggttccatttgtccataggggcaatggtcaaagttagacattaccgatcccaggggtagaactggaaagtcatcccatgtgaattgggtgtgacagggatggaggtggaagaccagaggaacacccgcagtatccccagaatccctaactccctccaaaccagatctgctagaaaaatcacgggcaattcgccaagccagagacgagaggacattccacatcttttactacatgattgctggagccaaggagaagatgagaagtaagtgactagcaatgacatgtgattggatggcttgagccttccctttcatcagaatccggggttaagggattggctattaaaacagtctcagatcctgccagaaaggaccatgtctgtgagtgacatatgaacagttcttcatctcctcccaatgagtgagtgtggcttgtgttcagtcattctcatttactgagcacctactatgtgacatagtagccatcaactccaattagacattagatcattaatgattcatgtctcattagaccagagagcatcaagtccaactagacacaatctacgccttcaaggaaagggagaaagacatttgccttacttgccaatttataaaacttgcaaatataaaagatgcattctggttttataaggaatttgcaggggcagcaggactaagcatttttcattatacatgttttgccagtgactttgtagaacaggggtcaagactttttctgtaaaaggccagatagtaaatcttcaggctttgcaggccaggtggcttctggcacagctattcaactctgccattgtaatacaagagcagccacaggcaatatataaaccaatgagtgcaggcaacacataaaccagtgagctcaggcaacacataaaccagtgagctcaggcaacacataaaccaatgagcacaggcagtacataaaccaatgagcacaggcagcacataaaccaatgaacataggcaacacataaatcagtgagtgcagatgcatcactgtgttacaataaaactttatttacaaaaacaggcagtgtgcagaagtttgctgacctctgttgtagggaaaagtttttttatgtaaatataatacactgtataccaaactccagtaggaagttatgagttctggacctgcagctgtttactaactcttaaaaatatatacaaatcgcatagcttaaaaaaggaatggatcagtgactatctgtacatagtagagtctacatgttagtaataagttttgagtctgaaattctatgggaacaatacagactttgcttcccatctcttttgtggcccaaggttagttattttggttaagacagttaccaaaaggatctgtgtgagctcagaacttcgctgtgtcggagtgtattgtagacctcagctactagggggtggcattatccattatttaaatttccagggtggggcaaagtggctcatgcctgtaatcccacactttcggaggcagaggcgggcggattacctgaggtcaggagtttgagaccagctcggccaagatagtgaaaccctgtctccccaaaaatacaaaaattagccaggtgtggtggctggcgcctgtcatcccagctacttgggaggctgaggcaggagaatcacttgaacctagaaggtggagtttgcagtgagctaagattgcaccactgcactccagcctaggcgatagagtgagactctgtctcaaacaataaaaataagtttccttaatggctggctttcaggaacataggctatgaggtggagcaatttttggtaaagggggaatgctgaatggattttttatgtaccagcaaacatggtatattagcagttacagtgcaggaccctgtggaatgggccagggaaaaatgttgacattccttttccttttatttggcacccaagaaaacagtttggttgtttggtaccttgggttccagttttgtgctttgcctctggtcttccagaaatgggcaagtatagggctcagaactaaattcccaggggccgtttgtattctagatgatagaactggaaagatgttaggcttttagaaagaaccaaatattgctaaatgcatccaaactcgggataatgaagtcttggcaaagacctcaatcctcgtgacttgaatcaggcatttcaagttaatccaaaagtttgagttaactggtgccttcagtcaatttaacctcgagtttatcaagcagcttccaagtgacttgacccataaaagaccttgattttgaaagaaaaatatcttgctgacgtctctccaaaagtataaccgaatccatcctaattaaagattgatctggaagaggatccttgatgtattggagggtataataaaagcaaatggtgcaggagaaagaaaggcaattataaagttgggggtgggggagaagctgaacaacaacaaaggaaatgtaatcataggatacagtttgacacagaatatctaattaatgtcataaaaagggagttggcaaactgtttttgctaaagggtcagtagtaaacgttttagactttaaggaccagatggcctctgttgcaactactcaactctgttgcctagtgagaaagcagccatgagaaataaacaaggacatcagagcagctgtgtttcaataaaactttatttacaaaaacaacaggggaccagatttgccaacctgtgatataagccttatatattgattcaactaaaaatagctgggggtggctgggcacggtggctcacacctgtaatcccagcactttgggaggctgaggcgggtggatcacctgatgtcaggggttcaagactagactagccaacatgatgaaaccccgtctctactaaaaatacaacaaattacctgggcatggtggtgggtgcctgtaatcccagctactcgagaggcaggagaattgcttgaatccgggaggcagaggttgcagtgagcagccaatatcgcaccactgcactccaacctggacaaaggtgaaactccctctcaaaaaaaaaaaaaaaaatagctggaggaaaggaaaggtagtataagaaagctgcatttttgcctaccatagcaggaagtcactagatactatctaaacttgacatatccagaaatcgcctattacagcgattgtgctttgcctctggtcttccaataggccaaaagcacctgttacttttggcactgaggactggtttcctggaagaaaagttttccacagactgggcgggcagggttggggggatggtgtggggatgattcacgtgtattacatttactgtgcactttattattacattgtaatatacaatgaaataattatactagtcaccataatgtagaatcattgggagcttgttttcctgcagtcccatcggggggtgatgggggacagtgacagattatcaggcattagagtgttataaggagggcacatgtgcagctcacgatagggtttgcgctcctatgagaatctaatgctgctgctgatcttatgggaagcggagctcagacagtgatgcaagcgatgggcagcagctgcaaatagcggataaagcttcacttgctcacctgctgctcacctcctgctgtgtggcccagttcctaacatggaccggtactggtctatggcctatgggttggggaacccttggcctatgatatgtaatacataatggtatatacattataataggctagtatatatagcaagcctattgtacagagagatagtggtaactgccagataaaaagcagctaaaagagataaaagcaggtattatggagtaaggtagagttggagaagggatgtgacaggagaatgctatttttcattataaacctttggtagtaattgatttttaaaactcatgtgcctgtttgaatttgataaaaattttataaatacatgaataaggccaggtgcggtggctcacgtctgtaatcccagaactttgagaggccaaggtgggtggatcacctgaggtcaggagttcaagtctagtgtggtcaacatggtgaaaccccatctctactaaaaatacaaaatttagccgggcgtggtggcgggcgcctgtaatcccagctactcaggaggttgaggcaggagaatcgcttgaacctgggaggcggaggttgcagtgagccgagatcgcgccactgcactcctgcctggacgacagagtgagactccgtctcaaaaaaaaaaaaaaaaaaaaaagagtaaaggttgatctaactcttctgacagctttgtctctgaaggctgaaggcagggtgcctctagacaattgaggtaaaggcatcccttcctccaggtaaatgtaacttcgtgccagggattgtggcttagcaagcagaaccaaggctggatatcagctgcagtcactggagcagtgcacaacctgcaccgctgtgtaaggctggcagtggttggtgaggctgtctacgtgacgatgcgtgagggctttaaacggttcaagccttgataaagggaaaggaattatgatggcccagacccttgaccagatctcggtctcatgttgaaattagaagtatgtcttattgaccctgacctgtcttcctctccttctaggtgacttgcttttggagggcttcaacaactacaccttcctctccaatggctttgtgcccatcccagcagcccaggatgatgagatgttccaggaaaccgtggaggccatggcaatcatgggtttcagcgaggaggagcagctatgtaagcctcacaccttgagtctggagggtagcttgcctggataccagtggaacctgttaagaactcttctctggtcaggacagatttctgctctctgaattccccaccttccattaaaaaaaaaaaaaaaaaaggaggaaaatgaattttattctaggtggtttgtttgtgttgtagaaaagtggctgtataactagggttgcaagtaacccgagctggcttaaaccaaagggaaagtgactaactcagaatgttgagaagttcagggaggttaggcacagtggttcaggtctgtaatctcagcgctttgcggggccaaggtgggcggatcactttaggtcaggagttcgagaccaacctggtcaatttggtgaaaccctgtctctactaaaaatacaaaaaaaaaattagccagggctggtggtgcacacttgtagtcctagctactcaggaggctgaggtgggaggattgcttgaacccggaaggcagaggttgcagtgagccaagattacaccactccactccagcttgggagatggagctagactccatctcaaaaaaaaaaaaagttcaggaattcaagcttcaggtacagtgagatctaggtgttcaaaagatttttctagaacctaatttcttgtcttctatctctctcgactacattgtttctctataggatgcagtttgttgacagcaacatagctgggttccagcccttatattctttgggtttatgtccaaagaacagagtagattcccggcttaagttcctgaatggagtgtcattgactctgattggttggcttaggttgatatgcacattcctgagctatgcagcataggcagggttgtggaaagcgcagggtggtttcattatggtccctaagaatggattcttggagctgaaggtagagatgttggcctcatcaggaacatgtgggcagggtttaggggagggggagtgatcgaggcagtggatttactcaggcttttcctggaggggttgctctggtgatcaattgatattgatcaaaatcatccaaccaatggccaagaaacacactgggtcttgagaacaggacagctcagaaagaaattcttggtcgggacactgtgtttccagaaacgattttccttctgcgttagatgtgcctcagtgttgaaggttaatctctttcaggaacaccaggacagaactgtggaaagtttcccttccttcccacgcctacgcccgtttggagccccagaatagcactgaggttgctgaaatgctgcataaggggaggggcagctcctccgaagataacttggggtctggaaaattaggctgtatgggtcagttgacaaatggatggtgtatgtgggtcttggccagggtcccacatcagaatctagtgctgatagcctccttgtctgaatgacataggccctccaagaatgattcatttcatttgggacaggggtcagttttgcttctaatcttgcttttaaataacaatgaacaatggttaagtatttgctgtgtgccaggaatttaccaaatccttttttcttgatgtactacactgttcagtatagttttatttaaataataaaaaactggaacaggctgggcacagtggctcatgcctgtaatcccagcatttggagacactgaggcaagaggattgcttgagcccaggagttcgagaccagcctggataacacagtgagactctgtctctacaaaaaaaataaatagaaaaaaactggaacaaactaaaataggttgattaatagagggtttattaaatcattgtctgtccttgtgaaagaaaacaatgagaccatttaaattgttttgctgggcatggtggctcacgcctgtaattccagcactttgagaagccaaggcaggcagatcacttgagcttgagtttgagactaacctgggcaacatggcaagatcccttctctacaaataatacaaaaaattaactgggtgtggtggtgcacactgtagtcccagctacttgggagactgaggcaggaagattgcttgagcccaggaggtcgaagctgcagtgagccgagatcacaccactctgtcacctaggctggagtacggtggcgcagtctcagctcactgcaatctctgccttgcaggctcaagcagtcctcccagctcagcctctcaagtcgttgagactacagacatgtgctaccacgcctggctaatttttgattttagggtttttgttttgttttgtttgagatggaggcttgctattgtcacccaggctggagtgcagtggcacgacctcggctcactgcaacctctgcctcctgggttcaagcaattctcttggctgagcctcctgggtagctgggattataggcgcccaccaccatgccccactaattttttttgtatttttagtagatactgggtctcgccatgttggccaggctggtcttaaactcctgacctcagatgatccacccatcttggcctcccaaagtgctgggattgcaggcatgagccaccgtgcctggcctggggttttttgttttgttttggtttgatttttggaggggtgggtagagacaaggcttcaccatgttatccagtattctctggtcttgaactcctgggctcaaacaatcagcccaccttggcctcccaaagtgctgggattacaggcatgagccaccatgcccagtccccagtgttctcaatgtactttggcacttgtttcccctttaaccacagagaccagactccaggcccagcaccttcggcagccccaagcatctagctagaatttggtaatactgttttccttgtatttatatttataattgccatctatttatggcaagtgaagatgatttgtcactgaagatagagaaagttttctattaaaacaaatgtaaggaaagagaaggaagtaaatttaaagaaaatgattaagcaaataatggagcagatggtacacagagcaagcattcagacgatggcgtgcaaatgacgaactctcataggaaccaacttagtcctaaatgtacaccaaccccatttataaaccaagagctacttccaaaccctccatcaaggggcctatggagaagggggtgggtcaggcttcaggctggagcttcatgaggctccaagtgaccaggggacaccaggattttccccaccacattgggttctgcagccttgaactcctggcctcaagatatcctcatgcgccaccatgcctggcctggttatactgcttctaatgtattttgaagataaaaaataaaatcacctaaattgtccatcctgtgtatccctggtggtacacatgtctgatgttggaaagtcctgtttcttattcctcagcaagaagagaggtgtaaggccactgtaaaaaattagcacaaacttgatgccttaaaacaacaggaatttattctctcccagttctggaggccagggttctgaaatcagggtgtcggcaggagccgggcataatggctcatgcctgtaatcccagcactttgggaggccaaggcaagaggatcgtttgaggccaggagttcaagaccagcctgagcaacatagcaagaccccttctctactaaaaatttaaaaaaaaaaaatttttttttttttaaaagacaagatgttggcaggggttgttcctcctggaggcactgagggagatctgttccttgcctctgtcctggcttctggtggctctggctgttcctggcttttccttggcttgtctcactccagtctctgcctcatccttcatgtggcattctactctgtgggtcttctcttctgtccatcataaagacacttgacattaaatgtagggcccaccaggttaatccaagatgatctcatcttgagatcttgtacttgattccatctgcgaagaccgattttttccaaaataggccacgttcaggctgggcgcggtggttcacgcctgtagtcccagctctcagggaggcagaggcgggaggatagcttgagcccaggagttcgagacctgcctgggcaatatagtgagaccccggtatccacaaaaaggaaaaaaaaataaatgtaaccccccaaattaggccacattcacaggttccaggtggacatattttagaaagaccaacattcaacctaatataggtggcttccactctttatcacctactaggccaggcccttgctcagcatcttacaagacctaaacttcacgaagcaggtactactgttaccatctccgttttgcagatagggaaactgaggctcatgggacttattgagactcatgtagagtctctatcctctattcatccatgattcatccatcaatccatcctctatcatccatctatcctctactcatccttccatcacccatccatccatcacccatccgtccatccatctacccacccatccatccatgaacccatcctctatacatttatacattcatccatccattcaccctccatctgccatccatccatctccctccctccccatgtgtatctggacccggaactaggatttggaaattcagagataatgagatttataagaagcaaagctgggatttgaactcaggactctctaactgcagagcgcgtgctttgcaccagcacaccaggatgctgccagccgtcaccacccttgctgtgttgtgtctcctcactggtttacttctttgctgtctgctaattctgccccaaggttcatctcttatggcctgggagtggtggcattcttttgtcatttctggaattacatttaactataccagaaagtgcaaaccaatggttcctgagcccacaggagagatcggccactacaaccttcaaaatttttagaaattggttcctaaagtttaaatatgggtaggccgggcactgtggcctataatcccaaccctatgggaggccaaggcacatggatcacttgaagtcaggagtttgagaccagcctggccaacatggtgaaactccgtctctactaaaaatagaaaaattagccgggtgtggtggcacacgcctgtaatcccagctactctggaggctgaggcaggagaattcccctgaacctgggaagcgcagaggttgcagtgagccgagattgcaccaatgcactccaacctgggtgacagcaagactcagtctcacacacacacacacacacacacacacacacacacacacacacaccaaaaaacatgggtacacttcacataaaaactctgggtttccattatctagaaaaatcagaagttccagcaacacttggcttatatcccctgtggcaatgacggagtagctgctggccccttcagatgggtttgtggcctccttgggtccccacagtcctcattagttggctttgttcatttagaccagtggttctctgccagaggtgagtttgcctcccaggggacattgagtagtatctggtgacatttgtggttgtcacaactctgtcagggtaaccaccactgacatctagtggttagaggccagggatgctactaaacttcccatgatacccaggacagctccccacaatagagaattatctggcccccaatttctgcagtgacaagattgagaaaccctgagttggccggctcgcctgggctgtgcaggcatttcaggaatctttagtttaaattgacacttttaaaactgtgagtgcaactcttcatagtttacaaagactctttcatagatgttatggttaaaaggaagtgtgtttccaagccctgtcaacagcagcttcattcattttggggagaaggctttctaccatagtaagtgggagcaaatggatgggtggtcagcagctgggtccttttgctgagctgggccagggaccccatggcgtgagaatagctgttgtgaagggccttgtaatgtctggtttggcctgaggaaccagagaagtctgggatctctaggctttgttcctggaacatagtgactgatttgaagccagaactctgggtgatttgtacctgagttaagctaagccaagaatttgcattaatcatcatccatccattcatccatctaccatccatccatcatctgtccatccatccattcatccatccatcatccatccatcaatgctgtatccattcctccatcaattctccatccatctatccatcgtctatccatcaatcctctgtccattccatctatccatctatcctctatccatccatccatcatccgtctatcctctatccatgaattattcatccatcaatccatcctctattcatccatctatcctctactcatccgtccatcattcacccattcatctacccacccatccatccatccgtccattcatccatgaacccatcctctatccatttattcattcatccatccatccaccttccacctaccatccatccatctctctccctccctcccatgtgtatcaggaccttggaataggctttggaaattcaaagatgattagggcaggccctccactctccagaaactcatggtcttatggggatttcagacatagaaactattttaacagtaacatggcctgagtatggagtcagaaaggttccaagtattctgggaacacagcgtttttgtttggagacacctggacaacaagtggaaacaaatgtatatcttcttcatcccaacatgggcatctgttacacccagaagagtatgtaagaagcacagggtttttatttcaaaaatccttttattgacatatgatttacatggagaaaattgtgtatgccatagcgtgcagtgcaaagaattattataaactgaacacgtctgtgtaactagaatccattttaaataagacaatgccaccagccccatggaagctcccacatgcaccttctaagaacttccctcaattaaggataatcattatcctgacttctaacagcatcgattagttttgcctcttcttgaatggacggtctatatatggacttagacagtatgttcttgtttccatctgtcctcttttgttcggtatttgtgtctggaagatatgtcagggttttttttttgttttagagacaggatctccctacattgcccaggctgtatcaagctcctggcttcaagcagttctcccacctcagcctcccaaagtgctggggtcgcaggcatgagtcactatgctggccccaatacatcagttttgatttgtggtagttgtagctcattcattctcactgttctgtggcaggggttgctaacacatttttctgtaaagggtcagatagtaaattctttagcctttgtaggccagacgatctttgttgcaactcattaactctgccagtgtagcatgcaaatagttacagacaatatgtaaatgaatgagtatagctgttttccactaaaactttatgtataatagcaagcagtgggccagatttggtccatgggctgtaatttgccagtccctgctgcgtggcattccattgtaatgcaaggttttaagcaaccatatgaaaatattgagctcagaatctagtttcttcagaggaaagatgtaagctggctctgggtccccagtggctttaggctccaaaactccagggtaccttggcattgacctttgtgtctgctctgcccttctctccccacctcagccatattgaaggtggtatcatcggtcctgcagcttggaaatatcgtcttcaagaaggaaagaaacacagaccaggcgtccatgccagataacacaggtacttgccactttttcctgatgaccaatgactttggggttgggggggtgggggaggtgacatttaaccactggttatttttcaaggtgaaggtatctgggattttaacaacagttggactaggttcttatcactcactttttcaaacttttcagtgctcaagaccctatgtggaaagttattgaatcagagcgcagggattaaaaaaaaacaaacctaatagttttatttatttgttcttttttttaaatacaaaattttacaagttttaatagagacgaggtctcgctgtgttgcccaagctgatcttgaactcctgagctcaagtgatcctcccaccttggcctcccaaaatgctgggattacaggcaagagtcatcacgtcctacccctaatagtgaccagacaagatcccgagggaccatctcttctaaaataccccacttaattgttttgttaaagaaatatttctcaagcccctgcaatatgccactgggatacagcaggaaatgacacaagaatagctcttcttacggtatctgtggtcgtcttggggagacagacctcaattgccctgagaattaggggtgccagataaaatacaggatgtccagataaatttcaattttaggtaaacaacaaacctttttttaaattttaattatgtcccttgtaacatttggaccgtgattataccaaaagagtattcttgtttatctgaaattcaggtttaactgagcatcctgtaattttccccctaaatctgataaacctacccacaaataaacagtattttgtgttttgagaagctggcctggctaccactatgcttgttggtggctgagctgagagcaaaacttaggtttcttatttcccagcccaggctgtatattgtgttgctttttcccgctccctagagcccaccttgatcaaacctgttgcaaccgcttactgggtttaccttgcccacagcctagacagagccaattaatcaagacaggggaattgcgatagagtaagagtaactcacgcagagccggctgcatgggagaacagagttttattattactcaaatcaatctccttgagcattcgtggatcagagtttttaagcataatgtggttagggggaggccagtgagttgggggtgctgattggttgggtcagagatgaaattacagggagtcgaagctgtcctcttgccctgagtcagttcctggacagaggccataagatcagatgagccagtttctcgatctgggtggtgtcagctgatccacctggtgccagggtccgcaaaaatatctcaagtactggtcttaggttttacaatagtgatgttatccccaggagcaatttagggagggtcagactcttgtagcctccagttacaggactcctaaaccataatttcaaacctttgggctaatttgttattcctacaaaggcagtctagtctccaggcaagaagggggtttgttttgggaaagggttcttgtgttttaaactataaactaagaggctaggcgtggtggctcatgcctgtaatcctaggattttgggaggcccaggcaggtggatcacttgaagtcaggagttcaagaccagcctcgccaacatggtgaaaccccatctctactaaaaatacaaaaattagccaggcgtagtggcaggcgcctgtaatcccagctactcaggaggctgaggcaggagaactgcttgaacgcaggaggcggagattgcagtgcgccgagattgtgccactgcactccagcctgggtaacagagtgagactctgtgtccaaaacataaaaaataaactataaactaagttcctgccaagttaattcggcttacacccacaaatggttcagtggagcttggaggttagaagcaaggtggagtccgttaggtcagatcttgttcagtgtctcagttataattttgcagtggcagtttcattctcaggtgtttgttatgtattagagtccctaaatctggcaaattaatggaatccggatgccaaggaaagacctcagggaaagagaaatgaaaaagtgctcttgccaagagatggggaaaaaaaaatcctaaaatcactctatttactctgccttgcacatgcaaagcagcatgtaatgctattttcatgttaagggaccagctcgtggtcacaccactgcacttcagcccgggcgacaggaagactgcatctcaaaataaaagaagagcatttaggttgactctagcattttgctattgcaaacaatgctgcaacacatatcctagaagggtgaaagaaatatttattgaacagtaactgttcaataaatgttactattaataactatttaatacttactaagtaactgttaaataaatctcaagggccagtggctcacgcctgtaatcccagcacttagggaggccgaggtgggcggattgcctgagttcaggacttcgagaccagcctgggcaacacggtgtaactccatctcaactaaaatacaaaagaaattagctgggtgtggtggcaggcacctataatgccagctactcgggaggctgaggcaggagaattgcttgaacccggaaggcggaggttgcagtgagctgagatcgcgccactgcactccagcctgggcgacagagcgagactctgtctccaaaaataaataaataaataaacaaataaataaataaataaatctatctatctcagggactttacatactttaccttatttagtcctgggtaccaacaaggtaccgaagagctgaccctttttaaagctgagaaaagcaagatgctgggagggtaaagagcttttccaaagtcacatgacttggaagtgtgaagggacagggacttgaaactagaactacctgaccctaaacccccaactggggcctgcttcagcccaccccaatcattgcctctcagcaaaatactggggagtgtgaccactaatgacagcagcctttaggacacttcaagctatattcatggtcagcgggtcccatttccccaagagaacccgctgtattcacagatcacaaatatcccatgcgatgtgtcttcttgccaagctatttcttttgtgatgcactcacgatgtttcttttctccatccagctgctcagaaagtttgccacctcatgggaattaatgtgacagatttcaccagatccatcctcactcctcgtatcaaggttgggcgagatgtggtacagaaagctcagacaaaagaacaggtaatgatgtacttatcacttatccatccatgcacccacccatccatccattcatccatctatccacctgttcactcattcatgtattcattaatccattcacccatggtctgcctctgcatctgtccatccatccatctttctacccactcattcatctgtctgttcatccatccatccatccatccattcatctgcccatctatctgctcacccatcatctctccatccctcactcatccatctgtccatccatccatgacccagccatctgtccatctgtccgtccatccatcacccatccagctgtcattccattcattcattcattcattcatctgtccatgcatccacccatccatctctttatccctcatttattcaatactagaatattcacagtcccatgtcaggttttgtttgtttgtttgttttttgtttttgagccagagccttgctctgttgcccaggggggggtgcagtggtgccatcgcagctcactgtagcctctgcctcccagattcaaacgattctcctgcctcagtcccccaagcagctgggactacaggcatgcaccacaacgcctggctaatttttgtatttttagtagagaagggtttttgccttgttggtcaggctggtcttgaactcccgacctcaagtgacccacctgcctcggcctcccaaagtgctgggattacagtgtgagtcactgcacccggccaagaataaaaatcttcaccaccagcctggcttatgtgaaaatggagcccattgagaataaccgggttcccctggttgccctctgcaggctgactttgctgtagaggctttggccaaggcaacatatgagcgccttttccgctggatactcacccgcgtgaacaaagccctggacaagacccatcggcaaggggcttccttcctggggatcctggatatagctggatttgagatctttgaggtacagctcggtgggatcctaagagccatggtcttggttgtctgagatgggctttttcttggaggagtcatgattttggagaaaggcatgtagatggctactgtagggtaggaggctgtctagttaagggtggatcattgagggtataagagacagaaatccaacaggaaatgcattggtttctggaactgagaaggccagacatgtagctggatcccgtaggcagggtctgatctcccgccatcgttctctctctctctctgccttcctccatattggctccattctcaagcaggctctcccctcacgggggcaagatggctgccacagctccagactgcctctcagtaatcctggtaaaaaaaaaaaaaaaaaaaaagcacatatctcttttctaacagttccaaccaaaatcttggaattaagtctcactgactcttactcacctgaattgggctacatggtcacctccaagccaagaactgtttgcaggagcttgcaatacctcatgtagtagaaacatggatattggatcctttacccatgggtttgaagaaagttctcagagaaagggaaggttttttttttgtcttgtcttgtttttttttttttgagacagagtcttgctctgtcgcccagactggaatgcagtgtcacaattttgtctcactgctgcctccgcctcctgggttcaagcaattctcttgtctcagcctcctgagtagctgggactacaggagtgtaccactgtgcccagctaattttttttttttttttagacagagtctcgctctgttgcccaggccggagtgcagtagtgcaatcttggctcaccgcaacctccgcctcccaggttcaagtgattctcctgcctcagcctctcgagtagctgggattagtgccaccatgcctggctacttttttttttttttttggtagagacagagtttcaccctgttggccaggctagtctcaaactcctgatctcaaatgatccaccagcctcggcctcccaaagtgctgggattacaggtatgagccactgtgcttggccaatttttgtatttttagtggagagaggtttcgctatgcttgccaggctggtcgcaaactcctgacctcaagtgatcctcccgccttggcctccctaagtgctgggattacaatcatgagcactacacccagccaggaggttttaagattgatagatgtcccgaaagaagtgtactaccgagtcactttctctctgcgcctctgttttcacatctgtaaaatgtttccacatctgtacatgcagtagcgtgccttacgaggtttgtccatccatagatggttgtgcagatggaggagataagcatctttaaggtgtgtgagggccatgtgatatcaacttcaccagccctggtggactctaggcagcatgttttggggcctcagccctgtctgggtgctgggatggcagaacaggatgtgggcgggccatgggggcgctgtcgggtggagcttctgtggggctccttgtcttctgacttcataccaagatgctcacgccccgcccccacgccatgtgctcaggtgaactccttcgagcagctgtgcatcaactacaccaacgagaagctgcagcagctcttcaaccacaccatgttcatcctggagcaggaggagtaccagcgcgagggcatcgagtggaacttcatcgactttgggctggacctacagccctgcatcgagctcatcgagcgaccggtgaggggcacgtgggcgtgcggggctccgtcacaccttgtacacgtgtgtggcctctgtggagccgacgtggaccccacactctccccatgcacatagcattcccccacccaatccatcacccagtcctgaaaggctgtaagctgaatccttgtgaactcttacaatttccattaacccacattttcatatcaaaggtattttctttaatttctgccttccttccatcctcttttttcttcctttttttcttccctaccctctttcccttccctttccttctctgccattgctttttttttttttttttttttttttatgacatggtctgactctgttgcccaggctggagtgcagtggcacaatcttgcctcactgcaacctccacctccctgcctcaagtgatcctcccgcctcagcctcccaagtggctgagactacaggcgtgcaccaccacgcccacctaacttttgtattttcagtagagacagggtttctactaattagccgggcctggtggtgcacgcctgtggtcccagctatttgggaggctgaggtgggaggattgcttgagccctggaggcagaggttgctgtaagccgagattgcgccactgcattccagcctggataacagagtgagaccctgtctccaaaaaaaacttttctaacaggaaccctaggtgaattcaagtcaagcaacaaattcatttgcaagaattatgaactcggccgggcgcggtggctcatgcctgtaatcccagcactttgggaggccgaggcgggcggatcacgaggtcaggagatggagaccatcctggctaacacggtgaaaccccgcctctactaaaaatagaaaaaatcagccgggcgccgtggcaggcgcctgtagtcccagctactcgggaggctgaggcaggagaatggcgtgaacccaggaagcggagcttgcagtgagtcgagatcgcgccactgcaccgtctgcctgggcgacaaggcaaaactctgtctcaaaaaaaaaaaaaaaaaaaaaagagttatgaactcttcatgatgttgcctgcgtgttgcccactagggggcggcagcaaacattatgttctgccttccatccctgttactggtccattgggcacagggtaatttgaaggtagatttggaagcatgggggtcataaactcatctttatatgtgggcaaatacagtatcagatctcggcggatgcccatgcgttgtgtatagttggccagctcttcatggaatgcctgaggttgggtgttctctctgattcaagccctacttgtctcccacagaacaaccctccaggtgtgctggccctgctggacgaggaatgctggttccccaaagccacggacaagtctttcgtggagaagctgtgcacggagcagggcagccaccccaagttccagaagcccaagcagctcaaggacaagactgagttctccatcatccattatgctgggaaggtaccagccacagggcccaggggactctgtctcaggggacccccagtggctgctcagcgcagagacagtctgagagtggcagaaccttgggctgcctggaaactgcaaagccatctgctgctaagcgaatcccaaccaagtcctattcgtaatttgtctacgcatctgtaaggcatcagctgtagccactctcatgttttccaaccgtgacgtccagacagttatttctttctgtttttgttggagacagggtctcgctttgtcgcccaggctggagtgcagtggtgcgatcatagctcactacagcctcaacctcctgggctcacacgatcctcctgcctcagcttcccaagtagctgggactacaggtgtacaccaccatgcccagctaaaatcttttttcctttttgagatggaattttgctcttgtcatccaggctggagtgcaatggcgtgatctctgctaactgcaacctctccctccgggttcaagagattctcctgcctcagcctcccaaatagctgggattacaggcacctgccaccacacccagctaatttttgtatttttagtagagaagggtttcgccatgttggccaggctggtctcaaactcctgacctcaggtgatccacccgcctcggcctcccaaggtgctaggattacaggcatgagccaccgtgcctggccgcccagctaaatttttaaattatgtatagatatggggtcttgctgtgttgcccaggctggtcttgaattcctgggctcaagagatctccctgcctcggcttcctgaagtgctgggattatgagcacgagccactgtacctggcctcagcctgcttttcttgtatagactctaaatccttcctgctacaagttatacccaacaggcggggccaactggaatggggtgactaatacatccacacctggcttcaacaaaaatctcccatgtcacggtcttgagtttgctattgccagcctgctctggccagggaaatctatgatagttgtattcatcatcatcatcatcatcatcaacatgccttggctgttattgtataggcccttgccctgtggctctcaagagtcctggataatgtacaaaggacatagcttagtctggcttgcagaattgtagtattctattgactcctcagtacctccactgcatcatgggcacaaacaatgctctctaccagggcctggcaacagagtccgatctggcccacagcttgttattgtaaataaagttttattggaacacagccatgcccatttgtatgcataatgtctatggctggctgcttttgtatactacagtgctagagttgagtagctgcgacaaagactgtatgacttggctgggtgtggtggctcacgcctgtaaccccagcaccaaggcaggtggattacttgaggtcagcagtttgagaccagcctggccaacatggcgaaagcccgtctctgctaaaaataaaaaataaaaaaaatttaaaaattagccagctgtgagattacaggcacacaactgtaacctcagctactcaggaggctgaggcaagagaactgcttgacccaggaagttggaggttgcagtgagctgagactgcaccactgcactccagactgggcaacagagaaccactctgtctcaaaaaccaaaacaaacaaacaaacaaaacattgtatgacttgccaagccaaaaatatctactatctgggccttcaccaaaagtttcccaactcctagcctatattcaagggggtatatgttcctttaagcatatagagacaacacttttcttttccctacttcatcagtggattttttttattattattttcagtcttctctcagatcaagcctacctattatcctgataacccacatcccatgataacccagcaaagctgtattatcagttcctttcatttaatattcaccatagtaaaaattacggctttgggcattgtcattgtttgagtcaggaatgtaaaaagcctatatgtcctttttctgtatatccatatatcaggatctctgagttacaaattatgctcattagagagtggaaaataggatgccatgcttaattaatttatttatttaattattttgagacagagtctcactctgtcacccaggctggagttcagtggcgcaatctcagctcactgcaatctccgcctcccaggctgaagcgattctcctgcctcagcctcccgagtagctggcattacaggtgtgcaccaccatgcctggctaattttttttttttttttgtatttttagtagacatggggtttcaccatgttggtcaggttggtcttgaacgcctgacctcaaatgatccacccaccttggccttccacagtgctgggattaccagtgtgaaccaccacgcttggctgccatgcttaatttctaaaccaggatgattgggaagatgatgaggggggagttttgcatgtcggcaggagggcatctgccgtcatgaaatctcttaatagtgtataactcacaggtactgtgctggcttaggaggagggaggctaccacagcagcgttagtaggagaatatggaatggaaactaggctttcccagcaatggctatcactggctgatgtcctactacgtgggcacaggtccctgggctgttggtctcttcactggtgtttgtggagtcccatcatggtggtcataaacgtcatttcctctctgacctcagaagatctggaaggacaatgggagggctggggtcctggccttggtttctaagtttctagtttcccaggggttctgaccagcagggtgtccttggcaggtggactataatgcgagtgcctggctgaccaagaatatggacccgctgaatgacaacgtgacttccctgctcaatgcctcctccgacaagtttgtggccgacctgtggaaggacggtaaggccttctctgctcgggtccatgttctgctttgagctggagaattgaacacccaagtcccccgactctcacacctgccccaggaggggaggcctttacatgggggcaggggaaggaagagcattggcatgggctggtgatgtctcgttgaaacaatttcttcctgagtgggggtccctgagcccctcaatcctacatgtcccgaggggattgaggtcctgaggtcagggctcaggcaatagaggagaaacagcatgccaggcacggggagttagactgccctgtccagagtcagaaggacttcactgtatcttgtctctgccacctcctagctctgtggtcttggatgagtcacttgatgtcattaagcttcattgtcctcattagtaaaacaggagatgcaataatagttgccgtctctactagaggtattatgagggttaaattagaccagtgatgctcaaactcaagcaggcatcatgaccccctggaaggctttgtttatttatttagggacagagtcttgctttgtcacccaggctggagggcggtggtgcaatcttggctcactgcagcctccaccttctgggttccagtgattttcctgcctcagcctcccaagtagctagcattacaggcacacaccaccatacctggctaatttttgtatttttagtagagacggggttcccccatgttggccaggctggtctcaaactcctgacctcaggtgatccgcccacctcagcctcaaaaagtgctgggattacaggtgtgagccactgcacctggccctctttggagggctttttaaaacccagatggctgggcctaccctaagatctaattctgcaggtctggggccagggatggggcgggcctgaaaacattcatcccaggtgatgctgctggtctagggaccacactccggctccctttgagaaccagtgaatagatgatccctgtgaagagctgctggagtgatgatgaggggagggggtttgctgtttgtccctggccatcagtgtccacagcaggttttattcttggcacagggcccatgggcctggggcttacaggactggtctccccttgttttaagcatgctaaaaaaagggctccaggaggggccagctgtgccctaaccatatgccaggctctgggcctagggaacaacatcgcaccctgggtctgtgtcatcccaggacacatgatgaagcctgtagtccctcctctgcgggacccacagtcttgtgggagagatgagactctcaaagacaagcagagagacaagcatgaggctgcgcatggtggctcacacctgtaatctcagcactttgggaggctgaggcaggaggatcagttgaggtcaagagttcgagaccagtctggccaacgtggcgaaaccccatctctactaaaaatacaaaaactaactgggcgtggtggtggtaatcccagctactcgggaggctgaggcaggagaactgcttgaacctgggaggcgcaggttgcagtgagctgagattgtgccattggactccagcctgggcaaaagagcaagactctgtcttgaaaaaataaaactaaaaataaaaaataaaaacaaaattagccgggtgtgctggtgggtgcctgtaatcccagctactcaggaggctaaggcaggagaatcacctgaacctgggtggtgaaggttgcagtgagccaagatcgtgccactgctctccagctgggcgacagagtgagagcttgtctcaaaaaaaaaaaaaaaaaaaaaagattgttacacagaatctgagtagaaggtgaagaaatggtgccatccatggcctgtgggttgggcttggcatgtgcaggacctgctgggctggtagaaaaagaaccttggaggtgatgatgatgatgatgatgatgatgatgatgatggccgggcgcggtagctcacgcctgtaatcccagcacattgggaggccaaggcaggggaatcacctgaggtcaggagttcgagaccagcctgaccaacatggagaaactctgtctctactaaaaatataaaaaaaatgagccgggcgtggtggcgcatgcctgtaatcccagctactgggaggctgaggcgggagaattgctggaacccgggaggcggacgttgtggtgagccgagatcacgccattgcactccagcctggccaacaagagtgaaactccgtctcaataaaataaaataatgataataataataataataataataataataataataataatacctactttttgttgagcacttactgatgtgccaggctatctcggagtgtgtgctgtatcttctgcctcagaatatttcttccgtggatacctacatggttacccactcatttcttgctggtttctgctcaaatatcaacttagcagagcccaccacctccttgtctaagagagcaccctcttcactctctctccgctttaccctatttttatttttctacgcacacctcactactcaagatattccatacttaacatctgtgatctctgtctgtctccttccctgtgatataagcggggtgagggggccgggtctttttttgttcacagcagtgtccccagggcctggagcacagaaggtcctcaataactatttgttggtggatgaaagattggaggctggcagggaataagtgccttctgtgccttatttttttttacccctgccctagaaggtagacggtattattacctcccttttgtagaaagggagactgaggcacaggatagtgccaagccaaggctagtcagtgagtggacagcgagagcaggcttgactcctaggtcagcgtgactccatcacagggaatttgttctttctgccactcaggtgctctcaggatttccccaatagacaatacttggaaaccctgactgccgaaggaggcgttggtgatggaaggaaagattggagtgggcaggttggtgggtggggctggggctgagcctctggcctatttaggggtgggtgggccagaggctgatgccaccctggctgtgccccatagtggaccgcatcgtgggcctggaccagatggccaagatgacggagagctcgctgcccagcgcctccaagaccaagaagggcatgttccgcacagtggggcagctgtacaaggagcagctgggcaagctgatgaccacgctacgcaacaccacgcccaacttcgtgcgctgcatcatccccaaccacgagaagagggtgaggcccgccgcccagaccctggggctcccagaagccagggctgtcccaagcggtcacagcgtccccagggcgccctctgcccccacctaccccgaggaccccattttccatgtggggaaggctatctgaatctcagacccattccccatccctggaggaaaaggaggaagggaggatgcatccagagacttttcagttgtggagttgctgtgcaggtcatccagccactcattcattcattatcccaggaagtattcactgggctctgccctgtcctgggtgctggggagcagtgttagaaaaattgtagcccttccctgtgggtttctcataatctggtgcaggcatcttcagcttggggcgattgtgtcctctatatggacatgctacagacatttttggttgtcacaaccaggagggggctgttagtcagcatctagtgggtaggggccagggatgccctaagcattgtacaatgcacaggatggtccctcaacccccagcacagaatccctacaagatgccagtagtgctgaggttatgggagacacggggagaggtaaacatacagctgatgatggtgatggaatgtggtcagttaggagaacaccaaagagccagggctcctcccacagcctcaggactcagagaaagcttctggtgaacttgaacgttaagaatgtgtggccatcaacttggtgacatggaaggcagggtggggcctaggataagcagggggcctaggataagcagagggcccaggctaagcaagagtgtggaggtgagaagtgaaggaactaggtaagaaaatgctagatagtgtccaggcgtgttgctcacgcctgtaatcccagctactcaggaggctgagaaacaaaaatctgttgaacccaggaggcggaggttgcagtgagctgagattgcaccacagcattccagcctgggcagcagagcgagactccatcttaaaaaaaaaaaaaaaaaaggaaagaaaatgctaaataggtcatttcatgttgcaaatgtgtgatggcatgaggtaggaatcagatggtgtgaggtaggattgaggctgaatgggtaggcaggggctagatcgtggtgctccttgtgttctttctggagcttggccttctctctctaggcatgccattgggggtgttaaagcagggctatatcatggtcagatttacattttaggaagtgaatgagggggctgggcatatgctagctcatgcctataatcccaacactttgggaggttgaggtgggaggatcacttgagaccaggtgttcaaggctagcctgggcaacatagcaagaccctatatctacaaaaacatttttaaaaattttccaggcatggtagcacatacctgtggtcccaaatacttgggaggctgatttgggaggatcacttgagcccaggagtttgaggctgcagtgagccatgatcgcaccactggactccagcctggctgacagaatgggaccctatctcaaaaaataaaaaggacaaagggattgaggggagaggcaagaccagagagagagaccaggtgggtggtttctgtggttgtccaggcaggagaagatagtggagacaatggtggtgaagagaagtgggggggttgggagatatttgggagctagaagcaatcaaactgctgatggacaggaagtgagggagacgaggtgatgaggaggaagccccaggttccagccaggcgatgctagtgtcaccaagaaccagagagatcatgaggcagccattgccgaagcaaagagatgaaaacccagaggggggcactgctttgcccctcggccctcagctaagccctccttgggtgcttctgttggtaccctcatggcctggccaggtgggtcatccaggtaggaggtttggggctttgctgcgccatggtttctggccccagggatccactgccctctttgacctttgcagtccggcaagctggatgcgttcctggtgctggagcagctgcggtgcaatggggtgctggaaggcattcgcatctgccggcagggcttccccaaccggatcgtcttccaggagttccgccaacggtaagtcccaaggtctggcccaggtagggcagggggtgagcgggactgggtggaggaatggatgctggaggtacccggggtgacttctgctctgtgtttcaagctacgagatcctggcggcgaatgccatccccaaaggcttcatggacgggaagcaggcctgcattctcatggtgagcccagaagtccaccagagacctcccaacctctggccgcaagccacctgctgctcttggtgggaccgttcttacccatgtcatcactggccaaatggcacagtggaaatcaggagctcttcctttccttccttttgcagatcaaagccctggaacttgaccccaacttatacaggatagggcagagcaaaatcttcttccgaactggcgtcctggcccacctagaggaggagcgagatttgaagatcaccgatgtcatcatggccttccaggcgatgtgtcgtggctacttggccagaaagtaaagatgctttcctgcatcctaatacctcaaacgcgaatcacaaacaggggcctttctgttctgattccctgattctaagaggccacctgtttaagatgcatcattgactgaatgacagccttttcttgaaggggaagaaatgcttctactttaaataaatgtaccaagttacgagtgcaggaagggaacgagttttagacctgggttctcatcgtggatgccccagtttttgctgatgaaccttgggcaagttactctacctctctgagcttccagttttttagctggaaactgagcataatcattttgacctcagagagctgttcatgaggtgtcactaagataacgcatgacgagagcttagaacagtgcgtggttctcaggtcagaaatgattgttgttgtttttacctccctccctcactccttccttccctccctcccttccttccttcctttcttcttcctttttgagacagagtctctctctctctctctgtcgcccaggctggagtgcagtggcgcagtctcaactcactgcaacctctgcctcttggactcaagcaattctcgtgtctgagcctcccgagtggctggaattagaggcgcccaccaccacactggcctaatttttgtatttttagtagagacaaagtttcaccatgttggccaggctggtctcaaattcctggtctcaagtgatccacctgccttggcctcccaaagtgctgggattataggcatgacccactgcgcccagcctagacatgttagaattggataaaccattgaggaaagaggacttgacggtgtctagatccccgtgtcccagtgggatttataaggcagggttttggagggtgtgatgtcccagctgttctgtgaagactgggagccggggaagggttcgggttccttaatgaaagtcataccccagggactgcagggacaggtggggtcgctctctgtctggggtgtgtgttgtcattgggcagagaccacaccctcaccagtaggaccctgatgtgtcaggttcattcattgacacatggacccaagatggtcaaggccagctttgggagctcttggccctcccgcaacagacctaacttgtcaagtttcgttactaagttccctgttgctgtccttcctggataactggggcaattttattcttaaagttttcctgtgtccaagatggcagccaagcagggaagacagaattacgttcactgttctatcgtttctcaatctatcgatagcccttaaacgggaagagtgctggttcagggtcacagtgtgaaattcctaaaacaacccaggagagaataggtttgacagggctgggtgtggtagctgacacctgtaatcccaggcactttgggaggccgaggcaggaggattgcttgagcccaggagtttgagaccagcctgggcaacatggcgagacccctatctctaccaaaaaaaaaaaactttaaaaattagctgggcatggtagcatgtgcccgtagtcccaactacttgggaggctgaggcaggaggatcatttaagcccaggaatttgaggctgcagtgagccatcatcacaccactgcactccagcctgggccgcagagccagaccctgtctctgaaaataaacaaataaataaataagttagtcagaaacagctggtgtaggctgggcatggtggctcctacctgtaatcccagcactttgggaggccaaggtgggtggatcacctgaggtcaggagtttgagacccacctggccaacatgggaaaccccatctctactaaaaatacaaaaattagccaggcatggttgtgggcacctgtaatccaagctactcaggaggctgaagcaggagaatcacttgaaccccggaggtggagtttgcagtgagctgagatcgtgccaccgcactccagcctgggcaacaagagcgaaactctatctcaaaaaaaaaaaaaaaaaaaaaagaaagaaagaaaaaagaaacagctagtgcagctggggagtacgggagcccccttaggaatgatgcacatagttgtgttttctgagtggtgtttggatctcagctaagtccagggcatgttgtgagccctgggtcttccttgtccactgaaaaaggctctgtcctgtagatgatttaagttgtttgcagccagacaacacatgtgtcacacagggtttctggaagaacctgagttggggagattggggcatgtccctgtgcaggttcaggatgctgcagggcagggctctgttgacagcagggtgtggcttcatgacccccgcaccttctcttcccccctccctagggcttttgccaagaggcagcagcagctgaccgccatgaaggtgattcagaggaactgcgccgcctacctcaagctgcggaactggcagtggtggaggcttttcaccaaagtgagtgctctgccccagcccccttcccaggggcccccagccctgcttcttcactctggagccttcacatttgggacaggaggtggtcgcaagtgggtgtggaatggagggctcgaactcagaccttgagcattggcggttctctggcccgaggaggccctgtcctttggcacataggctatagccaggaccttaacacaaagtattaatatttccatccgcactggaatccctcgtgtggcccatttatagccacacccacttcctccgtagccatggaaaccactctgttctccagttctgtaattttgatggttcaagaatgctgccgggggcggcggctcacgcctgtaatcccagcactttgggaggccgaggcaggcggatcacttgcggtcaggagttcaaaaccagcctggccaacatggcaaaaccctgtctctacttaaaatacaaaaattagctgggtatggtggcaggcacctgtaatcccagatactcaggaggctaaggcaggagaatctcttgaactcaggagacagaggttgcagtgagccaagatcatgcctgcactccagcctgggtgaaagattgagactctgtctcttctttctttttttttttatttaaaaaaaaggccaggcacggtggctcacggctgtaatcccagcactttgggaggccgaggcgggtggatcacaaagtcaagaaatcaagaccatcctggccaagatggtgaaaccctgtctctactaaatgtacaaaaattagctgggcgtggtggcaaacgcctgtagtcacagctactcaggaggctgaggcaagagaatcacttgaacctgggaggcagaggttgcagagagctgagatcgcgccactgtactgcactccagcctggtgacagagcgagactccgtctcaaaaaaaaataaaacaaatattctatacatggaattagagagcatccagactgttgcatgtatcaatactgcaggtttttttttttttactttttgcattttttgaaatggagtctcactctgttacccaggctggtcttgaactcctgacctcaagcaaccctcctgcttcaggctcccaaagtgctgggattacaggcatgagccacctcatctggccatagcatattattttttatttctggcagagtcagggcctccagaggactcaactggttcctgtagtggcactggttgcattgtccccatggcacaaagacatgctctgttgcaatagactaggcttctccttatatgcccttgagtgtatccactggtgcaaggctttttcaccaagcaaacagacattgagtgcctgctgtatcccaggcacatgctaggtgctgggggtgcagctgtgaacacacaccatggtccctgacctccatgaatattctagccgaattggtggggagtaaacaataaacagataatcacagagacagatacataatggcaaactgtgataagtgcatgaagcaagctgctggagtacatagcaggggcttccttgtgccaggcaggggcttgaaaacaaagagttaggaggcagcccagggaaggacagcagatgctgctttttggaaatgttcgtccccactgaaccaacttctgaaaaactatcctaagaaaatcgtcttagccaggtgtggtggctcatgcctgtaatcccagcactttgggtggccaaggcaggaggatcacctgggttcacgagttcgaaaccagcctggccaacatggcgaaaccctatctctactgaaaatacaaaaattagccaggtgtggtggtgggcacctgtaatcccagctactcaggagattgaggcaggagaatcacttgaaccgaggaggcagaggtttcagtgagctgagatcgtgccactgcactccagcctgggtgacagggcgagactccacctgaaaaagagaaaagaaaatcaagagttaagggcattcattatggccttatttacaatagcagaatttcagtgtccagtcctagctgaatgatgagttcaataatggttcatctatcaatggaatgttttcagctattaaaatgatggctttggctactgaataggtctgctaaaaaaaaaaaaaaaaaagacttctacctagctgtctagttggacactgtggcatgtgcctgtagtcccagctactctggagctggggtgggaggatcgcttgaggccaggagttcaaggctgcagtgagctatgattgtgtcactgcactccagcctgggtgacaaaacaagaccatcgctaaataaataaattaacttaaaagatggctatgtaaagttgtaagaatgatgtaacagcatggggtaatacatatcttataatttttaaaaaaattttatttgtggagacagggtctcactgtgtcacccaggctggagtgcagtggcacaatcgtggctcactgcagcctcagcctgcagggttcaagcgatcttcctgcctcagacccctcactagctgggactacaggcacacaccaccatgcctggttacttgtttttgtagagatggggtctcatgatgttgcccaggctggtcccaaactcctgggctcaagcgcttgcctcggcctcccaaaatgctgggattacaggcatgcatcactgttcctgtctgtatcatataattttaaataataaaagcagcctctacaactaggcagcatggtcttaagtctattttttaaacatagaaaaagagccaggaaggaaatgtaaacaatgttaataatgactttgatagggaggtgggtgggatatgaaagattttttttctcccttttgtccttggaaggaaatatcacttttcagcagtagttctctgttgggatggttctaaagtggggaagatgagactttttcctttcactttgtaccttttctggtgctctgatttagagctcctcagtcttgccactgttgatattttggggtgactaattctgttgtgggggctgtcctgtgcactgtagggtgtttagcagtatccctggcctctacccactggatgccagaggcaccccccaccccagctgtgacaatcagcagtgtctccagacaatatcccctagtggggatcggtgggggcaacattgtccctggctcggaaccactgatcgaatttattatgacaacatatccctttgccacaaaaacaaatgatgggctaaccgtgtgtgtgcaggtgaagccactgctgcaggtgacacggcaggaggaggagatgcaggccaaggaggatgaactgcagaagaccaaggagcggcagcagaaggcagagaatgagcttaaggagctggaacagaagcactcgcaggtacctgtatggatgcatggctggggttgctggggaacaggacttggccccgtggggctcacccgcctcctccccaccacctgcgtgcagctgaccgaggagaagaacctgctacaggaacagctgcaggcagagacagagctgtatgcagaggctgaggagatgcgggtgcggctggcggccaagaagcaggagctggaggagatactgcatgagatggaggcccgcctggaggaggaggaagacaggggccagcagctacaggctgaaaggaagaagatggcccagcagatgctggtaaggtgtcacaggggcagcccgtggtgggtagcaaatcacttgaccctcaccacaggcctgtggaggtgcatccagggatatgtgtccctgctgggacagatgatgagacgggggcttggagagggttggtcatctgatcaaggccacacagctgggattgggactggaacacagtgagcccactctgttctattgccctgccttgcatgtgctaaccccttttctcctaacagcaagcctgaatggaggataattgtatttgttagctattgctacataacaaaacatgccaaactcagcagctaaaaataaaaagtattgcatagtcaggaatttgagagtggcttaggtgagtggttctggctgagggtccggcctgaggttgcagtcaaggtgttggctgaggctgcagtcatctgaaggctcatctggggctggaggacccacttctacttggcttattcacacagctgttggaggaggcctcagttccttatcatgaaggcctctcccctcagggctgcttgagtgtccttccaatatggcagcagagttcccccagaaggagtgatctgagagaggagaaaggaagccgcaatgccttttatagcctaatctctgaagttacattccatcacttcttcctgatttttgttgttgttgttagaagcaaatctaacccccactcaaggggaggagaattaggctccacctttttggagtcgcaaagaacttgtggatagattttaaaaccaccatggtacctactgtgctcattttatagatgaggaggttgaggttccatgaagcagagcagcttacccaggtctttattttttttttttttttgagacagagtctcactctcttgcctaggctggggtgcgatggtgcgatctcagctcactgcaacctctgcctctcgggttcaagcgattctcctgcctcagcctcccgagtagctgggattacaggagcccaccaccatgcctggctaattttttttgtatttttagtagagacggggtttcaccatgttggccaggctggtcttgaattcctgacctcaagtgatccacccacctcggcctccaaaagtgctgggattacaggtgtgagccaccacgctcaggcctttatttcttccttttaggaggctacagagttctgggcatcttcaggcctagcccctgtattcattagtccccagatcaccacgagagtaaatctgttataaccaaagctgttactcttttccctccacaacaaaggaccttgaagaacagctggaggaggaggaagctgccaggcagaagctgcaacttgagaaggtcacggctgaggccaagatcaagaaactggaggatgagatcctggtcatggatgatcagaacaataaactatcaaaagtgagtaggggccgggtgcagtggctcacgcctataatccgagcactttgggaggccaaggtatgtggatcacttgaggccaggagtttgagactagcctggccaacagggtaaaactccatctctactaaaaatacaaagattagccaggtgtggtggccagtgtctgtaatcccagccacttgggaggctgaggcaggagaatcacttgaacctgggaggtagaggttgcagtgagctgagatcgtgccactgcactgcagcctgggtgacagagtgactctgtttcaaaaaaaaaaaaaagtggaatcaagtttctgcattaaaaacaacaggcttaccaggatcagggagattttggggatttgggactttcagttctcaaagcagaaaagcccttagaaaaccaggacaagctggtcaccgtagtcagtagtcactaaccagccccacctgcttttagttctttgagctggatgtcagcttggcccctactgtgagccaggctctgtgttagatgcaggtatgcatggtgaaggaggacccttcccttgtggggtttatactgtagtgagatggcaaataatcgtcatttaccatggtgatcagggctctgaaggaaacgttcaccatattttaagagtgcggcaggccgggtgcggtggctcatgcctgcaatcccagcactttgggaggctgaggcaagtggattacctgaggtcaggagttggagaccagcctggccaacacggtaaaaccccatctctactaaaaatacaaaaaattagttgggtgtgttggcgggcgcctgtagtcccagctactcgggaggctgaggcaggagaatcacttgaacgtgggaggcagaggttgcagtgagctgagatagcaacactgcactccaccctgggcgacagagtgagactctgtctcaaaaaaaaaaaaagaatacagcagtgggggatagaggaagggtattcatagaagacttcctggaggaggtgacatttaagcagaaacttaaagatgaaggagcagttagaggggagtagaagagcatctcagctggttggcccactgtgcaaaggccctggggcagggaagagctggccagtggcaggaatggaaggagggtacctttagctgaccatacaatatgagggacaaactggcacgagatgagaaatggccagtttttggaaattgttatgggacttctctttaccatttaaaactctagttgtattttgttataatgtgggtttttctttcaactgtttacatggaaatcactaaaagtgaaacatagattctagagaaaagaaaaatcctaaagctatctctttctctttccccaaaaaggaacgaaaactccttgaggagaggattagtgacttaacgacaaatcttgcagaagaggaagaaaaggccaagaatcttaccaagctgaaaaacaagcatgaatctatgatttcagaactggaaggtaaaccagctaccaagagatttatttttattttattttattattttttttagagatgaggtcttgctctgttgcccaggctgcagtgcagtggtgcgatcatggctcactgcagcccgaaactcctaagctccagtgatcctcctgcctcagcctcctgagcagctgagactacaggcgtgcatcaccacacccagctaatttttttttattttttattttgtagagatggggtttcactatgatgctcagtctagtctcaaactcctgggcccaagcagtcctcccaccttggcctcccaaagtgctgggattataggcatgagccactattcctgggcttgaatgggtatttttaaaagcaggaaaatcagaaaggaaatttgaggatggcagatcatcccatgagtgacaactaactctatgccacctctcgaaatcacccttagtcatcacatgcactaataatatgataaaagggctgggtgcggtggctctcgcctgtaatcccagcactttgggaggccgaggtgggcggatcacgaggtcaagagttggagaccagcctggccaacatggtgaaaccctgtctcaaaatacaaaaattagccaggcgtggtggcgggcgcctgtaatcccagctactcgggaggctgaggcaggagaattgcttgaacccgggaggcggaggttgcagtgagctgagattgcgccactgcactccagcctgggcaacaagagcaaaactccatctcaactaataataatattatgacaatataaggtgctgttcatcgggagataatggtccagaccgtgactatgatggttactgattgggggatgtgttcatctcctccgggtaaaatgcctgggcaggaaggctcatttccgggcatctctctggggcctccccttcctgaagagcaccttggtttttgcagtgcggctaaagaaggaagagaagagccgacaggagctggagaagctgaaacggaagctggagggtgatgccagcgacttccacgagcagatcgctgacctccaggcgcagatcgcagagctcaagatgcagctggccaagaaggaggaggagctgcaggcggccctggccaggtagcggggctggcaaggggcatttgctgtgtgtccatgtatcccctgggcccctgctcattcgctcattcgcagtggctgtcttggtcaaggcggccccaggcccttggcatgaacttcgtttcccaggccaggcctcccacaagccttctcgaccctgttcactcccccagatcctcaccttcgactttcttctcttccctgcaaacacatcatgtctttgcagttgatctcacctactcccatggtgttgctgctgcctcttcgacatccaggcttttctcatctagacccccttctgaatttccgattgcccaatgagtcaatttccaccgtcatctcaaacacccctgtctaaggcgggaatgaccttcctttccccagcccctccctctaagggccctcttttttgtgaacaccaatctcctcctttgtttctgccgacccacagcaagcagcaaccttcagattctgccagtccttctaaatgtcccccacccatttcctctggtttttccctcttcctggctcttagctggatttacactaatgctaatactgcagcagccactatgaatgattatttacctgctcactcggtgctaagttcttttcaagcaatacctttgcagacacctggccaggtgtactgccggtgtctttgaggaggaagctgagcctcctaggggtaacgcaacaggagcaatgtcattgcttctaagaggcagagctgggatttaagcctcaaagctttctgattgatcccctggcctggctcttttgtcggccaatttgtgctatgttgacagtgctacggtgatgaagggaaagcatctctctggggcaggaacctgctcacaaaactttgctggctggatgcagtggctcacgcctgtaatctcagcactttgggaagccgaggtggggggattgcttgaggccagcagtttgagaccaacatgggcaacatagcaagaccctgtccctacaaaaagttaaaaaatgagccaggcatggtggtgtgtgcctgtagtcccagctactcaggaggctgagatgggaggatcacttgagcccaggaggttgaggctaaagtgagctatgatcatgccactgcactccagcctgggcaacagagcaagaccctgtctcaaaacaataataacaacaaaacaaaaacctaacttcactggcttactagggaaaatccagtttccttagcctcaccctcagagcccatccaccctctgcagtctcaccccaacccaactatttcactttctctcttgttgctgccctttcacaagtacagtaaaatcaaagtgcttgcctctcctgcagcattctgccatttaacagggcttcttgcagcccaccttgatctctggtcaccacctccaccagatgcagagccccagtctgaatatcccccgcaagcagtggctggccaaatgctgtgcatggggcgggtactcagtcactgagcaaatgcagaaagaacagacagttgccagggaagaagaactgtccaacattcagaaagcatctacacagtccctactgtgaccaggtaccttgccagtctggggtcaatgctttgcattcttgcacacacatgcacacacgtgcatacacacgtacacacacccatgcacatgtacaacctgttttgatgtcagaccttggcactcacatcctatgttaatctcatatagtctggcatgtcaagaagcagacctggggacatggatagaaggtgtttgatgtctctgcaacataactgtctggtcccagaaaagtttttggccacattgtaagagaggaaaccaagggacctgggggttcattctgctgggtctctccctggaaggcttgacgatgaaatcgctcagaagaacaatgccctgaagaagatccgggagctggagggccacatctcagacctccaggaggacctggactcagagcgggccgccaggaacaaggctgaaaagcagaagcgagacctcggcgaggagctggaggccctaaagacagagctggaagacacactggacagcacagccactcagcaggagctcaggtgaggggcccatcaatcccaccatcctgctatcccactgcaccaatgggatgggggcagaagaggggacaaacccaaagcaaatcgtgcatcagcccctgtgcatttaccttcctggccgcggtttgctttaacttatagaagcatggttggctgtttcttttttttctttcttttttttttttttttgaggcagtctggctttgttgcctaggctggagtgcagttgtgccatcttggctcactgcaacctccacctctgagatttaagcgattctcatgcctcagcctcctgagtagctgggattacaggtatgtgccaccacacccggctaattttttgtttttagtagagatggagttttgccatgttgcccaggctggacttgaactcctggcctcaagtgatccacccacttccgcctcccaaactgctggtattacatgtgtgagccactgcacccgaccctcatcatcttatttctcatcagaagagtagtatataccagggatgtacaatcttttggcttcccttggccacattggaagaaaaagatttgtcttgggccacacataagatacactaacactaataatagctgatcaactaaaaaaattttacaaattggaaaaaacatctcatactgttttaagaaagtttatgactctgtgtcaggctgcattcaaaaccatcctcattggtaagcttggatatactcagagaacaatttgaaaactatagaaaagcagacataaaaaaaaatcacctttagggtcgggctcacgcctataatctcagcactttgggaggccaaagacaggtggatcacttgaggtcaggagttcaagaccagcctggccaacatggtgaaaccctgtctctactataaatccaaaaattacctgggcgtggtggcgcatgcctgtaaatcccagctactcaggaggctgaggcagtagagtcacttgaatctgggaggcagaggttgcagtgagctgagatcgcaccatcgcactccagcctgggtgacacagtgagtgagactccatctcaaaaaaaaacaaaaaacaaaaaaatcacccttagtcacaccagttaacattcttgagaaattccttcctgtctgtgtgtgtatcagtcagtccccaagctccaattcccaagtatgtgtgtgtatcacttttgtgttaaattttaaaaataaaattgatcagattggttttcaattgaagattcacttcaaatgaacaaacaataacaaactgcctgccagatcacgaatcctgactctagtgaaactaggtcattgattcattcagtaaacacataaatgtattttgatgcaatctgtggtgttggcatagcatgtatcatagcatatagctatgctagctgtgccaacaccatataccctggggtttacttcccccactttgggttttgtgcagtgtcacatgcacatagagcacagcgttctgctcccttgccgcttggcctttgatacagaagagcccagtgcatgggccaggtatggtggctcatgcctgtaatcccagcactttgggaggctgaagcagacagatcacctgaggtcaggagttcgagaccagcctggccaacatcatgaaaacctgtctctactaaaaagacaaaaattagccgggcgtggtggtgggcgtcggtaatcccagctacttgggagactgaggcaggagaatcccttgaacctgggaggcagaggttgcagtgagctgacatcattccactgtactccagtctggacgacggagcaagactcgataagaaaaacaaacaaacaaaacaaaaaaccaggctgagtgcggtggctcacacctgtaatcccagcactttgggaggctgaggcgggtggatcacctgaggtcaggagttcgaaaccagcctgaccaacatgttgaaaccccatctctactaaaaatataaaattagccgggcgtggtggtgggcacctgtaatcccagctacttaggaggccgaggcaggagaatcgcttgaacccgggaggtggaggttgcagggggccaagattgcgctgtcgcactccagcctgggcaacaggagtgaaactccatctcaaaaacaaacaaacaaaaccatggactcaaggtcaaggtttagcttctaattctggctccatcacacaatggctgtgacaccatgggtaaaactgcttaccctctcttagccttagtttcctcatttgtaaaatggaaataataacacacctgcctctttgggttgctctgaggattagatgatgtatataaaaaacttagctcagggcctggcatatagtaactgctcattaaataagagccaacattaatatttaagcaaaattttgcagttcacagacatcctttcaattctattactttgtgtatttgtttgccagtcattacagatgtcctaggcaggtgatatgctccacattttgcagctgaggaaattttaggtccagagatgttaggtgaatgacccaaggtcacacagctagagaggggtggtgatgaggactgcagctctgggtcctggaagagctctcattcttttgcacggcactgagatgaccctctgtctccacccaactgccattcactgtgttcctcccaccaagggccaagagggagcaggaggtgacggtgctgaagaaggccctggatgaagagacgcggtcccatgaggctcaggtccaggagatgaggcagaaacacgcacaggcggtggaggagctcacagagcagcttgagcagttcaagagggtaatgctttttggtgatgctttttggtgatgacacataagagtgacatcagcagcctcaaattactacaggtcagggtctgcataaagacaaaaaacaagttacataagattctaatgatgatgatagcagcttatatttatttacaaaatgcttcccatacaggctgggtgaggtggctcacgcctgtaatcccagtacttggggaggctgaggcgggaggatcgcttgagctcaggagttggagaccagcctgggcaacatagtgagaccttgtttctactaaaattttaaaaaagtaggccaggcgtggtggctcaagcctgtaatcccagcactttgggaggccaaactgggtggatcacctgaggtcaggagttcgagaccagcctggccaacatggcgaaaccctatctctactacaaatacaaaaaattagccgggcgcggtggtgcatgcctgtaatcccagctactcgggaggctgaggcaggagaatcacttgaacccaggaggcagaggttgcagtgagcagagatcatgccattgcactccagcctgagcaacagagcaggattccatctcaaaaaaataaaataaaataaaatattggccaggcctggtagtgcattcctgtggtcccagctatttgggaggctgaggtgggaggatcgtttgagcctgggaggttgaggctgcagtgagccctgtcatgccactgcactctagcctggacgacacagtgagaccttaatcaaacaataaaaataggctgggcacggtggctcaccatgtctgtaatcccagcaatttgggaggcaaggcgggcaaatcacttgagctcaggagttcgagaccagcctggccaacatggtgaaaccccatctctaccaaaaatataaagaattagctgggtgtggtggcatgtgcctgtaatcttagctactcgggaggctgaggcaggacaatcacttggacccaggaggaagaggttgcagtgagctcagatcgtgctactgcactccagtctgggcgacagagtgagccgccatctcaaaaaaagaaaaaaaaaaaagaatgaatagaaatgcttctcatacagtatgtcaattaatcttcacaaccaccctgtgagacgtgtactattaaactcattttacaagcaaagaaactgaggtcctaggtgcctagaggtgaagagacttacccaaggtcacactgctggtaagtgacagagccatgatttgcacccaaacagtctggtcctagaccccactttctggcctctacaggactgaaggcctataggatgggtggggcctatcaatatactgcccttcagggataagcaaaggtgtaacaacactttcggggagatttaaatgaaacttaaaactgggatcattctatccactttaatttctctgcagactggaggaaggccaggcatggcggctcatgcctcccgtaatcctaacactttgggaggccaaggagggaggattgcttgagcccaggactttcagatcgcctgggcaacatagcgatttttcttttgtaaaaaaaaaaaagactggaggaaacttgtcattatttgatttcaatggcagaacagctctctccggcataatttgagaatgactaggtcaaatcactctcccgttgttggaactctttgcggtgtatgggagtgggagctggtaaatagcagtaccgaatgctgaatcttgggtgctcttctctcctttggggtagtgcctgtgcttcattccccagggtaagttttttagcttgcgaccttcggccagattgttttcctgaaagcctgagttacattaccctcagcgttgcagctcctccacatccccttcagtggaagcttttggttctgctagattaagtgggtgcagcattgcctaaaaattttggggaatttgcatttggttctatcactagtgtattggtccgttgttgcactgctctacagaaatacccaagattggattatttgtttattttttgagcagtggagtcttactctgtcactcaggctggagttcagtggcgtgatcttggctcactgcaacctccacctcctgggttcaaatgattctcctgcctcagcctcccaagtagctgggactacaggcacacaccaccatgcccggctaatttttttttttttttttttttttagtagagatggggttttgccatgttggccaggctgatctcgaactcctgacctcaggtgatccacctgccttggcctcccaaagtgctgagatgacaggtgtgagccactgcaccaccctgagattgggtaatttctaaagaagagaggtttaattggctcacggttctgcaggctgtacagaaagcatagcagcttctgcttctggggaggcctcaggaaacttaccatcatggtggaaggcaacggggaggcaggcatgttttacatgaccagagcaggcagaagagagagaatggggagctgccagacacttttaaacaaccagatctcatgagggcagcaccaaagggatagtgctaaaccattagaaactgcccccaaaggccgggcgcggtggctcatgcttataatcccagcactttgggaggctgagataggcggatcaccaagtcaggagttcaagactagcctgaccaacatagtgaaaccccatctctactaaaaatacataaaattaggctgggtgcagtggctcacgcctgtaatcccagcactttgggagcccgaggcaggcagatcacctgaggtcaggagtttgagaccagtctggccaacatggcaaaaccccgtctctactaaaaatacaaaaattagctggacgtggtggcggtcgcctgtaatcccagctacttgggaggctgagacatgaaaatcacttgaacccaggaggtaaaggttgcagtgagccaagattgtgccactgcaccccagcctgggcaacagagtgagactcagtttcaaaaaaaaaaaaaaaaaattatggttggaagagtgaggccccagacagaatcactgaccctccccatgcttggggttcattagacgtgaacaggagctagaagccaagcccattcccagccaggcctctttgggaagacgcagttattaagaccaccagcagacggcatgtccattactgacccgcacaaagcaggtagaggtgcaaacctctgcccatctcaggtgcagggaaacagaggcctttgcctctaacaacttgaattctgatgtagagacctggttccatctgcttgtgggggaaacgtttaacatcagctcctacctgggctccccaggccctcgtgcggtttggccccagttctggggtcttaggctgggctaaggtttctgggagcccatgtcccctagggtccccgcttcactgctttgttaccaccaagagactccctgtccccatctgaggtctggcagctcttagtcatgtcttggagggaggacgggcatccagggctgaccggtcaacgtccagcacctcccagggactatgggaagactgagtggtgggtctcgtcctctcgggatacttgcgcttctctttccccttctctacaacctggaaagaagcccctcaccgcgtcctacttttgcccaacacgcttttttttttgagacaaagtctcactctgtcgcccaggctggagtgcactggcgggatctcggctcactgcaacccccgcctcctgggttcaggcaattctcctgcttcagcctcctcagcagctgggattacaggtgactgccaccatgcccggctaatttttatatttttagtagagacggggtttcaccatgttggccaggctggtctcaaactcctgacctcaagtgacctgcctgcataggcctcccaaagtgctgggattctaggcctgagccaccgcgcctggccccaacacactttttttttcctgtagggcaactcacatgcctacaggagctggttccataaaataagtttcccttaactaggacagaagtagcagtgtcaatcacacgacacctgtgaaggacgggggcggtgaaaggtgactgccccacctgcagagccagccgctacttagatgtggcagattgttgccttgaaggaaagcaagaccctctgtttccagatctttcgttgttgttggttttttgtttttgtttttaagtttaggattactgaggcatatgtagtaaaatttatccattttactgctccattaattttaacaaatgtgtattgtgtaactaccaccaccacagtcaccacatagaatgttagttattgattgattgattgagatggagtctcactctgttacccaggctggaatgcagtggcatgatcttggttcactgcaacctccacctcccaggttcaagcaatacttgtgccttagccaccccagtagctgggactacaggcgtgcgccaccatgcccggctaatttttccatttttagtagagatgcagtttcgccatgttggccaggctggtctcgaactcctcacctcaagtgatccacctgccttggcctcccaaagctacttatttctgaaacagggtctcactttgttgcccaggctggagtgcagtggtgtgatcatagctcactgcagcctccaattcctgggctcaagcaagcctgccatccgcctcctgagtagctgggattgctggtgtgtgccccccacacccagctaatgttttattttagtagagatgggggtctcactacattgcccaggctggtcttgtactcctggccttaagcgatccttctgcctgcttcccaaagtgctggggatgacaagtatgagctgccatggcatgccttcaaacattaaagttttttgaaaaagaagctgggaatccagatttttatgtgacatttattaaaatgtcggcaactcatttttttaaaagtagtgaaagggtcaaaggggacatgtcagcaggttggataccgcttgtgggattccagattgcaacccatgagctttaggaaaatagaatccaaaatatcagctgggtgcggcagctcacgcctgtaatcccagcacttagggaggccaagatgggtggatcacttgaggtcaggagttcgagagcagcctggctaacatggtgaaacctcgtctctactaaaaatacaaaaattagtcgggcatggtggcgggcgcctgtaatcccagctacttgggcagctgaggcaggagaatagtttgaacctgggaggcggaggttgcagtgagccaagattgtgccacggcactccagcctgggtaacagagttaagactccatctcaaaaaaaaaataacaacaaaaaaaccccaaatctcttactggtgattgtgtgccccctgttgtgtgccttcctggacctctctgagggaggaaagggcagggcctgaaacgttctcccggccacagcctccctgttatccctcccctctgcttccttcgccaggccaaggcgaacctagacaagaataagcagacgctggagaaagagaacgcagacctggccggggagctgcgggtcctgggccaggccaagcaggaggtggaacataagaagaagaagctggaggcgcaggtgcaggagctgcagtccaagtgcagcgatggggagcgggcccgggcggagctcaatgacaaagtccacaagctgcaggtgaggaggtggcgcggtggtgtggtgggcagtgctgggtggtgcccagttctgtggggaggagcctcttcccggctcgctgaggtctctcttgctgcaaggcaagtcctttcctctagttgcgttcctggaggagaggcgatgatctccctgttcaattaaatattaaaaaaaccttctggccaggcacggtggctcatgcctgtaatcccagcactttgggagacagaggtgggtggatcacctgaggtcaggggtttgagaccagtctggccaacatggtgaaaagtctctactaaaaatacaaaaattagccaggcgtggtcgtgggcacctgtagtcccatctactcgggaggctgaggcaggagaatagcttgaacccaggaggcagaggttgcagtgtgcggagaccgcaccattgtactccagcctgggctaaaagggcaaaactctgtctcaggaaaaaaaaaaaaaaagaaaaaaaacccttccttttccaatttgataagtatttattgagcacctgctgtatgccaggcactgtgcttaatcctgagatccaacagcaaggaagaagagacactgtcgctgccccagtaggactccagccgagtaaggggaagggaagggaagggaaagacatgaataatcacacaaatgaatgtcaaatgatgcagcaaagggaaggcacatgatgcccaagtgtaaataaccagggggcctaacctgggggaggaggagccacgaaaggcttccctaaggagcatggataagtctaccaggcagagggaacagcgtgtgcaaaggccctgtggtaagtagaaaaattaggagagagacatacagccagtagagctggagtgcccagctggggttgggggtagggggagatagtacagagtggggttggagggggagcttgtacccagatgatgtagggcttttgagaacctattacatgtatgttgatccttactctgggcaatgtgaagctgttgaggggttttaagctgctgaatgacatggtctttttgtctttggtcttctttcacttggcatagccatttaccctgccttgccactcatggggacgtggccaaagttttcacaaatgtttaacatgtccacagccagggaccaaggggcgagggaagaattaagtgagatgtttttttctcacatgcagttgagagcagggcttttgccgccctcatataagcagtgtcaagatcattcatatcctccttgtcaatggaagagatggaggggtaggctaacagcctcaaagggacttatgcagagacactagggagtaaaagccagagaatacagagaggacgtttttacctttagggcctgcgtctctggctttggccatcagggtcaaagagtaggagtgaggaaggaagggatgggacagcatccctgggacgttcaagtaccatcctggtctcccttctccagccttagagagtggaccagccagagcacctcgtctggactctcagacctgctgctttgtctctaccaaccttggcagggatctaggatccatttagtgggatcaggtcccagtcaataccattggggctcaaataagttcttagaaccacagagtctagggccagggtcccaactcataggtgacggagttcccttcaagccacagattctgttttttttgtgtgtgtgtgtgtttttttttttttttatcagagtcccatacctcacgggtattttctcaatcagtgaacacctcaagtactagcccatgtgttttgagtaaaaagggctcctttcaacgaggatccccttctagaggctttgactaaccagtctcttggcacccttagaatgaagttgagagcgtcacagggatgcttaacgaggccgaggggaaggccattaagctggccaaggacgtggcgtccctcagttcccagctccaggacacccaggtgagtgtcctgccacatcatccaggggacctggggggtggccttcctcggggcaggtccctgggacctctttgcatcccttttgcaggagctgcttcaagaagaaacccggcagaagctcaacgtgtctacgaagctgcgccagctggaggaggagcggaacagcctgcaagaccagctggacgaggagatggaggccaagcagaacctggagcgccacatctccactctcaacatccaggtgcctgccccgtgtccttgcttccttcatgggtcctctcaacttctctgcgctgagatcccccgcaggcagatcgcggtggagtgttggtgcgatggtgcttgaccccccagcttcccctgctattgggtttctccaacgaggagacatggtcttcgcttctcagagtctgtggggccagggacaggggccactcatggtccccctctcaccctaccctggacgctgtccttgtagctctccgactcgaagaagaagctgcaggactttgccagcaccgtggaagctctggaagaggggaagaagaggttccagaaggagatcgagaacctcacccagcagtacgaggagaaggcggccgcttatgataaactggaaaagaccaagaacaggcttcagcaggagctggacgacctggttgttgatttggacaaccagcggcaactcgtgtccaacctggaaaagaagcagaggaaatttgatcaggtagagggcgtggggtgtcccccactctggccatggacgctgggttggggaatcagctctgcagagtatgacgcgtggctctggcctgtgcctgcatcccctctccactctgtggggagccatgggaggctgtcttatcttgtcttgggcgaccatggagcattaacgctaccaggtcacagtaaggatggcaaagaagccttgatgactgtgacttttctgggtaccagcaccatgagggtcacctgcacacatggtgatgccttagtttctagcctgaagaaggaatgaggtgcttatttattcactaaatgtatttactgaatacctattgagtagtattccaagtaattcagtttctatacttttaataccactcttccctaagatttcattctgtaaaattccaagtacacagcaaagttgacagaattgtacggtgaacacctttaaggccaccacctggattcagtcattgacactgtattatatgaactttatcagatacttattttgagacaggatctagctctgtcacccaggctggagtgcagtggtgtgatctcagctccccgcaacctccaccactgggttcaagcgattctcctgcttcagcctttcatgtagccgggattataggagcacaccactatgtctggctaatttttgtatttttagtagagatggggttttgccatgttgtccaggctggtctccaactcctggcctcacatgatctgcctgccttggcctcccaaagtgctgggattataggtatgagccactatgcccggcccacatatttatttataaagactaattctatctatcatgccttatctcttgggtacatttcagagcaaattacagatgtcagtacatttccccttccacacctcaacattgcatattaattagagtttatttttaaacacaattttgcttcttttggggtaaaacttacatgtgatgagattcacaaatcttaattgtacgataaatggagacccctgtatgacccaaacccctaaataccaacttttaagatacattattatttagtaaatatgatttagtttacaagtgactcagggttattctaaaaatcagtttgagaggccaggcacggtggctcacgcctgtaatcctagcactttgggaggctgaggcaggtggatcacttgaggtcaggggtttgagaccagcctggccaacatcgtgcaactttgtctctactaaaaataccaaaattagccgggcgtggtggcgcacgcctgtaatccctgctactctggaagctgaggcaggagaatcgcttgaacccagggtggggtggaggttgcagtgagccaagattgcgccactacaccccagcctgagtgatggagtgaaaaccctgtctcaaaaataaataaaatgaggattgtacagtgaggctaaatgccagatgcctgcaggttccctacccctccctgactgacctcctagtgtcaggattctagataacatcccagtttctcctcttcccatcagctacctctcctctgggctgtcagctcatcttcaatgcttcgttatctggttgaaggcctgaggttgcttttattttcctgtcacatagagtgtagtgcagtggcacacatagtgtgggatttttgtgttgactgtgccatttagaggtccctgtctttgctgaatactggaagtttggcttttggatgttacaatttataatctgctctgttctctctgaagatgagattaacgtgagcatggaatgttctctgagttgcttctccaagcagagagatatgtgtgcagggccacccatgcttaccatttccctactgaggctcttaggatacttttgtaagatattaatagctacttgtggccatgaaacaaactaataactagcttctggcagctttaaatctcactttgacctcagtgtgctctaagcaacgtgggcaggtctagtggtttcgaagcacaaggatttggccaggtgtggtggctcacacctgtaatctccgtgctttgggaggccgaggcaggaggctcacttgagggtcaggagttcgagaccagcctggtcaacatggcaaaaccacatctctacttaaaatacaaaaattagccaggtgtggtggtgggcacctgtaatcccaactactctggaggctgaggcaggagaatcgcttgaacccacgaggcggaggttgcagtgaaccaagactgcaccattgcactccagcctgggtgacaaagtgagactccatctaaaacaaacaaacacacaaaccaacaaaaaaaaacaagtcagctgatttctggctctgcataaggttgatgtagaagtcagaacgccagatgattatataaattactcccatagctaacctacactgcttacacctgcacctcaatacattcagcaggacacagggcttcccccggtatttacaattcagtgacgctgaccccggatatgcctagaagtcacctctgggtcttgtgttgtagttgttagccgaggagaaaaacatctcttccaaatacgcggatgagagggacagagctgaggcagaagccagggagaaggaaaccaaggccctgtccctggctcgggcccttgaagaggccttggaagccaaagaggaactcgagcggaccaacaaaatgctcaaagccgaaatggaagacctggtcagctccaaggatgacgtgggcaagaacgtaagtggctctgggtggtttttctcgtccatgtttcgcctgcccaccctctgtgctattcaccagtccatgcgaggctagctcctggcctttttcatagcgaactatcatcggaaatggaaggaggtttttggactggtgcaggggctgggaggggctgagaatggcagtcgaggatgggtctgagttggggggtccgaggataaggctggggtctgaactctcaggggtcatcttgagtcccggccatgcatcctgtgggaggccaaagccacctccctgatctcctgaggtgccgctcacggtgggtttctcaatcgtcttcatgaagttgagcctcatagaatggggctgcccgctctgccggcaggtccatgagctggagaagtccaagcgggccctggagacccagatggaggagatgaagacgcagctggaagagctggaggacgagctgcaagccacggaggacgccaaactgcggctggaagtcaacatgcaggcgctcaagggccagttcgaaagggatctccaagcccgggacgagcagaatgaggagaagaggaggcaactgcagagacaggtgcgtgctgccggggaggccagcagagggaggtcgggtggcctttttcattcctatcaccactctcatggttggtgtggaaacttcgttttctttatttttttttgaaacagagtctcgctctgtcgcccaggctggagtgcagtggcgtaatctcagctcactgcaacctccacctcctgcctcagcctcccgagtagcttggattacaggcgcatgccaccatacctagctaatttttttttttttttcagtggagacaaggtttcaccatgttggccaggctggtcttgaactcctggcctcaagtgatccattctcctgttggcctcccaaagtgctgggattacagacatgagccacccacgcccggcgtgattccgttttctcatctgcaactggggatgagatgcccacctcacaagggggctgtgctggggaaggggtgcagtgatgtgctgcctaggtgagccaaaggacctcccaggggcaagtggggcagcacacatctctattcctcgcccagcttcacgagtatgagacggaactggaagacgagcgaaagcaacgtgccctggcagctgcagcaaagaagaagctggaaggggacctgaaagacctggagcttcaggccgactctgccatcaaggggagggaggaagccatcaagcagctacgcaaactgcaggtgggtgacactaggagcttggggcatgggtggagggagggcacagttcccctcaggccaccgaagtcagcagagcgggctccaggaagcaagcctgcacctgccattggtgtgggttcagctggggtttttctggaaccattcaggatttggtggctgtctcctgccctgggtagggcagcattattaggtatttggccactgccctcagatcacatcaggggctcagcttctcaggcaggtctgtggagcccacccagaatggtgctcccagcgcaccaccagccacctggaactgagagccatgctcgtgcaatgggaacttctttgtggtcaactgcagaaaatccaaggggtgggtgtgcaaagctgaactgggcagcagaacttgggggagtaaggacatctgagcttgtcctccctgttgactcatgcaggctcagatgaaggactttcaaagagagctggaagatgcccgtgcctccagagatgagatctttgccacagccaaagagaatgagaagaaagccaagagcttggaagcagacctcatgcagctacaagaggtaaagcctcgccttgctaggagagcctcagatgcgggtgtcacggtagcaccccttggcagctccagtctgtgcattcccagatttcatttcgtcctcctctggggtccacctgtctagaaagacacacgcttccctcctctatgtattcacggggcctcccctgagctcagaggaagaacatgtactttcaagggtggctgagttgtcagggtggactcttggtggggcttggcctttccctggcagacaacagccttcctccctcccacctaggacctcgccgccgctgagagggctcgcaaacaagcggacctcgagaaggaggaactggcagaggagctggccagtagcctgtcgggaaggtaggaaactgaatggaggaagagggctctgaagcagaggatggggggacaggcagcatcctcgacccccattttattttttaaattttttcgagacagagtttcattctgtcacccaggctggagggcagtggcacaatcttggctcactgcaacctccacctcccaggttcaagcaattctcctgcctcagccttctgagtagctgagactacaggtgtgtaccaccatgcctggctaatttttatatttttagtagaggtggggtttcaccatgttggccaggctagtcttgaactcctgaccttaggtgatcctcctaccttggcctcccaaagtgctgtgattacaggtgtgagccaccgtgcctggccctggacccccatttcaatgctgctgctgacgaagcgtcctctgagattggggacagacccatggtggttaggttttccgtcagcgctttcatgcctgtttgggggtgtggctgctttcattcattcccaataagtagctgtgtggggagaaggggaggccaggaagagtcagggaggagtgtgctggtccccatcccaatcccagctttgctgacacggacccggcctgagtcccggctgtccacttcctggctgtgtaactacagatgagtcttctaatcttctccaagcctcagtttcacccattagatgatgagggcaatacccctgaggcatgactccaaggagggggcatcttttaaggcgggggagggtagaggcccccaccatggccgcccttcccccaggaacgcactccaggacgagaagcgccgcctggaggcccggatcgcccagctggaggaggagctggaggaggagcagggcaacatggaggccatgagcgaccgggtccgcaaagccacacagcaggtgagggccgcctggacaccacagtcacgctgcctactgtctctcctgcagcaggatcctgcaccagtcaacacacgcgtggcggcttcctgtgtgcaggccctggattgagggacaagagggtggtggggcctgagagtagagatccagggcccttacaccagtgcccaggctgctgtcttcagaatactcctctccacgctgcagtgtctcattttccagccacggcgtggctggctccccgtacctcacggccatccctggagtccgggccttgggatgctctttcattgcgttttcccctagctgaagctctgaccttatccagtgagcccttggtgatgtcactgagcactagttccatggtgggcactagggaccatccagtaacctgcagccccttgtggtgtagggtgaacaggcatcattctccaggcgactccaggacagagaaagcaagggacaagtcactcgctcagcctgggtggcactgacacttgtggaagcacctcttttttttggagacagggtctctctgtggcccaggctggagtgcagtggcgcaatcttggctcactgcaacctctgcctcccaagttcaagggattctcctgcttcaacctcccaagtagctgggactacaggcacgtgccaccactgcccggctaatttttgtatttttaatagagacggggtttcaccatgttggccaggcaggtctcgaactcctgagctcaagtgatttacctgcctctgcttccaaaagtgctgggattacaggcgtgcgccaccacgcccggcctggaagaagctcttgagtggagttttacaggatgaaggagaggacagggtgcccgggatcaagggactcgtgcagaggccaaacaaggcaggaagaggcatggtctcagtgcgctctcttgggcttccctgagtccgcctcatggccttcactctcctccccaggccgagcagctcagcaacgagctggccacagagcgcagcacggcccagaagaatgagagtgcccggcagcagctcgagcggcagaacaaggagctccggagcaagctccacgagatggagggggccgtcaagtccaagttcaagtccaccatcgcggcgctggaggccaagattgcacagctggaggagcaggtcgagcaggaggccaggtatgcgggtgtggagttccgaacccagtttgcaggggggtgatggacagcaggagtcatagtgaagtcagggaacctcttccagcatcagttctggcttgtaagaagcaagctctgtgatgcctacagtgcaggtatgttgtgagaactgaacgtaaacacagcaaagtgccctgctggttcctggcctagggcaagcacctaaagtgtgagctgctcttagcatctccatggtcctcctgacattaacctgccttcccagcagtacatatgacttttcccagcctctgcagggatagcatgctgacagatcaaaaatccaaccaggctggacgtggtggctcacgcctgtaatcccagcaatttgggaggctgaggcaggtggatcacttgaggtcaggagtttgagaccggcctggccaacatggtgaaaccctgtctgtaccaaaaattagccgagtgtggtggcacatgcctattatctcagctactcaggagactgaggcaggagaatcactccaacgtgacacgtggaggttgcagtgagccgagattgtgccactgcactgcagcctgggtgacacagtgggacccttccacacacatacacacacacaaaaaaaaccccaaaaaacaaaagtccaaccggcagcccatttggtacacacactggaagccttcttaattatgggtcgaatgaggcatatgatcacagcacatttcttaccattggattctaaggattctcacccattctcttctagtagctttttcagtaattcgcacgccctgcaatgcacccatttaaagtgtataattcaagggctattcatatattcacaaacatgtaaaaacgatcaccacagtcattttgagaacattttcatcggctcaaacagaaaccccaggccatatgtggtatttcatgcccataatcccggcactttgggaggctgaggtaggtgggagcagcacttgagtccaggagttcgagaccagtctgggcagcatagcaagacttttttatttttatttttttgagacatagtctcactctgtttcccaggctggtgtgcagtggtgcgatctcagctcactgcaacctccgcctcaccctcccaagtagctgggactacaggtgcacaccactgtacccagcttgtaattgtattttttagtagggatggggtttcaccatgttggccaggctggtctcgaactcctgaccacaggtgatctgcccacctcggcctcccagagtactgggattacaggcatgagccaccacgcctggccagagactccgtttctatgaaaaacttttaaaagtctgagcatgctggtgtacgcctgtagtcccagctacttgggaggctgaggtgggaggattgcttgagccaggagttcaaggctgcagtgaactatgaactagggtgaagagcaggcattggagcaccactgcactccaacctgggtcacacagcaagaccttgcctcctccccgcaaaaaaaatagaaaccccatgccctgtaaccactcccttcagtccctggcaaccataatctactttctgtctctatgaatttatctattctggacacttgatatcaacggaatcacacactatgttgtctgctatgtgtcttctttcacttggcaagaattccaggctcatccatgctgtggcatgcattgatactttattccttttcatggctgaatactattccaccatctgactgattcttgagaggagtccagatacggggctcaggaaagcactcaagatgccacctccaggtgacacaccagctacaaggggtgccaccctccgctgaaaccacctgttttccttgctgtttgcagagagaaacaggcggccaccaagtcgctgaagcagaaagacaagaagctgaaggaaatcttgctgcaggtggaggacgagcgcaagatggccgagcagtacaaggagcaggtagcccctgccacccagcctccctcgagcccccagcccccagccggcctcccctaaccacccctccaactctccgcgacaggcagagaaaggcaatgccagggtcaagcagctcaagaggcagctggaggaggcagaggaggagtcccagcgcatcaacgccaaccgcaggaagctgcagcgggagctggatgaggccacggagagcaacgaggccatgggccgcgaggtgaacgcactcaagagcaagctcaggtgaggagcccgtggcccgggaggaccccgtctctcaggccagagaaaagcactgggggctcgggctcctttcggcctgcaaatgccccttgtgcccacagccgccactcccttctgtggtttattcctgcttctccttaatcactaagcttagtgtgggccaggcactgagatcagacccgggccctgccttgcctggtagcagctaaccttctagatcctttaacgatcgaccgtctcccatccggtcctccggctgaggaggaggaagaggctatccccactgtctcctccagcccctccttcattgcatcactgagtcttcacgacatccattgaagctgcaacaccaccccccgccacttcacctccttcctgacatgctctgctcctcctttctccccctcagcactgctgccatctgggctgcattattctcgggtatgggggctgtccgacattccccatcagaaggaaaaagatccctgaaaagtagcaggtgcttacatttctggcctctacccaccggctgcagtagtcccccaccaccctgcaatgtgacaaccaaaaatgtctctagatgttgccagaagtcctctagagatgggagggtacgactgccaccccgctgagaattcctgctgtcactggagtgggggctgttttctctcccatgcctctggtaccttgggggtcccccctgctcccaagggctgcttccaccaccctgtccatccatcccgattggctcccaggaggttttagctccgggcttcctgtctcccacaccactcctcacagttctccatgatttcaacatccaggtgggcgacgcagcctctcggttccttgaccctctgggtgatcctgctgcttctaccgggccaaccagtactcctaggagccctcacaatttgaccctcaggcatcccattgtctgcctggtgccacctttctttggctctgtccccaacggggtcttcactccattaatgccatcagcctctgacccagctccaaaccagctgtctagtaacccccgtcgcgcatcctcaacatccggttccccctcttgcattgctgcaatcatttggtgaaagcacaacccaaatgaaactcaagcttggctgggcacgggactcacacctataatcccagcactttgggaggccaaggcaggtgaatcgctttgagctcaggagttcaagagcagcaagaccccatctctacaacaaacaaacaaaaatcagccaggtgggatggcgcaaacctaaaatcccagctactcaggaggctgaggtgggacgatcagtggagccccagaggtcaaggctgcagtgagccatgatctagccaatgcacttaccctggatggacagagtgagaccctgtctcaaaaaacccaaaacccactctccaccttttcccacagagcaggccttgctcaggggtcctcccacacccctccctcatcttctcactctctgctgcttttcactttttctttgaacttatgatcgctcctccccattctctctcagctggggaccttacttcctacttaactcaaaagcagaaatgatcatgaaacgtgcacaagctcccactgcctcatcatcctacctccgtgcacctctgtacacttctattttttttccatttctatgctgaaccctctggcaccaaccgaggccaacacctccattggacccgaccctcttgttcactcaagcacatagctccaaaaatccttattttgcaaggttttctctttcatttgctccatcagcaaatggaataacctcttagccccatgtctaccttgctacccttactacaaaactggatgtgaatgccgaaaccctgtctctaccaaaaaatataaaaattagccaggtgtggtggtgcatgcctatagttccagctactcaggaggctgaggcacaagaatggcttaaaaccgggagagagaggttgcagtccagcctgggtgacagagtgagactcggtctcaaaaaaaaaaaaactgtatgtgaagagttgctggttcccctcgcccccacccatcactctcccagaagcctcccatgggtgacactaatggccagaggtcccctgacagggcagcagcacgtgacgcagtccatcatgcctctggcctaattcacttgcttccctggacttccccgacaccatccacacctgcttgtcccccgacctgtggggttgtccctcttcctctcctctgctgatccctcacctcgaaacctgcttgccactagaccgccccagggtatcaacttagttctcttttgggcagagtcttgctctgttgcccaggctggagtgcagtagcactatctcagctcactgcaacctctgcctcccagttcaagctatttttggcctatttttatatttttagtagagatggggttgcaccatgttgcccaggctggtcttgaactcctgatcttgtgatccacccgcctcagcctccccacgtgctgggattacaggcatggaccactgcacggccttagttgttttcatctctccccagcgctaggtgagaggtctcaactaatcttggcgctttagaattccatgtatatctaatgactcctcagttcatctctgagaagccctagcttcttcctagaacctcagaccaccctcccgttcccacatggatgtctaataggcagctcacaccaaacatgctgcaccccaagtcctgactgaaactcttcacccccaaactggctcctctctccagctcagcagctaaaatgatgaagttgccaacaattcacatcacaaacctcgtggtccttcttaacgttttggtctcctttataccccacatcccatctatgggagaatctggtcaactttccctaaagaatcctgcccaggctgggtgcagtggctcaccccttaatcccagcactttgggaggccaacgcaggctgatcacctgaggtcaggagttcaaggccagcctgaccaacatggtgaaaccccgtctctactaaaaacacaaaaattagccgggtatggtggggcgtgcctgtaatcccagctactagggaggctgaggcaggagaatcgcttgaacctgggagacacaggttacagtgagctgagatcgcaccactgcacttcagcctgggtgacagaccaaaactcggtctcaaaaaaaaaatctccagtgtctaggacagcaccaggcagagtgaacctttatccctcgggtcctagatattttccccgcttcattctcataccaccacagccatgtgctgagcctcttactacctttaataccaatgacttgatcttttaacagttttaatcatacatgaatataacggcaaataaacatacctcctctatatttttaaaccagcatcacctctatcaactggttacgatgaaagtaatatgataaaaatagtatcaagttcaatatctagctattgtggccacaacttgatcaccaagacctgaagcctacttctccactaaaaagggagtgacaacagccattagcaccaaatagactctctctgacatcataattagacttgtttaaaaagagttggaaaggaaatgactttctcagggcccagttcagttagcggatggcatgcccggaagccatctgaaatcacctctagagtttggggaccactgcgtgagacagggaaaagtccaaacccctctgagaaggggaagagagcagctggcgcagggcaccaagccttcagggaaaagccccactcgctgcatggtgagcgcttgttggtcccccatggataggagagaaaccaggcctaggctcccaaagtacagcaggggcctggaagcatctcccagggttgaggggtcagtggaggagagctgttctcactgtgaagactcctggggcaaagcgcggtggctcacgcctgtaatcccagcactttgggaggctgaggtgggctgatcacctgaggtcaggagttcgagaccagcctggccaacatggtgaaacttcatctctactaaaaacacaaaaatcagctaggcgtggtggcagatgcctgtaatcccagctactcgtgaggctgagacaggacactcctttgcaacccaggaggaggagcctgcagtgagccaagatcaagcctctatactccagccttcagagcaagactctgtctccaaaaaaaaaacaaaaaacaaaaaccctcagatgtgctctgctggcaaccagtccccctgcctctcctgagtggctgggctgagcgatggggatacagccactctgactccctaccccactgctgtctctgcttccctttctcaggcccagtgatttcttttctttttattatttatttttagacggagtctagctctgttgccaggctggagtgcagtggcgcgatctcggctcactgcaacctttgcctcccaggttcaagcgattctcctgcctcagcctcccaagtagctgagattacaggtgcgtgccaccacacctggctaatttttgtatttttagtagtggcaaggtttcaccatactggctgggatggtctcgatctcctgacctcgtgatccacctgcctcggtctcccaaagtgctggggttacaggcgtgagccaccatgcccggccggcccagtgattctttagcacacactggacacctcctgtgggttctgccccagacacttgagccttcttgggcagccaagggcaaagtggaacaaaaagaccatttttgccagttccgacacgaatacacacataatgcaggtggaaggtctgtcctgccttctgcatcttttgggtgcacaaaaacataaaatcaggcactagagccctgagggaggttggtaagcatgcctggctcctcagccaagaaggaactgtagtgcgagtttcaccaagttctatcagccagacgcatctcgacacaagccctctctaaagccagacccacttacctaccactggctacactgccagttacctccggcaagagctgtacaaggcctccacctctcctctcttgctagaggcccgaaagctaatgaagagcaagtaatcataaaccaagggacaggcggctgcaggttccttgcctgggacttcttggcttctgttccaacactgatttctcaaactagcttgctcaaatgcttttacttccctgaaccagtatgcaatcatgggatttataggaggttcttaaaagtagctctaaaggacagacattttcctttccatttaaaaaactgagccgggtgcagtggctcacacctgtaatcccagctctttgggaggccgaggtgggtggatcacttgaggtcaggagttcgagaccagcatggccaacatggtgaaactccgtctctactaaaaatatgaaaattagccagccacggtggtgcatgcctgtaatcccagctactcgggaggctgaggcaggagaatcgcttgaacccgggaggtggaggttgcagtgagcagagatagatcatgccagtgcactccatcctgggtgacagagtatcaaaaaactgcttatcctttcatctaccagcctcaccaaatgctcttggcgtcaggtgattcactgcaacgttgacttaagggtgcttttaatgccaggtgcggtggttcatgcctgtaatcccaaatcccagcaccttgggaggccaaggcaggaagatcattgacatcaggagttggagacaagcctgaccaacatagtgcaaccccatctgtactaaaaatacaaaaattagccaagcacgtggggcctgcctgtaatcccagctactcgggaggctgagacaaggggatcacttgaatccaggacgtagaggttgcagtgagccaagatcgcacccctgcactccagcctgggtgacagagactatctcaaaataaaaaagagtgcctttaattattaaatcgaagcaaatgtctttaacaattaagaatatacttaaccgggctccttcttgtttgctgatggtaacctccggggattctctctctgtttcagagggccccccccacaggaaacttcgcagtgatgcaccaggtatcatgccttcagcttcgcagctgtgtgttgtctcagtatccatttcttttctgcccaatgcgcccctctgcccaccccaatttttaaacccttgcacatttccacgagattcttgcaaaatctggaggcttggatatctttgtgcaaagctttcattgaaaccaagatcaggatgacaaatagacctcatctcttgacccactgtccttcctgcctctgggcagcacatgtgacatgacacccaacagtgtgcgcccttatcactgcatcttgacgagatggcagaggctgtgtgtgtagcttggatttttcttcctttcataccaaaagccactcttacgtggttagggcactcagcagtgctgtcctcccttgtccagtgaagacactgcactgaatgaatatgacagttccactatctgggcacattcctggagaacgtacttggcttctagttggctggtctgggtcacaagtcagagatcacaaagttcacggtaactgcggcgcggcaaccagtcctcccatgattcagctttcacaggcttgtctgcgaaggaaatgagctcactgcgatgtctgacaaatgccgggggctgcacgtggcttgagtgatgtctagctacaaactgcattttcagcacacggggtggaagctgaccaccgcaaagccaagcacagtcctggcagagccttttctggaggcttcacgggcatgtacatgttcagggactggggagtggatacccaagactcaaggatgcacacagggcccttcccaagaaagcatgaagaggtctctgctgctctgggattttgcttttttttttttttttttttgagacggagtctcgctctggagtgcaatggcgcaatcttggctcaccgcaacctttgcctcctgggttcaagcgattctcctacctcagccttctgagtagctgggattacaggctcccgccacctcgcccagctaatttttgtatttttattagagacaggatatcaccatgttggccaggctggtctcaaactcctgacttcaggtgatccgcgcgccttggcctccccaaatgctgggattacaagcatgaccaacttttcacaggtgaagttaggccatgtggatctgacttcacctcatggagaggccaaaccaaccctcatttgtgtccatcttcatttttggagaatctcagctttgctgtcactaccaaaatacttaaagcgcagggtgaggtcttgttaagagccagttttgtgggggagcagatgagtttctaggacacttcaagcagctctcctaccagctgattgggatcataggataagccaaattccagggtgggctgaagtgcagaacccactggtcagtgggaaactgagtccttgcaaactagcaggtgcttacactcaagatgattcccgaggccttggataagctgagtccacgaatagaatccaaatgctaggccaggcacagtgggtcatgcctataatcccagcactttgggaggccgaggcgggcagataacttgaggtcaggaccagcctggccaacatggtaaaaccccgtctctcctaaaaatacaaaaattagccaggagtggtggcatgtctgtagtcccagttacttggaaggctgaggcaggagaatcgcttgaacctgggaggcagaggctgcagtgagccaagatcacgccactgcactccagcctgggcaacacagcgagactctatttcaaaaaaaaattccagattctccaggatcagaccctttaagaaaacctttaggggggtcccttagttcctgtaacaggtatagttggtgtcaaccttggtctaggatttgaaaccagttccaagaaaagcacttcagccaaaacagagtatcttgcaggctgacagccaagcaaggagcttcaacggcccagggcacaatgtatttcttaggtcaagggagcaaatttatccattaagcttttccagttagcaaatagactcttccaagagccaaaaagagagtgcctagagcactgatgtggaggttagggactacttcccagctcatcagatttttttttgtttttttttttggagacagtcttgctgtttcccaggctggagtgcagtggcacaacgttggctcactgcagccttcacctcctgggttcaagcaattctcctgcctcagcctcctgagtgactgggattccaggcgcctgccaccacgcacggctaatttagtatatttagtagagacggggtttcaccatattggccaggatggcctcgaacaactgacctcacgagtgatctgcccacctcggcctccccaagtgctgggattacaggcatgagtcgcagcaactggccaacccatcagggtttgaacctggagttaaaactgtgacgaagagagctgtgtggggagcgtacagggaacagtcaaactgctgctcctctgcgctgaatttgagcatccttctgagtcaagcgcttggaaaacagtgctaaaaaagaaaaagacttaagggtcacatctagagagagaaggatggagagttctctagtagggctgcaagtccagaagcttctctgtgaagctgggctaggagtgtttactttgaagtggctgcagctttaagtatttattcctgatcgctgcactgcgggaagtcccatcctttatagccaggtgggctttcccagccggggtctctcccatcctctgtcaacaaaagggtcatttgcgaattcctcttctcagtgatcatgaatctctgggccttgatttttttttttttttttttttgagacggagtctcaccctgtcgcctaggctggagtgcagtggccacatctcggctcactgcaagctccgcctcctgggttcatgtcattctcctgcctcagcctccctcccgagtagctgggactacaggcacccgccagcacgcccggctaattttttgtatttttagtagagacacggtttcaccatgttagccaggatggtctcgatctcctgacctcatgatccgcccgcctcagcctcccaaagtgctgagattacaggtgtgagccaccatgcccagccgagttgttccttttgactaaagaattggtcactgagttgtgttcatccttatggcttcttatccaacccttgcgtggggagcaaaagtctgctctcttctttgatgtcctaaaataagacctgtcttccgattcaggtcaaacagggccagatggccagagcccaacataattatttgttgcggttgctgaaaagagttaagtgtttcttctgaacggtgaaggctggcagcaggcagatctgatttttccttcttctgcccactctcttcctcctacccaaagtctcccctcacgtgaccagcccttcctgtgaagtcgaggtgataaactcaagagagaaccagcgcagagaggagatggcagcattaaggagagacaggggtgtcctactggctggagctaaaatccacctcagaggccaggtgcactggcacacacctgtaatcccaacactttgagaggctaagacaggtggatcgtttgaggccaggagttcaagaccagcctgggtcacatggcaaaatcccatctctgctaaaaatacaaaaattagccaggcgtggcagtgtgcacgtgcatgtagtcccagctactcaatactgaggctcaaggactgctggaactcaggaggcagaggttgcagtgagccaagatcatgccactgcactccagcctgggtgagagagactcttaaatttcttttttaaatccaccttgaaggccaggtgtggtggcccacgcctgtaatgccagcgctttgggaggccaaggtaggagaactgcttgagctcaggagttccagaccagcctgggcaacaatatcaagacctcatctcaatttaataaaataatccaccttggattaacacgtataatttccttttctaatattcactgggcacctgttttacgccatgtgcggtatgttccacgatcagcaaaacagatgcagcagtccctgcagtggggaaaactcagtccatgaacattcacaccagcagggggtgctgtctcgccttttaaccagggagcccctctgtgtccttctcaaggctgcccttgtccatttcaccttcttccaattcaaatcttgaaaactcacctctaaggcgaatgggggtgaggagatacagaagaaaaacagtatgttctctcttcaactctgccccatgggctatgaataaagtcagaagacaaaatcccctgcttggtttttggcgtttttttcctattctaaatcaaagaccacagcagaccagaatcctgtggcttctcaaatgaccaagcctgacatattgaaaagcagatcgtcttgctttgaaaaaccttctccacccacccccgcaaccaatttcagctgattaaattcaatcactcatgccttaagactggcaatgatttgttgacttcaacttgaatatctgcatcttatttgtgccgtgtgtgttttctgccataaaaaaaatttatattgcaataggactatagctacaagtttaaaatagatttataaaaaatctatcccaaccatgaagatttctttgctaaataatgtgttttcttacaacccacaggcgaggaaacgagacctctttcgttccttctagaaggtctggaggacgtagagttattgaaaatgcagatggttctgaggaggaaacggacactcgagacgcagacttcaatggaaccaaggccagtgaataagcaactttctacagttttgcaccacggcaagaaaaccaaaaaccaaaacaaacaaacaaaaaaaacccaacaacaacccagaacaaagcaaaacccagcagactgtacttagcattgtctaaatccattctcaaattccaaatatcacagacacccctcacacaaggaatataaaaaccaccaccctccagcctgggcaacgtagtaaaacctcatctatacaagaatttaaaaataagctgggcgtggtggtacacacctgtggtcccagctactagggaggctgagccaggaagaacgctccagcccaggacttcgaggctgcaatgagctataattgcatcattgcactccagcctgggcaacagagaccctgtctcaaccaccaccaccaccaccacccctactacccctgtattcaaggtaaaaattgaagtttgtatgatgtaagagatgagaaaaacccaacaggaaacacagacacatcctccagttctatcaatggattgtgcagacactgagtttttagaaaaacatatccacggtaaccggtccctggcaattctgtttacatgaaatggggagaaagtcaccgaaatgggtgccgccggcccccactcccaattcattccctaacctgcaaacctttccaacttctcacgtcaggcctttgagaattctttccccctctcctggtttccacacctcagacacgcacagttcaccaagtgccttctgtagtcacatgaattgaaaaggagacgctgctcccacggaggggagcaggaatgctgcactgtttacaccctgactgtgcttaaaaacactttcactaataaatggttataaatcacaatgtcgttggcttttctgttgagctgttttctatagaggaaaaggagttggggaaggctgggttttgcttcatcgtcccaaagattctctgaagtcagggttaacgtcatgaatgcagaaactgaggcctagagaggtgaaatcaattgcctacaaccccacagccagccagagagcagagcagagatgcaaagtgagactgtctaagggggttactgggccgctcagcagggagggcaggggagagaaataaggtgatgtgtggtctaagggccactgccccctgccctcgaacatgactgggaagaacatcttgactcatcaaaaccagtatcttaagaaaaatacaggatttccttgattttttgagttaaaacacaaggtcttgtccaatgagtcagcaaacactttccacaaaacgtcagatggtggctgggtacagtggctcacacctggaatcccagcactttgggaggctgagatgggaaaatcacttgaggccaggagttggaggccagcctagccgagagagacccccgtctctataaaaaaaaggtgttttttttttgttgttgttagtaagccaggcaggatagtgcacacctgtactcccaacctcttggaaggctaaggcaggaggatcatgtgagccaggagttccaggctgcagtgagctatgatcacgccactgcactgcagcctaggtaacagtaacaccttgtctctcacaccaccaccaccacccacccagccagatagtattttagcctttacaggctacatatggtcttgccgaatattcatcttctttaaaacaacccttaaaaacataataaatcattcttagagtaagggccataaaaacaagctgtaggccctgtccttctttcagcttgagtgttttagacagacatgcctgcaaaggctctgttcaacacaaacgatgccgtataccaccaactccatgggatcagacagatttgggagacaggaaacatggaaacaaaggactccatcttgtgaccagatgctaatatgccttgaatgacgcacaaacacatcccggatacatttctaaaaacctggcttgaatagaaattttcaaaaagattttttcatattttttaacttggttaaaaaaagtttttcaccactctgtgggaaaacattaaagtataaacatacaaagcctctttgaccagaagcccaacaagttcaacattcgtttctcttgattttattgatcttttaaaaaaataaaaggacatcttctgtggatacaggttaggatgtttctagggtaagaaacccaccatcgcagcgtaattctctgcggaatttcagtagcacttggaaagttctgttttcaacctgaaatttttgctgttcttccagaaaataacttagtaacaaaatgaaggccgtgaagctgcaggcacactccagaaattagtgtgttcttttaactcgtgtcccaaagagacagcagttcctaacatgcagtgatgagtggacacaccatggtgcgttggaaatcccacgttcacgtctttgacaaggaagcctcctacaatgatcttgtgctttaattttacttgatggtcaccctggttacttcattatgcctttgaatgaagtcctgttcttagtggctgcattaccaaggccatcttgccccaaagacccctcagggtcctgaggcagaattccccccaccccaccaggggactcaggaaaatgaatgatcgcagtttgccaaaagaggtcagatttcccactgacgctggttggtctggaaaattactctgaaaactcgaacgcacctctaggaatctcaatgagaagctaagaagcaggctacagtctcagaggtttatgacacctttttttttttttttggagacggagtctcactctgttgcccaggctggagtacagtagcgcgatcttggctcactgcaccctccacctcccgggtccaagcaactctcctgcctcaacatctggagtagctggaattataggcacgcaccactgcacccagctaattttttgtatttttagtagagatggggtttcaccatgttggccaggctggtcttgaactcctgacctcaggtaatccacccgcctcggccttccaaagtcttaggattaccggcctgagccaccgcgcccagcctattccagtttttaaaaaggcatgtgactgttaagttctctgttcttagacatgatttcagtacaccacaaagcactgggagattttgttctggaagacgattccacctggttgggagttggggggaagagcctctgagagaagctccatcccacatttacggagacttgggacattaaaaacacctgtcaagaccaatcaggggccaggcacggtggctcaggcctgtaattccagcactctgggaggctgaggcgggaggatcacttgaggccgggagttcaagaccagcatggccaacatggtgaaaccccgtttctcactaaaaatacaaaattagtgggtgtagtggcacactcctgtagtcccagctacttgggaagctgagataagagaatcgcttgaacctaggaggcggaggctgcggtgagccgaaattgcaccactacactccagcctggacaagacagggcaagagcatgactctgtctcaaaaaagaaaaaaaaaaaaaagaccaatcaggacctccgcttgggttagtgcaacacaatggggcatgggaacgatggctcatgcttgaaatcccagcattctgggaggccgagatgggaggatcacttgaggccaggagttcaagaccacactgggcaacatggcaaaaccccgtctctattaaaaatacaaaaaattcagccaggtgtggtggtgggtgcctgtaatcccagctacctggaagactcaggaacaagaaccgtttgaacccaggaggcggaggttgcagtgagctgagatcacgccaccacactccagcctgggtgacagagcaagactctatctcaaaaacaacacggtagcctcatcaccgacaacttagagcccttcccagagagccccttttgtccctctttgcaatgcacacggtggcaggtaaggatgaaaagacatttcccagggacaaaccccagagcacaggtgatggcctcggtcattggcttgggccgcaaagctaactaactatggtgactgctcttatttctcaaactaacttaaaacaaaaacctagtgtaaaaagacgacaaaaggtaacgacttccgcaccaacaccaagaccttcagcttccgtggttttcctaaagcaacatcttgactaccccctgggctgacggcagcggcgatgaagacatgtgtgaaggcggcttcccaaattccaggcgcttccccaaccttcagacagagcaaaccaaattaagctgacataacagctgtgacaaactggctagcaccggggcccagagagttataagggtgaacatcaagagtcaggagcagggtctcacagggtctcaattttctctcctgtgaaatgaagaagaggacactggctacctggctctcagattccaaggtcacacaaaacgcccagtctcagacccactagaaaaatccatctcttacctattgtttgtttgttttacagcctacgcaacatagtgagaccctgtctctatgaaaaatgcaaacaaaaattagctgggtgtggtggcctgcatgtgtagtcccagctacttggtaggctgaggtggaaggatcgctggagcccaggaggcggaggttgcagtgagccgagatcacaccaccgcagtctagcctgggtgacagagtgagaccctgtctccaaaaaaaaaaaaaggccaggcatgattgctaacgcttgtaacccccagcacttgggaggtcaaggtgggaagatcgcctggaaaattaatctgaaaactcacctctagaaatctcaatgagaagcagactacagtctcagaggtgtattctcaaactcaaagccaggaggtttgagaccagtctgggcaacatagcaagactgtttctataaaatataaaaaaaattagccaggggtggtggtgtgcacctgtagccccagctacttgggaggctgaggcaggaagatggcttgagcccaggaggacgaggctgcagtgagctatggtcgcaccactgcactccagcctgggtgacacagcaaaaccctgtctcgtagaaagaaaacaaacaaaaattaatttttttttttttcttgagaaagagtctcactctgttgcccagagtggagttcagtggtgcaatcttggctcactgcaacctccacttcctgggttcaagtgattcttgtgcctcagccacccaagcagctgggactacaggcatccgcgaccatgcccggctaattttcgtatttttagtatagatagggtttcaccatgttgcccagtttggtcttgtgaactcctggcctcaagtgatccacccacttctgcctcccaaagtgctgggattacaggtgtgagccacttcactgcacctggcctaaaaatccacgtgtaaaggtctcaaagttatgtgcatgccatggaaaatattcttaatttcctgtcacgtgtctgctacaaacccatcaaattcctacggcttggggcccagagagatggtagtcacacaccttgcagaattcctgaatctgaaagctgccccttttttttctgagacaaggtctcgcttcatcacccaggctggagtgcagtggctgggaacacggctcactgcggcctcaacctccagagctcaattgatccgctgccctcagcctcccaaagtgctgggattacaagtgtgagccactgagcctggccctgattttctttaggcaagaaaattaatgacactgttagagatcagatctgcactgtcccatcgggtggctggtttcaggaacatagtctgggctagaagttagtgccagtttctcaaaggttctacagatttaaaaagaaaaaaaagggctggttgcagtggctcacgcctgtaatcccagcactttgagagcccgaggtgggtggatcacaatgtcacgagatcaagaccatcctaacacagtgaaaccccgtctcgactaaaaatacaaaaaattagctgggcatggtggcacacgcctgtaatcccagctactcaggaggctgaggcaggagaattgcttggacttgggaggcagaggttgcagtgagctgagatcatgccactacactccagcctaggcgacagagcaagacgtctcaaaaaaaaaacaaaacaaaacaaaaaaaaaaacttcaggggaagcagagccatgactgatgctcaattccccaaataagggctttatttttatttaactaattaattaactttttgatatggagtcttgctctgtcacccaggctgctgtgcagaggcacaattttggctcactgcaatctctgcctccagggttcaagtgattctccttcctcagcctcctgagtagctgggactataggcacatgctaccatgcctggctcatttttctattttttttggtggagatggggttttaccaatgttgcccagactggttttgaactcctgacctcaagtgatccacctgccttggcctcccagactgctgggattacaggcgagcgtcaccacacctggcccaaataagggcttttatacaggacattctcacagtgtaaccgtgagtagcagctgtagaatcaaatgataaaaatgaccttcttggccaggcatggtagcccacacctgtcgtcgcagcactttgggaggatgaagggtgaggatcacttgaagctcagagtttgagaccaaactcggcaacatggcaaaacctgtctctagaaaaaatacaaaaaattagccgagcacggtgacacgcacctgtactcccagctactcgggggactgaggtgggaggatcgtttgagctgggaggcagagggtgagccatgatcctgccatcgtattctagcctaggtgacagagtgagaccctgtctcacaaaacaagaccctctctctagccctttgttcaagccacaagacaccacctaatgctgcctgcagggagcagaggagaggataaggtttgctgaaataatcctataatttaaaaagacacatggctgtgggctgggggtgagtgtctcttgcctggggcaggcgggttctccccgccagcgagaggtttattagaaggtactgaccccttatcacccaaaggcacgctggtgctgcttggccgtctctccccgccatctctgttcttgctgctccgcccagaggctgggccacctgttcggtttggggactgatcgtacacgaggttccggcaggaagcgagtttggactccagtgcctggacagaaatacacttttatctctcaagttataggcaaggactattctgtcttaccagagcctgtacagaagaacgaaccccagacagtggttctcaaactgttgtgcactggaattccaaggtgggaccccaagaggaatccaacgtatatgccagtctcagaaccaagcaccttaagtatttgggagctggctgggcacaatggctcacacctataatcccagcactctgggaggccaaggcaggaggatggcttgacatcaggagtttgagaccagcctgggccacaaagtaagatcccatctcagtttttttttttgttttgttttttacttttttagacgctgtgtcacccaggctggagtgcactggtgagatcacagctcactgcagcctcaacctcccaggctcaaccaatccctcccacctcagcctcctgagcagctggaattataggcatccgcaatcatgcccagttaataaaaaaaatttttaatgcaaaaaattttttttaattacgaaaaattttttaaaatgtttgggagctgcctggaaaaagatcacggctcactgcagcctcaaccaatccttccacctcagcctcctgaatagctaggactatgcacaatcatgcttggcttaaaaaaaaaaaaaaaattcttttttaattacaaaaaattttttaaaatgggagctttctggaaaaatcactaacctaccaattatccaactccgcttgtaggaagtaggaaatccacttctggaatccttcaccctttggtttaccttgttaaacctctgcagaatggcaagaagtttggtaaggacttggtctggctacaacagaccctgaggaaaccaaaaggacactgacagcaccccaggcttctctatactccaactaggctaaatactgaaatgcagacctgcttctagaatagcaaaccagacagccaaaaaccagaagtaaaaacaaaagaaatgagttgcaagcttctattaagttgtagctacaaatacactgtgtacagtgacaacttggtaggagttaaattatgtggccttctaggcatcatttttaaaaataaactacaaagaatacctatgtttttacttaagcacaaaaggatccctccctgtaattaacataaaagctgaaaggccaaattctttgccctaggctttcaagattttttttttttttttttttgagaccaagtctcactttgtcacccagcggtgcgatctcagctcactgcaacctccgcctcccggattcaaacaattttcctgcataagcctctcaagtagctgggatcgcaggtgcccaccaccattcctggctaatttttgtatttttagtagagatggggtttcaccatgttggccaggctggtcttgaattcctgacttcaggtgatccacccatctcggtctcccaaagtgtcaaaattcacttaaaccccaagaaacaaaccaaaaaaaaaaaaaaaaaaaaaaaaggtggcagtttttttctcttctgagacaacgtcgtgctgtcacccaggatggagtgcagtgttggaatctcagctcactcagcctcaacctcccaggctgaagcaatcctcccacctctcagcctcctgagtagctgggaccaccagtgtacaccatcaggcctggctaatttttgcattcttgtagaggccaagtcggggcagggggtttcaccatgttgcccgggctggtgtcagactcctgagctcaagtaatctcccaccttggcctcccaaagcactgggattacaggtatgagcacccggccaaaagagaaggcagtttccaagtgctccttaatttttcgagttaaggaaaaaacacacatatcaccctaatttcccaaatttcctagaggaaaaacggtaaaaggaaagagacatacatagggttcagagcagggcttcgagtcagagctctgagtgtctggcagtaactcccacaggaagctctaatgattcccagggatgctaaaggagcagccacacctaaaactcaccacactgctatgaaaggggctggacgcattggctcatgcctgtaatcccagaactttgggaggccaacctgggaggatcacttgaggccaggagtttaagaccagcctgggcaacacagcgatacccacattactacaaaaaaatgaaagtatcagccaggcatagtggcgcacacctgtggtccaagctcctcgggaagctaaggtgagaggatcgcttgaacccaggattttgaggctgcagtgagttgtgatcataccactacactccagcctgagcaacagagcaagaccctgtctctaaaaaaaaagaaaaaaagaagagagggaaggaactagatcaacccccttcacacatcctgaaagacaggcaggaaggcaccaaacgccaggaaagtgtggtcttaccccgactttccgcagtaggtctcccacaatgttgagggctgatatccgggccgcaggtgtgaggggggtccccccggtggagtcgtccaggcctgggtgtgcaaagggaagagcatgtaactcaccaacctatagtcatgtctgtgcgttaacatcgctagatccaaaaccacgggacaggagggacactgacgcctttcctcggatcccaaaagctaccctatttctttccgtagttaaccgcatcacacacccaaggcccgtatgacaaccaatttttcaagtccttgtgatgactgcaacaaatacttatttttacatgttagtcttgctctgtcacccggactggagtgcggtgatgtgatctcagctcactgcaacctccgcctcccaggttcaagcgattctcctgccttggcctcttgagtagctgggattatagccatgtgccaccacacccggctaatttttgtatttttagtagagacagagttccatcacgttgtccaggctggtctcgaactcttgacctcaaatgatctgcccgccttggcctccaaaagtgctgggattacgggcgtgagccaccatgcctggcctttaacaaattttttttttaatagagacagggtctcactatgttgcccaggctgatcatgaactcctagtttcaagcgatcctcccaccttggccgcccaaagggctggtatttacaggcatgagccaccgtgcccagccacattagtctttttaaacaaacccaaaacaaatccttttgaaattgtagaaaatccatatagttaattaacataatggcatctgtgatagatacaagaactatagacaggatgatccagctttacaagggtcccgctctgcagagcctctcttctccaagtggggtccatgcaccagcagcacatgagaactgttagaaatgcagaatctctcggccaggcacagtagctcacacctgtaatcccagtgctttcagaggccgaggcagttcgatcagttgaggtcaggagttcaagaccagcctggccaacatggcaaaatcttgtttctactaaaaatacaaaattagctgggcatggtaacaggtgcctgcctgtaatcccagctactcgggaggctgaggcatgagaatcgcttgaatccaggaggcagaggctgcagtgagccaagatcaatgccgctgcactccagcctggccgacagagcaagactttgtctcaaaaaaaaaaaaaaagagagaaagaaatttcaggccccacccaagacccacttgatctgaggtacattctaccaagatccccaggtaagctacatgcatattgaagtgtggaaacatagccaggcatggagttgcatgcctctagtcccagctactcaggaggctgaggcaggaggatcactggagcccaggagttggaggctgcagtgagctatgattgcaccactgcactccagcctgggccacagaccaagactgtgtctctaaaaacaacaatgaaataaagtatgcaaaatggctctagactggggctaggcacagtgactcatacatgtaataccaccactttcaggggctgaggcaggcagatcacctgaggtcagtagtttgagaccagcccggccaacatggtgaaaccccatctctactaaaaatacaagattagccaggcatggtggtgggcacctgtaattcaagcttactcaggaggctgaggcaggagaatcacttgaacctgggaggagggggttacagcgagccaatatcgcaccattgcactccagcctgggcaacagagcaaaactccatctcaacaaaactaaacagaagggctctgcaccggaattctagaagtctcactggtctcttcatgcccaggggacaagctaagggataaggtagtagatggtagggtaagccctggagcctgcctgcctgggtctgaatcccaaaccatctgccattcaattgcttcatgactctgcttaactcagagcctcactttcatcaaacggggacagcacctgcatcctgggcctgcggcgaaggctgcaggctggccagcacacactgagcactccttaactgtctgttattaatatctgctgtaaaaggcctgatcggaagctgtcagcagaggggctggggtgagaactgagattctttttttctgcccatgcagcacacgttacgctgagtctagctctcggtggatgtattactaaacccacagaacgctttttacttttttgtatttggtcagtgacatttcaaatttgggaggttttatattcaacaagaggatttttgaccaggcgcggtggctcacacctgtaatcccagcactttgggatcagccgaggtgggcggatcacttgagtccaggaatttgataccagcctgggcgacatggcaagactgtgtctccacctaaaatacaaaagttagccaggtgcctttagtcccagctactccggaggatgaggtgggagaatcacttgagcccacgatgaagaggttgcagtgagccaagatcacgtcactacactccagcctgggcaacagagtgagatcctgtctcaaaaaaaaaaacccaacaaaaaaaaagaggatttctggctttgaagaatggaaaaagctgcagatgaagggccaatcctcgtagctgcagagtggcagccacccgctctgggtggggtttccatttcatcagactccactactgcctcttacccagtcctcactgatctcaatgcccatccccaagaacatcccagtctactctctgctcaaagcctgagagcaaatcaggctctgagcctgatgcaaatcatcacacccccaggacccaccccagattcttacccagaaacactttgtgaaccgagaaaatcctgcaattcccactccccttaccacgtctgaagctcccaggtgtgtttaaacttgagctgggtcctcggtgagcaatgggcgtggacggcacggagcccgtggcctgcacagctgtgtctgtcctctcagcttccactgagctgggcatgggggtcctgggtttctcctgcttctgctgcacggccagttcctgccgcaaatctgtgccagaaaaaggattcaggaattcaagtcctcagccaggcgcagtggctcatgtttataatgccagcactttgggaggccaaggcaggtggatcgcctgaggtcaggagttcgagaccagcctgaccaacatggtgaaacctcatctctattgaaaatacaaaaattagcccagcatggtagtaggcacctgtaatctcagctactcaggaggatgaggcatgagaatcatttgaacctgggaggccagggtggcagtgagctgagattgctccagcgcactccagtctgggtgacaagagcaagactacgtctcaaaaaacaaaaagggaatttaagtccttgcttagggttggtggggtgcagggagagaggttcaacagtagataccagtcagaaaaaagacctactggggtgaaacactccaggtagaaaccccaaataaagggaaacccacaggaccttgcctagcagacttggaactctacaggatgtttctcttgactaacaaaatggtttcagatttttaaaaagctatgacagtgacacactaatgcttttattattgaaaaaacaattccaacatagcagtgtatttagaacactaaatgaaaatatgcccgggagcagtgactcatgcctgtaatcccagcactttgggaggctgaggtgtaagaatcacattaatccagtaagtcgaggctgcagtaagccatgatcataccacttcagcctgggcgagagtgagacctctggctcaaaaaaaaaaaaaaaaaaaaaaaaaaaagaaaaaaaaaaaaaaaggccagttgcactggctcaagcctataatcccagcactctgagaggtcgagatgggaggattgcttgaggtcaggaattttcaggccaacatggcaaaaccccgtctctattaaaaatacaaaaaattagccatgcgtggtggtgagcgcctgtagtcccagctgcttgggaggctgaggcaagacaatcgcttgagcctgggggacaagcagtgagtgcagtgagctgagatcacgccactgcactccagcctgtgtgacagagcaagactgtctcaaaaataaataaagtatgctttccagactatccccaaatgctcctcctcactcatcatcaccataacatgtgggagagcttttcaaccattgttctctgaatttttttttttttttttttttgagatggagtttcactctcttgcccgggcttaagtgcagtggcacagtctcggctcactgtaaatctgcctcccgggttcaagtgattctcctgcctcagcctcccaagtagctgggattacaggcacgcaccaccacacctggctaatttttgtatttttagtagacacagggtttcaccatgttgtccaggctggactctaactcctgacctcaggtgatccacccaccttggcctcccaaagtgctgggaatacaggcgtgagccactgcgcccagctgttctctccattttcaaacataaactttatacatatgtatgtatctactgagcataaaacaagaaaattttttattaagcattactggaaacatacaatatgttgtcctgtgtatgacttactctccccacttcagtggtatgtcttggcaatgatttttgttttagagacagggtctgactcagtcacccaggctggggtgcggtggcacaatcatagctcaatgtaaccttgaactcctgggctcaagtcatcctcccacttcagcctcctaagtagctggaactacagacatatgccaccaggcctaatttttacaattttcatttttgtagagatggggtatcactatgttgtccaggctcatcttgaactcctaggctcaagcaatcctcttgcgtccgtctctcaaagcactgagattacaggcatcagccactgtgcctagccttggcaatctttctaccacaacatttctatctactgttcattttaaccattaacatttcacaaaatacatctatgtacttcatttaaccacttcattactgatggacatctaggaacaactactttattaaacttaagaatttttactttttatcccccacctactggttacacattagaaagcaaatcgacgttataaataattaattgggccagcaacagtgacccacccctataatcccagcactttgggaggccgaggcaggcagatcgcctggggtcaggagttcaagaccagcctggccaacatggtgaaaccccatctctattaaaaatataaaaattagccaggcatggtggtgcacacctgcagtcccagctactcaggaggctgaagcaggggaatcgctgaacctgggaggcagaggttgcagtgagcagagatagcaccactgcactccagcctggacaacagagcaagacgccatctcaaaaaaaaaaaaaaaaaaaaaaaaaaaggtaaaaacaacttggacaatccactaatgaatgtcttttttttttttttttttttgagacaagagtctcactctgtcacccaggctggagtgcaatggtgtaattttggctcactacaacctccacctcccaggttcaagcaattctcgtgcctcagcctcctgagcagctgggattgcaggcacccaccaccataccctcatgttttctatttttagtagagatggggtttctctatgttgtccaggctggtctcaaactcctgagctcaggtgatccacctgcctcagcctcccaaagtgctgggattacaggtgtgaaccactgtgcctggccaaatgcctcattacagtttcaacattctacctctggaagtgccaactgaaaaagagcaaatgctgatgaggtttcaaagttttagccaaatatattggttgccatcaagtcacaaaaataataggctagctggcaattccaccagaaatttctccccacaacatctttgcttcttaagagacagggtctcactctgtcacccaggctggagtgcactggtgccatcatagctcactgcatactccacctcctgggctgaagcaatcatcccaccttggcttcctgagtagctgggactacaggcacatgccatcacacccagctaatctttaaatgtttttgtaaagatggagtcccactatgctgcccaggctggtctcaaactcctgggctcaagagatcctcggcctcccaaagtgctgggattacaggtgtgagccactgtgccagatctccccacaaaactctctgttcctactgagcatcagggtagtttgctgtgtttgtgaattacagaccaggaagcatctttctggaaataaattctgctgcccagaggcagaatcccaatacaaggacttcatctgtgaaccccaaagctatttctctaaatacccataaggggcccttacagggctggatgtctgactgttctcagctccagccagggcccaaggcaagagtctgcccagtgcagtccgacaccctctgattagacaacctgggtgcagagcagggtgtggggtccctgtaaagataatgctgggagagcttgtgggacaagatgttgctcaggtagggagaggggaccatgctggtgaagacaccaaggcctcctgacctctggcttcatccttcagtctctgaacagattccaggagattctctttttcatcaagttcactttccaggaaggcatttctttcgatggcctgattcaagcgctgctcaaagtcttcgagagacatgatcgtggcgctggcgaagagaaaagcagagttatccaagaggacaaaccgcagcatccctccagcaccgcggatccaggaggtgcgaagggtcagacacacctgggcacaagtcccagccccaaacttcctagatgccacagagtgggccaagtcccttaaccttctggggcatgggctctttacctgcagaatgggactcatcatagctcatggggtgcacgaggctgtcatgaggattaaataagatgctgcccacacagcactcagcaataagccaaagccctatcaggactgcatgtggcatttggtggtttgagaagaccactatgctccatcttctcttgcaagctcacaatgccaaccagcattaaaaataacctaatatgactgggcaaggtggctcatgcctgtaatcccagccctttgggaggccgaggcaggtggaagacctgagatcaggagttcaagaccagcctggcaagctt

SEQ ID NO: 647 - DNA, 7586 bp, Homo sapiens
gttctttgtgacacatcacacagaattggagtgctgtccttctggagagtggtggagaaccaagatacagttcagaaccaaaggaatagagaagggctttgatttctttttggctttagattggggatttgggaggcttagcaggaaagatgtccactgaaaatgtggaagggaagcccagtaaccttggggagagaggaagagcccggagctccactttcctcagggttgtccagccaatgtttaaccacagtattttcacttctgcagtctctcctgctgcagaacgcatccgattcatcttgggagaggaggatgacagcccagctccccctcagctcttcacggaactggatgagctgctggccgtggatgggcaggagatggagtggaaggaaacagccaggtggatcaagtttgaagaaaaagtggaacagggtggggaaagatggagcaagccccatgtggccacattgtcccttcatagtttatttgagctgaggacatgtatggagaaaggatccatcatgcttgatcgggaggcttcttctctcccacagttggtggagatgattgttgaccatcagattgagacaggcctattgaaacctgaacttaaggataaggtgacctatactttgctccggaagcaccggcatcaaaccaagaaatccaaccttcggtccctggctgacattgggaagacagtctccagtgcaagtaggatgtttaccaaccctgataatggtagcccagccatgacccataggaatctgacttcctccagtctgaatgacatttctgataaaccggagaaggaccagctgaagaataagttcatgaaaaaattgccacgtgatgcagaagcttccaacgtgcttgttggggaggttgactttttggatactcctttcattgcctttgttaggctacagcaggctgtcatgctgggtgccctgactgaagttcctgtgcccacaaggttcttgttcattctcttaggtcctaaggggaaagccaagtcctaccacgagattggcagagccattgccaccctgatgtctgatgaggtgttccatgacattgcttataaagcaaaagacaggcacgacctgattgctggtattgatgagttcctagatgaagtcatcgtccttccacctggggaatgggatccagcaattaggatagagcctcctaagagtcttccatcctctgacaaaagaaagaatatgtactcaggtggagagaatgttcagatgaatggggatacgccccatgatggaggtcacggaggaggaggacatggggattgtgaagaattgcagcgaactggacggttctgtggtggactaattaaagacataaagaggaaagcgccattttttgccagtgatttttatgatgctttaaatattcaagctctttcggcaattctcttcatttatctggcaactgtaactaatgctatcacttttggaggactgcttggggatgccactgacaacatgcagggcgtgttggagagtttcctgggcactgctgtctctggagccatcttttgcctttttgctggtcaaccactcactattctgagcagcaccggacctgtcctagtttttgagaggcttctatttaatttcagcaaggacaataattttgactatttggagtttcgcctttggattggcctgtggtccgccttcctatgtctcattttggtagccactgatgccagcttcttggttcaatacttcacacgtttcacggaggagggcttttcctctctgattagcttcatctttatctatgatgctttcaagaagatgatcaagcttgcagattactaccccatcaactccaacttcaaagtgggctacaacactctcttttcctgtacctgtgtgccacctgacccagctaatatctcaatatctaatgacaccacactggccccagagtatttgccaactatgtcttctactgacatgtaccataatactacctttgactgggcatttttgtcgaagaaggagtgttcaaaatacggaggaaaccttgtcgggaacaactgtaattttgttcctgatatcacactcatgtcttttatcctcttcttgggaacctacacctcttccatggctctgaaaaaattcaaaactagtccttattttccaaccacagcaagaaaactgatcagtgattttgccattatcttgtccattctcatcttttgtgtaatagatgccctagtaggcgtggacaccccaaaactaattgtgccaagtgagttcaagccaacaagtccaaaccgaggttggttcgttccaccgtttggagaaaacccctggtgggtgtgccttgctgctgctatcccggctttgttggtcactatactgattttcatggaccaacaaattacagctgtgattgtaaacaggaaagaacataaactcaagaaaggagcagggtatcacttggatctcttttgggtggccatcctcatggttatatgctccctcatggctcttccgtggtatgtagctgctacggtcatctccattgctcacatcgacagtttgaagatggagacagagacttctgcacctggagaacaaccaaagtttctaggagtgagggaacaaagagtcactggaacccttgtgtttattctgactggtctgtcagtctttatggctcccatcttgaagtttatacccatgcctgtactctatggtgtgttcctgtatatgggagtagcatcccttaatggtgtgcagttcatggatcgtctgaagctgcttctgatgcctctgaagcatcagcctgacttcatctacctgcgtcatgttcctctgcgcagagtccacctgttcactttcctgcaggtgttgtgtctggccctgctttggatcctcaagtcaacggtggctgctatcatttttccagtaatgatcttggcacttgtagctgtcagaaaaggcatggactacctcttctcccagcatgacctcagcttcctggatgatgtcattccagaaaaggacaagaaaaagaaggaggatgagaagaaaaagaaaaagaagaagggaagtctggacagtgacaatgatgattctgactgcccatactcagaaaaagttccaagtattaaaattccaatggacatcatggaacagcaacctttcctaagcgatagcaaaccttctgacagagaaagatcaccaacattccttgaacgccacacatcatgctgataaaattcctttccttcagtcactcggtatgccaagtcctcctagaactccagtaaaagttgcctcaaattagactagaacttgaacctgaagacaatgattatttctggaggagcaagggaacagaaactacattgtaacctgtttgtctttcttaaaactgacatttgttgttaatgtcatttgtttttgtttggctgtttgtttattttttaacttttatttcgtctcagtttttggtcacaggccaaataatacagcgctctctctgcttctctcttgcatagatacaatcaagacaatagtgcaccgttccttaaaaacagcatctgaggaatcccccttttgttcttaaactttcagatgtgtcctttgataaccaaattctgtcactcaagacacagacacccacagaccctgtcctttgcctctattaagcagaggatggaagtattaaggattttgtaacaccttttatgaaaatgttgaaggaacttaaaactttagctttggagctgtgcttactggcttgtctttgtctggtagaacaaaccttgacctccagacagagtcccttctcacttatagagctctccaggactggaaaaagtgctgctattttaacttgctcttgcttgtaaatcctaatcttagagttatcaaaagaagaaaaaactgaaggtactttactccctatagagaaaccattgccatcattgtagcaagtgctggaatgtcccttttttcctatgcaacttttttataaccctttaatgaacttatctgtggagtacattgaagaatatttttcttcctagattttgttgtttaaattatggggcctaacctgccacttattttttgtcaatttttaaaacttttttttaattactgtaaagaaaatgaattttttcctgcagcaggaaacatagttttcagtagttctacctcttatttgtagctgccaggctttctgtaaaaattgtattgtatataatgtgatttttacacatacatacacacacaaatacacaatctctagggtaagccagaaggcaagatcagattaaaaacaccatgtttctaagcatccatttttccctttctttaaaagaaacttaactgttctatgaaggagattgagggagaagagacaaactcctatgtcatgagaataaccgatgttctgataatagtagcatctaggtacagatgctggttgtattaccacgtcaatgtcctatgcagtattgttagacattttctcattttgaaatatttgtgtgtttgtgtatgtgctctgtgccatggctggtgtatatatgtgcaatgttagaaggcaaaagagtgatggtaggcagagggcaaagtcattgaatctcttatgccagttttcataaaacccaaaccacatatgaaaaaatccattaagggtccaagaagtctgtccatatgaaaatgagggtaaatatagtttatttcccaggtatcagtcattataattgatataatagctctaacatgcaatataaaattcataggagtattaatagcccatttacacatctataaaatgtaatgggattgcagagctgcagagtacagtgtaacagtactctcatgcaatttttttcaggatgcaaaggcaattattctttgtaagcgggacatttagatatatttgtgtacatattatatgtatgtatatttcaaagtaccacactgaaaattagacatttattaaccaaatttaacgtggtatttaaaggtaatatttttaatatgatacattacatattgtgaatgtatactaaaaaaacattttaaatgttaaaattataatttcagattcatataaccacaactgtgatatatcctaactataaccagttgttgaggggtatactagaagcagaatgaaaccacattttttggtttgataatatgcacttattgactcccactcattgttatgttaattaagttattattctgtctccttgtaattttgattacaaaaattttattatcctgagttagctgttacttttacagtacctgatactcctaaaacttttaacttatacaaattagtcaataatgaccccaattttttcattaaaataatagtggtgaattatatgttattgtgttaaaacctcacttgccaaattctggcttcacatttgtatttagggctatccttaaaatgatgagtctatattatctagctttctattaccctaatataaactggtataagaagactttccttttttctttatgcatggaagcatcaataaattgtttaaaaaccatgtatagtaaattcagcttaacccgtgatcttcttaagttaaaggtacttttgttttataaaagctctagataaaactttcttttctgatcatgaatcaagtatctgtggtttcatgcccctctctatacctttcaaagaactcctgaagcaacttaactcatcatttcagcctctgagtagaggtaaaacctatgtgtacttctgtttatgatccatattgatatttatgacatgaacacagaatagtaccttacatttgctaaacagacagttaatatcaaatcctttcaatattctgggaacccagggaagtttttaaaaatgtcattactttcaaaggaacagaagtagttaaccaaactaacaagcaaaacctgaggtttacctagtgacaccaaattatcggtattttaactgaatttacccattgactaagaatgaaccggatttggtggtggttttgtttctatgcaaactggacacaaattacaacagtaaatttttttataagtgcttctcccttctccatgatgtgacttccggagataaaggattcaaaagataaagacaaagtacgctcagagttgttaaccagaaagtcctggctgtggttgcagaaacactgttggaagaaaagagatgactaagtcaagtgtctgccttatcaaaagagcaaaaatgcctctggttttgtgtttgggagaaaaatatcttggacgcactgttttccttgataaaagtcatcttctctactgtgtgaaatgaatacttggaattctaattgttttgtgtgccaggggcagtaatgtccctgcctcttctcccaatcaaggttgaggagtggggctggggagaggacttaactgacttaagaagtaggaaaacaaaaacctctctcctcagccttccacctccaagagaggaggaaaaacagttgtctgctgtctgtaattcagtttgcgtgtattttatgctcatgcaccaacccatacagagtaaatcttttatcaactatatactggtgtttaatagagaatgattgtcttccgagttttttggttccttttttaactgtgttaaagtacttgaaatgtattgactgctgactatattttaaaaacaaaatgaaataatttgagttgtattacagaggttgacattgttcagggatgggacaaagccttcttcaatccttttcatactacttaatgattttggtgcaggaacctgagattttctgatttatatttcatgatatttcacatttgctcttcacagcatgagcatgaagcccagtggcaccaaatggctgggtacaatcaagtgatattttgtagcacctcactatctgaaaggccatgagttttcagatgatttcattgagcttcattgcagcctgaaattttaaaaaagttgtgtaatacgccaaccagtcaagttgtgttttggccagagatttagatatgtccaatttcctggctcatttcattgtgctctatgggtacgtataaaaagcaagaattctgtttcctaggcaaacattgcaactcagggctaaagtcatccagtgaaacttttagagccagaagtaactttgtcccagtcctacaatgtgaaaagagtgaatagttgcctctttttagccattttcatggctggtacatattcgtacgcattacttttcagaatcaatacgcactttcagatattcttatttttattctcttaagtctttattaactttggagagagaaatgatgcatctttttattttaaatgaagtagatcaacatggtggaacaaaatgataaagaacagaaaacatttcaatatattactaataactttttccaatataaatcctaaaattcctataacatagtattttacagttttatgaagctttctattgtgacttttatggaattaagagatgaagaagatgagatattttagcatttatatttttcaaaattatatgtatacttaaaaataaagtaactttatgc

SEQ ID NO: 648 - DNA, 307 bp, Homo sapiens
  misc_feature (1)..(307): n=a,t,g or c
gatcactgtggacagggtgcagctctaccagttcctgtttctnctgagccagaccctcttcagggaagggaccaattaattttaaaactcacttgaagcacagctggtcatggggcttggtataaagttcctatttccaccctgatacttccaattcctggaaccccagcccactccnccatccctcctccctatcaaactagtataatgattttgaatcggtacagtgtgtttaactgtaactaagttcgacagactattattatctttgtaataaattaacctagcaataaaaattattctgtnt

SEQ ID NO: 649 - DNA, 388 bp, Homo sapiens
gatctatttgtgatgactatatggcaactctttgctgtcctcattgtactctttgccaaatcaagagagatatcaacagaaggagagccatgcgtactttctaaaaactgatggtgaaaagctcttaccgaagcaacaaaattcagcagacacctcttcagcttgagttcttcaccatcttttgcaactgaaatatgatggatatgcttaagtacaactgatggcatgaaaaaaatcaaatttttgatttattataaatgaatgttgtccctgaacttagctaaatggtgcaacttagtttctccttgctttcatattatcgaatttcctggcttataaactttttaaattacatttgaaatataaaccaaatgaaatattttactgt

SEQ ID NO: 650 - DNA, 301 bp, Homo sapiens
tgacacatctgttcaataaataaagagcttaaatatacaaaacataagaaatctgggcaacaaaacttgtggtctttacttttgaatagctacccaagaaaaggttttaaaggtaaaagttatgagtaatgtcatcacaataagctcttgtttaacattcttttcttttatgtataattaggtttatgtttcatgtctttttaaaaccttataaaagatttamttatcacatctattcttcaatgtggaaatattaaatattgttggttgtaaaataatatttatgtactacttgtgtctg

SEQ ID NO: 651 - DNA, 1971 bp, Homo sapiens
gtgatggatctcatcccaaacttggccgtggaaacctggcttctcctggctgtcagcctgatactcctctatctatatggaacccgtacacatggactttttaagaagcttggaattccagggcccacacctctgccttttttgggaaatgctttgtccttccgtaagggctattggacgtttgacatggaatgttataaaaagtatagaaaagtctggggtatttatgactgtcaacagcctatgctggctatcacagatcccgacatgatcaaaacagtgctagtgaaagaatgttattctgtcttcacaaaccggaggcctttcgggccagtgggatttatgaaaaatgccatctctatagctgaggatgaagaatggaagagaatacgatcattgctgtctccaacattcaccagcggaaaactcaaggagatggtccctatcattgcccagtatggagatgtgttggtgagaaatctgaggcgggaagcagagacaggcaagcctgtcaccttgaaacacgtctttggggcctacagcatggatgtgatcactagcacatcatttggagtgagcatcgactctctcaacaatccacaagacccctttgtggaaaacaccaagaagcttttaagatttaatccattagatccattcgttctctcaataaaagtctttccattccttaccccaattcttgaagcattaaatatcactgtgtttccaagaaaagttataagttttctaacaaaatctgtaaaacagataaaagaaggtcgcctcaaagagacacaaaagcaccgagtggatttccttcagctgatgattgactctcagaattcaaaagactctgagacccacaaagctctgtctgatctggagctcatggcccaatcaattatctttatttttgctggctatgaaaccacgagcagtgttctctccttcattatatatgaactggccactcaccctgatgtccagcagaaagtgcagaaggaaattgatacagttttacccaataaggcaccacccacctatgatactgtgctacagttggagtatcttgacatggtggtgaatgaaacactcagattattcccagttgctatgagacttgagagggtctgcaaaaaagatgttgaaatcaatgggatgtttattcccaaaggggtggtggtgatgattccaagctatgttcttcatcatgacccaaagtactggacagagcctgagaagttcctccctgaaaggttcagtaaaaagaacaaggacaacatagatccttacatatacacaccctttggaagtggacccagaaactgcattggcatgaggtttgctctcgtgaacatgaaacttgctctagtcagagtccttcagaacttctccttcaaaccttgtaaagaaacacagatccccctgaaattacgctttggaggacttcttctaacagaaaaacccattgttctaaaggctgagtcaagggatgagaccgtaagtggagcctgatttccctaaggacttctggtttgctctttaagaaagctgtgccccagaacaccagagacctcaaattactttacaaatagaaccctgaaatgaagacgggcttcatccaatgtgctgcataaataatcagggattctgtacgtgcattgtgctctctcatggtctgtatagagtgttatacttggtaatatagaggagatgaccaaatcagtgctggggaagtagatttggcttctctgcttctcataggactatctccaccacccccagttagcaccattaactcctcctgagctctgataacataattaacatttctcaataatttcaaccacaatcattaataaaaataggaattattttgatggctctaacagtgacatttatatcatgtgttatatctgtagtattctatagtaagctttatattaagcaaatcaataaaaacctctttac

SEQ ID NO: 652 - DNA, 466 bp, Homo sapiens
cccctttttctgggataagtacatttttggaccaccttgcttattcccttggggactgatcatgattcaccacatttgttctttgcagattattgctcccccagagcggaagtactcagtctggatcgggggctctatcctggcctctctctccaccttccagcagatgtggatcagcaagcctgagtatgatgaggcagggccctccattgtccacaggaagtgcttctaaagtcagaacaggttctccaaggatcccctcgagactactctgttaccagtcatgaaacattaaaacctacaagccttacttctctgtgtggggctcttttttcctgggctatgtctcatacacagtgctaaggacttttcacacattacttttaatccatgcaatagtgctctaaggtaggtgctatcattatacccatattacagatgaggaaattgaggctcagagaagtca

SEQ ID NO: 653 - DNA, 1806 bp, Homo sapiens
agggaacatctcggggagcctggttggaagctgcaggcttagtctgtcggctgcgggtctctgactgccctgtggggagggtcttgccttaacatcccttgcatttggctgcaaagaaatctgcttggaagaaggggttacgctgtttggccgggcagaaactccgctgagcagaacttgccgccagaatgctcctcctgttgctgagtatcatcgtcctccacgtcgcggtgctggtgctgctgttcgtctccacgatcgtcagccaatggatcgtgggcaatggacacgcaactgatctctggcagaactgtagcacctcttcctcaggaaatgtccaccactgtttctcatcatcaccaaacgaatggctgcagtctgtccaggccaccatgatcctgtcgatcatcttcagcattctgtctctgttcctgttcttctgccaactcttcaccctcaccaaggggggcaggttttacatcactggaatcttccaaattcttgctggtctgtgcgtgatgagtgctgcggccatctacacggtgaggcacccggagtggcatctcaactcggattactcctacggtttcgcctacatcctggcctgggtggccttccccctggcccttctcagcggtgtcatctatgtgatcttgcggaaacgcgaatgaggcgcccagacggtctgtctgaggctctgagcgtacatagggaagggaggaagggaaaccagaaagcagacaaagaaaaaagagctagcccaaaatcccaaactcaaaccaaaccaaacagaaagcagtggaggtgggggttgctgttgattgaagatgtatataatatctccggtttataaaacctatttataacactttttacatatatgtacatagtattgtttgctttttatgttgaccatcagcctcgtgttgagccttaaagaagtagctaaggaactttacatggtaacagtataatccagctcagtatttttgttttgttttttgtttgtttgttttgttttacccagaaataagataactccatgtcgccccttccctttcatctgaaagaagatacctccctcccagtccacctcatttagaaaaccaaagtgtgggtagaaaccccaaatgtccaaaagcccttttctggtgggtgacccagtgcatccaacagaaacagccgctgcccgaacctgtgtgaagctttacgcgcacacggacaaaatgcccaaactggagcccttgcaaaaacacggcttgtggcattggcatacttgcccttacaggtggagtatcttcgtcacacatctaaatgagaaatcagtgacaacaagtctttgaaatggtgctatggatttaccattccttattatcactaatcatctaaacaactcactggaaatccaattaacaattttacaacataagatagaatggagacctgaataattctgtgtaatataaatggtttataactgcttttgtacctagctaggctgctattattactataatgagtaaatcataaagccttcatcactcccacattttccttacggtcggagcatcagaacaagcgtctagactccttgggaccgtgagttcctagagcttggctgggtctaggctgttctgtgcctccaaggactgtctggcaatgacttgtattggccaccaactgtagatgtatatatggtgcccttctgatgctaagactccagaccttttgtttttgctttgcattttctgattttataccaactgtgtggactaagatgcattaaaataaacatcagagtaactc

SEQ ID NO: 654 - DNA, 1584 bp, Homo sapiens
gcgtcccccacaccacagacccgcgccgccgacgacccagcagccgccatgcgtctgctccgaggtgtgtttgtagttgctgctaagcgaacgccctttggagcttacggaggccttctgaaagacttcactgctactgacttgtctgaatttgctgccaaggctgccttgtctgctggcaaagtctcacctgaaacagttgacagtgtgattatgggcaatgtcctgcagagttcttcagatgctatatatttggcaaggcatgttggtttgcgtgtgggaatcccaaaggagaccccagctctcacgattaataggctctgtggttctggttttcagtccattgtgaatggatgtcaggaaatttgtgttaaagaagctgaagttgttttatgtggaggaaccgaaagcatgagccaagctccctactgtgtcagaaatgtgcgttttggaaccaagcttggatcagatatcaagctggaagattctttatgggtatcattaacagatcagcatgtccagctccccatggcaatgactgcagagaatcttactgtaaaacacaaaataagcagagaagaatgtgacaaatatgccctgcagtcacagcagagatggaaagctgctaatgatgctggctactttaatgatgaaatggcaccaattgaagtgaagacaaagaaaggaaaacagacaatgcaggtagacgagcatgctcggccccaaaccaccctggaacagttacagaaacttcctccagtattcaagaaagatggaactgttactgcagggaatgcatcgggtgtagctgatggtgctggagctgttatcatagctagtgaagatgctgttaagaaacataacttcacaccactggcaagaattgtgggctactttgtatctggatgtgatccctctatcatgggtattggtcctgtccctgctatcagtggggcactgaagaaagcaggactgagtcttaaggacatggatttggtagaggtgaatgaagcttttgctccccagtacttggctgttgagaggagtttggatcttgacataagtaaaaccaatgtgaatggaggagccattgctttgggtcacccactgggaggatctggatcaagaattactgcacacctggttcacgaattaaggcgtcgaggtggaaaatatgccgttggatcagcttgcattggaggtggccaaggtattgctgtcatcattcagagcacagcctgaagagaccagtgagctcactgtgacccatccttactctacttggccaggccacagtaaaacaagtgaccttcagagcagctgccacaactggccatgccctgccattgaaacagtgattaagtttgatcaagccatggtgacacaaaaatgcattgatcatgaataggagcccatgctagaagtacattctctcagatttgaaccagtgaaatatgatgtatttctgagctaaaactcaactatagaagacattaaaagaaatcgtattcttgccaagtaaccaccacttctgccttagataatatgattataaggaaatcaaataaatgttgccttaacttc

SEQ ID NO: 655 - DNA, 1517 bp, Homo sapiens
aggagggaagagtgtgcagacggaacttcagccgctgcctctgttctcagcgtcagtgccgccactgcccccgccagagcccaccggccagcatgtcctctgctcacttcaaccgaggccctgcctacgggctgtcagccgaggttaagaacaagctggcccagaagtatgaccaccagcgggagcaggagctgagagagtggatcgagggggtgacaggccgtcgcatcggcaacaacttcatggacggcctcaaagatggcatcattctttgcgaattcatcaataagctgcagccaggctccgtgaagaagatcaatgagtcaacccaaaattggcaccagctggagaacatcggcaacttcatcaaggccatcaccaagtatggggtgaagccccacgacatttttgaggccaacgacctgtttgagaacaccaaccatacacaggtgcagtccaccctcctggctttggccagcatggcgaagacgaaaggaaacaaggtgaacgtgggagtgaagtacgcagagaagcaggagcggaaattcgagccggggaagctaagagaagggcggaacatcattgggctgcagatgggcaccaacaagtttgccagccagcagggcatgacggcctatggcacccggcgccacctctacgaccccaagctgggcacagaccagcctctggaccaggcgaccatcagcctgcagatgggcaccaacaaaggagccagccaggctggcatgactgcgccagggaccaagcggcagatcttcgagccggggctgggcatggagcactgcgacacgctcaatgtcagcctgcagatgggcagcaacaagggcgcctcgcagcggggcatgacggtgtatgggctgccacgccaggtctacgaccccaagtactgtctgactcccgagtacccagagctgggtgagcccgcccacaaccaccacgcacacaactactacaattccgcctagggccacaaggccttccctgttttccccccaagggaggctgctgctgctcttggctggacccagccagggcccaagccgacccccctctccctgcatggcatcctccagcccctgtagaactcaacctctacagggttagagtttggagagagcagactggcggggggcccattggggggaaggggaccctccgctctgtagtgctacagggtccaacatagagccgggtgtccccaacagcgcccaaaggacgcactgagcaacgctattccagctgtccccccactccctcacaagtgggtacccccaggaccagaagctcccccagcaaagcccccagagcccaggctcggcctgcccccaccccattcccgcagtgggagcaaactgcatgcccagagacccagcggacacacgcggtttggtttgcagcgactggcatactatgtggatgtgacagtggcgtttgtaatgagagcactttcttttttttctatttcactggagcacaataaatggctgtaaaatctc

SEQ ID NO: 656 - DNA, 4043 bp, Homo sapiens
cgaagcgggtcctgccccgctgtcagctgcggcccccggcgccgggcgggggtggccgcgaccattggcggagaggcgaaaggggcggggccgccgccagccgctgcgggcaaggctgaacaggcggaggtgggcagccggccagggaagcacggtccaggcggctacattcggcccggccatggcagcggcgcccctgaaagtgtgcatcgtgggctcggggaactggggttcagctgttgcaaaaataattggtaataacgtcaagaaacttcagaaatttgcctccacagtcaagatgtgggtctttgaagaaacagtgaatggcagaaaactgacagacatcataaataatgaccatgaaaatgtaaaatatcttcctggacacaagctgccagaaaatgtggttgccatgtcaaatcttagcgaggctgtgcaggatgcagacctgctggtgtttgtcattccccaccagttcattcacagaatctgtgatgagatcactgggagagtgcccaagaaagcgctgggaatcaccctcatcaagggcatagacgagggccccgaggggctgaaactcatttctgacatcatccgtgagaagatgggtattgacatcagtgtgctgatgggagccaacattgccaatgaggtggctgcagagaagttctgtgagaccaccatcggcagcaaagtaatggagaacggccttctcttcaaagaacttctgcagactccaaattttcgaattacggtggttgatgatgcagacactgttgaactctgtggtgcgcttaagaacatcgtagctgtgggagctgggttctgcgacggcctccgctgtggagacaacaccaaagcggccgtcatccgcctgggactcatggaaatgattgcttttgccaggatcttctgcaaaggccaagtgtctacagccaccttcctagagagctgcggggtggccgacctgatcaccacctgttacggagggcggaaccgcagggtggccgaggccttcgccagaactgggaagaccattgaagagttggagaaggagatgctgaatgggcaaaagctccaaggaccgcagacttctgctgaagtgtaccgcatcctcaaacagaagggactactggacaagtttccattgtttactgcagtgtatcagatctgctacgaaagcagaccagttcaagagatgttgtcttgtcttcagagccatccagagcatacataaagtgaatcatgcaacgtgttgggggaagttctgcctttctgatcaatcttttgggttcacgtggaaaccaggacttggcaacatgatgtttgactgtaatctcatcacggatatgtatgaatttttacaggttcgtttttgaattgtgagaggcagttcattagcaaagatgtactgggcagtaactaaacacacatgcaaacatgtgaatggtggtttattcctcattctgtggatgtttctatgagccaaaatttgatgtctttttttcaaaattgcttatgaaatttccacacaatcgtagcttataagattggaacgatctcagccaaatattttaggtgtaattcatatgtatttgagtggaggattttttttctcatttttctagtgttaaattttaaccagcattaacatggtagagtggaggagtgagtgtgttcaaagatcaacatatttaacttttaaacactatctcaaagccagcataattaactactttgattgtgggctgacctttgtttttttaacaatcaggcatttttaattagataatccactcatgtatttccccctcactgcagttgtctgcatttttagcctcttttctcttcgttagttgtcagaatatgcctttgtcaaggctcagaggtaacaagacagaaaattcatctgggattttcctgctgtggctggcacattcttctgattaacagacacttgtatgatgctttaggctagttagtgcattttttagcaaacatttatcttaaacatcacagatccactggggggtgcaaggggctactgttagtcctcttgttagatgcagtcactcctcctggtcacctagtgagcagggacagagccaggagtcaagtgcagtgccaaggtgcatgaccctctgagaagtcactgggctgatttgacctccgactcattggttgtgtaaatgccatgtgcagcctttcctgaggccataggagggcttcctgcagctgagatctatgcaggccatcctctcaacaggtgccactccaagggcggtcctcggtgcagcagcatcagcttcacttgtgggggggtgggggaaggggcggtctcagaaatgcaggttcccaggtcccaccctggacttctgaaggggtgtggcatctgtgtttctgatgcttactacaatatgtgaaccactactttagaaaatctgctttaacttggtattcctctaattgtgttccctaggaaatgactgtcccaagagccagtgattattccaggtgttccctggaaaggtcaagtgagtctgggaaacactatgtctgtacacctcttgaaggtgtcgaatgtatgtttatacatcagtggaacccatttttctagcctagcaagtcccaaacacattacactgaagagattttggtgaggaaacttgctggagttttcagggaacactgttctaggcttaggtgaccttaggatcactcaagtagacccttcactccctgcgagaaattaggatgaataactacctgtggcattgttggttctgaacttttacagttcaggcctgctgtgaatctttgatgaagctttaaggtgacactgttgtacaagatgtcagctttgctgaaacgcacattacctggaataagtgctttaattgtagaattagaatgggatttactgtactgttttaaatgagattggcttcagaatccattacagttaccttacatagcacttgatacgtgttaaatgaacatatgaatgtaatttatatattcctagaatttaagttactttgtgagatttgggcctgtccctcaatgccagtttaggatttctttttttctataccttgaaatgattataaaatagattttcatgggaattttaaaaactctatccaaaacatttttggagcattttaaagccccatacacagaagtatacgaaagcacacaaaacactccaagtttcagcagttttagcgccaccattaacccactttgcttgtctcatgaaaaatctttgttaaagtttgtacacaggtaacaaaaagttactttaaaagatatataaagggctgtaagctaattgtggtgtctagtaagtagcataatgagatgtgaggagttggaactttgcgtgttttgcgtattttcatctgcattcagcttcttactctgggtttgtactcgagtgttatttctttacaaatgcccttgtaattaccactctgaagtctgctgactgtgtctcttgaacatacttaggatattctgcacattatggaaaaaggtaaattttagaagtttctgctctactaactgtagatatttatgactctgcgagttatctatttttataaccacctgtggtccattgttcattttaattcacatttcttatgaagtatggtaacagggagggagacacctagattagcagctcaatttgtactacttcagccaatctgtgaatgtaaaaactacactgttgccttgctaggatccaccctcctataatatggaacaaatatctgaatgaaatccaccctaggagacggagtcaaactaaacttgtggtttttcatttaacttttgactacagcatggccccatggcatccacaccaagagggtgttgtgatgaggtgccggtgtgcaaagggaactttagtttttccactggttcttatctgctagccttttacatacatgtgtactatatttgtttatagactgtaggtggatatataatttaaaagcttgatttaataaacatttaaccccctaaacttgggg

SEQ ID NO: 657 - DNA, 382 bp, Homo sapiens
agtcactgtttatactttaaaggttatattttaagctatttgagattgcttttgggaagatcactagatttatggaggaattagtcacaaatgacttgtagaaaatactgtcatatagttcatttcatcattttctgttgcaggaagccactccaccacagaatgctaatatgccagtggtacccagtacctcttgtatataggttattgcaaatattgttctgaaatgcttaacttcagagttacattttttaaagtaaataattgttttaaatctattttgtaagatataaagtacaatagaatttctggggtacagattaaactatttgcactaacacacgtgacgggcatgatttaataaaataactttactctccct

SEQ ID NO: 658 - DNA, 352 bp, Homo sapiens
  misc_feature (1)..(352): n=a,t,g or c
attaaataaaagttttgcttttatttaaaataaaatkcatttatacagtccttbgaacccattggattatttgaacmacatactggtaatccaccctctcccctcgcacccctttytgggtctatgtgakctaggamatttctctgatctagnancawatatmagattgtacacagcgcaacagmtctagaacatggccagtccaggcattagagttaaggacattgtggcaaatcatgatcataatgaagtcattcttaatttagtagatattaamctgacgttaattatatctcttaaaggcatttaattaacggagagatttctacawttavgccatctbctagttgtg

SEQ ID NO: 659 - DNA, 327 bp, Homo sapiens
tsttaaatgtgattatacttctctttgactygtcagcttagctttagctgatacactctggtgcccaactattattgtatcagtgaacttccactttcttttccttttctctcaatttttgttgtatcattcctaccttgtgaggacatataatatttacattctgttgtcatcctcacatttcttagttccacagtttaaatgtatttgaaactcaaaacattcccattaatctcttggtcagctgaaattaatgatttaatagtttccttaaaaaagactcatggaacaatttccctaaatttttgccatgtcaaatatgtttat

SEQ ID NO: 660 - DNA, 224 bp, Homo sapiens
gactattactagtaagacatttattaatgatattattacaattgtttctaaaatccattattatttcagcagcgaagagataaataccagagtaacctcagtcagatggtaacagttaggtctaaagaaaattatatgaaatactgactgtaatactgctatagagtatacagtatgttaaaacatgatggagaggctgcacacattggtaacgttttatgtca

SEQ ID NO: 661 - DNA, 235 bp, Homo sapiens
aaggttttaaaagcagbatttattgattgaaaataaatgtgtagataggctctcagtatggaatccatgttattttttaatgmagtacatgaagactccttagatcttccaccatgtatctbsgtgtgtgcttataacamccaccatattcaaatggvggggaattttcaacattttactgaaaaaaaaatgagaaattctyccttcagcagctctgcatagtttgacaaacttt

SEQ ID NO: 662 - DNA, 16382 bp, Homo sapiens
ctgcagccatgggtgccctatggagctggtggatactctgggctggagcaaccctcctgtggggattgacccaggaggcttcagtggacctcaagaacactggcagagaggaattcctcacagccttcctgcagaactatcagctggcctacagcaaggcctacccccgcctccttatctccagtctgtcagagagccccgcttcagtctccatcctcagccaggcagacaacacctcaaagaaggtcacagtgaggcccggggagtcggtcatggtcaacatcagtgccaaggctgagatgataggcagcaagatcttccagcatgcggtggtgatccattctgactatgccatctctgtgcaggcactaaatgccaagcctgacacagcggagctgacactgctgcggcccatccaggccctaggcaccgagtattttgtgctcacaccccccggcacctcagccaggaatgtcaaggagtttgccgtggtggccggtgccgcaggtgcctcggtcagtgtcacgctgaaggggtcagtgacattcaatggcaagttctatccagcaggcgatgtcctaagagtgactctacagccctacaatgtggcccagctacagagctcagtggatctctcggggtcaaaggtcacagctagtagccccgtggctgtcctctctggccacagctgtgcgcagaaacatacgacctgcaaccatgtggttgagcagctgctacccacgtctgcctggggcacccactatgtagtacccacgctggcctcccaatctcgctatgatttggccttcgttgtggccagccaggccacaaagctgacctacaaccatgggggtatcactggctcccgtgggctccaggcaggtgatgtggtagagtttgaggtccggccatcctggccactctacctgtctgcaaatgtgggcatccaggtcctgttgtttggcacaggtgccataaggaatgaagtgacttatgacccctacctggtcctgatcccagatgtggcggcctactgcccagcctatgtggtcaagagtgtaccaggctgtgagggcgtggccctggtagtggcacagacgaaggctatcagcgggctgaccatagatgggcatgcagtgggggccaagctcacctgggaggctgtgccaggcagtgagttctcgtatgctgaagtggagctcggcacagctgacatgatccacacggccgaggccaccaccaacttgggactgctcaccttcgggctggccaaggctataggctacgcaacagctgctgattgcggccggactgtactgtccccagtggagccctcctgcgaaggcatgcagtgcgcagccgggcagcgctgccaggtggtaggcgggaaggccgggtgtgtggcggagtccaccgctgtctgccgcgcccagggcgacccccattacaccaccttcgacggccgtcgctacgacatgatgggcacctgttcgtacacgatggtggagctgtgcagcgaggacgacaccctgcccgccttcagcgtggaggccaagaacgagcaccggggcagccgccgcgtctcctacgtgggcctcgtcactgtgcgcgcctacagccactctgtgtcgctgacccgcggtgaagttggcttcgtcctggttgacaaccagcgctcgcgcctgccagtctccctgagtgagggtcgcctgcgtgtgtaccagagcggaccacgggccgtggtggagctggtctttgggctggtggtcacttatgactgggactgccagctggcactcagcctgcctgcacgcttccaagaccaggtgtgcgggctgtgtggcaactataatggtgacccagcagacgacttcctcacgcctgacggggctctggctcctgacgctgtggagttcgcaagtagctggaagctggatgatggggactacctgtgtgaggatggctgccagaacaactgtcccgcctgcaccccaggccaggcccaacactatgagggcgaccgactctgtggcatgctgaccaagctcgatggccccttcgctgtctgccatgacaccctggaccccaggcccttcctggagcagtgtgtatatgacctgtgtgtggtcggtggggagcggctcagcctgtgccgtggcctcagcgcctatgcccaggcctgtctggagcttggcatctcggttggggactggagatcaccagccaactgccccctgtcctgccctgccaacagccgctatgagctctgcggccctgcttgcccgacctcctgcaacggggctgcggcgccgtccaactgctccgggcgcccctgcgtggagggctgcgtgtgcctcccaggcttcgtggccagcggcggcgcctgcgtgccggcctcgtcgtgtggctgcaccttccagggtctccagctcgctccgggccaggaagtgtgggcggacgagttgtgccaaaggcgctgcacctgcaacggcgccacccatcaggtcacctgccgcgacaagcagagctgcccggcgggtgagcgctgcagcgtccagaacggcctcctgggctgctaccccgatcgcttcgggacctgccaggggtccggggacccacactatgtgagcttcgacggccggcgcttcgacttcatgggcacctgcacgtacctgctggtcggctcatgcggccagaacgcagcgctgcctgccttccgggtgctggtggaaaacgagcatcggggcagccagactgtgagctacacgcgcgccgtgcgggtggaggcccgcggggtgaaggtggccgtgcgccgggagtaccccgggcaagtgctggtggatgacgtccttcagtatctgcccttccaagcagcagatgggcaggtgcaggtgttccgacagggcagggatgccgtcgtgcgcacggactttggcctgactgtcacttatgactggaatgcacgagtgactgccaaggtgcccagcagctatgctgaggccctgtgtggactctgtgggaacttcaacggggacccagctgatgacctggctctgcggggtgggggtcaagctgccaatgcactggcctttgggaacagctggcaagaagagacgaggcccggctgtggagcaactgaaccgggtgactgtcccaagctggactccctggtggcccagcagctgcagagcaagaatgagtgtggaatccttgccgaccccaaggggcccttccgggagtgccatagcaagctggacccccagggtgccgtgcgcgactgtgtctatgaccgctgcctgctgccaggccagtctgggccactgtgtgacgcactggccacctatgctgctgcatgccaggctgctggagccacagtgcacccctggaggagtgaagaactttgcccactgagctgcccaccccacagccactatgaggcgtgttcctacggctgcccgctgtcctgtggagacctcccagtgcccgggggctgtggctcagaatgccatgagggctgcgtgtgcgatgagggctttgcgctcagtggtgagtcctgcctgcccctggcctcctgtggctgcgtacaccagggcacctaccacccaccaggccagaccttctaccctggccccggatgtgattccctttgccactgccaggagggcggcctggtgtcctgtgagtcctccagctgcggaccgcacgaggcctgccagccatccggtggcagcttgggctgtgtggccgtgggctctagcacctgccaggcgtcaggagacccccactacaccaccttcgatggccgccgcttcgacttcatgggcacctgcgtgtatgtgctggctcagacctgcggcacccggcctggcctgcatcggtttgccgtcctgcaggagaacgtggcctggggtaatgggcgagtcagtgtgaccagggtgatcacggtccaggtggcaaacttcaccctgcggctggagcagagacagtggaaggtcacggtgaacggtgtggacatgaagctgcccgtggtgctggccaacggccagatccgtgcctcccagcatggttcagatgttgtgattgagaccgacttcggcctgcgtgtggcctacgaccttgtgtactatgtgcgggtcaccgtccccggaaactactaccagcagatgtgtggcctgtgtgggaactacaacggcgaccccaaggatgacttccagaagcccaatggctcacaggcaggcaacgccaatgagttcggcaactcctgggaggaggtggtgcccgactctccctgcctgccgcccaccccttgcccgccggggagcgaggactgtatccccagccacaagtgtcctcccgagctggagaagaagtatcagaaggaggagttctgtgggctcctctccagccccacagggccactgtcctcctgccacaagctggtggatccccagggtcccttgaaagattgcatctttgatctctgcctgggtggtgggaacctgagcattctctgcagcaacatccatgcctacgtgagtgcttgccaggcggctggaggccacgtggagccctggaggactgaaactttctgtcccatggagtgccctccgaacagtcactacgagctctgtgcggacacctgctccctgggctgctcagctctcagtgcccctccacagtgccaggatgggtgtgctgagggctgccagtgtgactccggcttcctctacaatggccaagcctgcgtgcccatccagcaatgcggctgctaccacaatggtgtctactatgagccggagcagacagtcctcattgacaactgtcggcagcagtgcacgtgccatgcgggtaaaggcatggtgtgccaggaacacagctgcaagccggggcaggtgtgccagccctccggaggcatcctgagctgcgtcaccaaagacccgtgccacggcgtgacatgccggccacaggagacatgcaaggagcagggtggccagggcgtgtgcctgcccaactatgaggccacgtgctggctgtggggcgacccacactaccactccttcgatggccggaagtttgacttccagggcacctgtaactatgtgctggcaacaactggctgcccgggggtcagcacccagggcctgacacccttcaccgtcaccaccaagaaccagaaccggggcaaccctgctgtgtcctacgtgagagtcgtcaccgtggctgccctcggcaccaacatctccatccacaaggacgagatcggcaaagtccgggtgaacggtgtgctcacagccttgcctgtctctgtggccgacgggcggatttcagtgacccagggtgcatcgaaggcactgctggtggctgactttggactgcaagtcagctatgactggaactggcgggtagacgtgacgctgcccagcagctatcatggcgcagtgtgcgggctctgcggtaacatggaccgcaaccccaacaatgaccaggtcttccctaatggcacactggctccctccatacccatctggggcggcagctggcgagccccaggctgggacccactgtgttgggacgaatgtcgggggtcctgcccaacgtgccctgaggaccggttggagcagtacgagggccctggcttctgcggacccctggcccccggcacagggggccctttcaccacctgccatgctcatgtgccacctgagagcttcttcaagggctgtgttctggacgtctgcatgggtggtggggaccgtgacattctttgcaaggctctggcttcctatgtggccgcctgccaggctgctggggttgtcatcgaagactggcgggcacaggttggctgtgagatcacctgcccagaaaacagccactatgaggtctgtggcccaccctgcccggccagctgtccgtcccctgcaccccttacgacgccagccgtatgtgagggcccctgtgtggagggctgccagtgcgacgcgggtttcgtgttaagtgctgaccgctgtgttcccctcaacaacggctgcggctgctgggccaatggcacctaccacgaggcgggcagtgagttttgggctgatggcacctgctcccagtggtgtcgctgcgggcctgggggtggctcgctggtctgcacacctgccagctgtgggctgggtgaagtgtgtggcctcctgccatccggccagcacggctgccagcccgtcagcacagctgagtgccaggcgtggggtgacccccattacgtcactctggatgggcaccgattcaatttccaaggcacctgcgagtacctgctgagtgcaccctgccacggaccacccttgggggctgagaacttcactgtcactgtagccaatgagcaccggggcagccaggctgtcagctacacccgcagtgtcaccctgcaaatctacaaccacagcctgacactgagtgcccgctggccccggaagctacaggtggacggcgtgttcgtcactctgcccttccagctggactcgctcctgcacgcacacctgagcggcgccgacgtggtggtgaccacaacctcagggctctcgctggctttcgacggggacagcttcgtgcgcctgcgcgtgccggcggcgtacgcgggctctctctgtggcttatgcgggaactacaaccaggaccccgcagacgacctgaaggcggtgggcgggaagcccgccggatggcaggtgggcggcgcccagggctgcggggaatgtgtgtccaagccatgcccgtcgccgtgcaccccagagcagcaagagtccttcggcggcccggacgcctgcggcgtgatctccgccaccgacggcccgctggcgccctgccacggccttgtgccgcccgcgcagtacttccagggctgcttgctggacgcctgccaagttcagggccatcctggaggcctctgtcctgcagtggccacctacgtggcagcctgtcaggccgctggggcccagctccgcgagtggaggcggccggacttctgtcccttccagtgccctgcccacagccactacgagctctgcggtgactcctgtcctgggagctgcccgagcctgtcggcacccgagggctgtgagtcggcctgccgtgaaggctgtgtctgcgatgctggcttcgtgctcagtggtgacacgtgtgtacctgtgggccagtgtggctgcctccacgatgaccgctactacccactgggccagaccttctaccctggccctgggtgtgattccctttgccgctgccgggagggcggtgaggtgtcctgtgagccctccagctgcggcccgcatgagacctgccggccatccggtggcagcttgggctgcgtggccgtgggctctaccacctgccaggcgtcgggagatccccactacaccaccttcgatggccgccgcttcgacttcatgggcacctgcgtgtatgtgctggctcagacctgcggcacccggcctggcctacatcggtttgccgtcctgcaggagaacgtggcctggggtaatgggcgagtcagtgtgaccagggtgatcacggtccaggtggcaaacttcaccctgcggctggagcagagacagtggaaggtcacggtgaacggtgtggacatgaagctgcccgtggtgctggccaacggccagatccgtgcctcccagcatggttcagatgttgtgattgagaccgacttcggcctgcgtgtggcctacgaccttgtgtactatgtgcgggtcaccgtccctggaaactactaccagctgatgtgtggcctgtgtgggaactacaacggcgaccccaaggatgacttccagaagcccaatggctcgcaggcaggcaacgccaatgagttcggcaactcctgggaggaggtggtgcccgactctccctgcctgccgccgcccacctgcccgccggggagcgagggctgtatccccagcgaggagtgtcctcccgagctggagaagaagtatcagaaggaggagttctgtgggctcctctccagccccacagggccactgtcctcctgccacaagctggtggatccccagggtcccttgaaagattgcatctttgatctctgcctgggtggtgggaacctgagcattctctgcagcaacatccatgcctacgtgagtgcttgccaggcggctggaggccacgtggagccctggaggaatgaaactttctgtcccatggaatgccctcagaacagtcactacgagctctgtgcggacacctgctccctgggctgctcggctctcagtgcccctctgcagtgcccagatgggtgtgctgagggctgccagtgtgactccggcttcctctacaacggccaagcctgcgtgcccatccagcaatgtggctgctaccacaatggtgcctactatgagccggagcagacagtcctcattgacaactgtcggcagcagtgcacgtgccatgcgggtaaagtcgtggtgtgccaggaacacagctgcaagccggggcaggtgtgccagccctccggaggcatcctgagctgcgtcaccaaagacccgtgccacggcgtgacatgccggccacaggagacatgcaaggagcagggtggccagggtgtgtgcctgcccaactatgaggccacgtgctggctgtggggcgacccacactaccactccttcgatggccggaagtttgacttccagggcacctgtaactatgtgctggcaacaactggctgcccgggggtcagcacccagggcctgacacccttcaccgtcaccaccaagaaccagaaccggggcaaccctgctgtatcctacgtgagagtcgtcaccgtggctgccctcggcaccaacatctccatccacaaggacgagatcggcaaagtccgggtgaacggtgtgctcacagccttgcctgtctccgtggccgacgggcggatttcagtggcccagggtgcatcgaaggcactgctggtggctgactttggactgcaagtcagctatgactggaactggcgggtagacgtgacgctccccagcagctatcatggcgcagtgtgcgggctctgcggtaacatggaccgcaaccccaacaatgaccaggtcttccctaatggcacactggctccctccatacccatctggggcggcagctggcgagccccaggctgggacccactgtgttgggacgaatgtcgggggtcctgcccaacgtgccctgaggaccggttggagcagtacgagggccctggcttctgcggacccctggcccccggcacagggggccctttcaccacctgccatgctcatgtgccacctgagagcttcttcaagggctgtgttctggacgtctgcatgggtggtggggaccatgacattctttgcaaggctctggcttcctacgtggccgcctgccaggccgctggggttgtcatcgaagactggcgggcacaggttggctgtgagatcacctgcccagaaaacagccactatgaggtctgtggcccaccctgcccggccagctgtccgtcccctgcaccccttacgacgccagccgtatgtgagggcccctgtgtggagggctgccagtgcgacgcgggtttcgtgttaagtgctgaccgctgtgttcccctcaacaacggctgcggctgctgggccaatggcacctaccacgaggcgggcagtgagttttgggctgatggcacctgctcccagtggtgtcgctgcgggcctgggggtggctcgctggtctgcacacctgccagctgtgggctgggtgaagtgtgtggcctcctgccatccggccagcacggctgccagcccgtcagcacagctgagtgccaggcgtggggtgacccccattacgtcactctggatgggcaccgattcgatttccaaggcacctgcgagtacctgctgagtgcaccctgccacggaccacccttgggggctgagaacttcactgtcactgtagccaatgagcaccggggcagccaggctgtcagctacacccgcagtgtcaccctgcaaatctacaaccacagcctgacactgagtgcccgctggccccggaagctacaggtggacggcgtgttcgtcactctgcccttccagctggactcgctcctgcacgcacacctgagcggcgccgacgtggtggtgaccacaacctcagggctctcgctggctttcgacggggacagcttcgtgcgcctgcgcgtgccggcggcgtacgcgggctctctctgtggcttatgcgggaactacaaccaggaccccgcagacgacctgaaggcggtgggcgggaagcccgccggatggcaggtgggcggcgcccagggctgcggggaatgtgtgtccaagccatgcccgtcgccgtgcaccccagagcagcaagagtccttcggcggcccggacgcctgcggcgtgatctccgccaccgacggcccgctggcgccctgccacggccttgtgccgcccgcgcagtacttccagggctgcttgctggacgcctgccaagttcagggccatcctggaggcctctgtcctgcagtggccacctacgtggcagcctgtcaggccgctggggcccagctccgcgagtggaggcggccggacttctgtcccttccagtgccctgcccacagccactacgagctctgcggtgactcctgtcctgggagctgcccgagcctgtcggcacccgagggctgtgagtcggcctgccgtgaaggctgtgtctgcgatgctggcttcgtgctcagtggtgacacgtgtgtacctgtgggccagtgtggctgcctccacgatgaccgctactacccactgggccagaccttctaccctggccctgggtgtgattccctttgccgctgccgggagggcggtgaggtgtcctgtgagccctccagctgcggcccgcatgagacctgccggccatccggtggcagcttgggctgcgtggccgtgggctctaccacctgccaggcgtcgggagatccccactacaccaccttcgatggccgccgcttcgacttcatgggcacctgcgtgtatgtgctggctcagacctgcggcacccggcctggcctacatcggtttgccgtcctgcaggagaacgtggcctggggtaatgggcgagtcagtgtgaccagggtgatcacggtccaggtggcaaacttcaccctgcggctggagcagagacagtggaaggtcacggtgaacggtgtggacatgaagctgcccgtggtgctggccaacggccagatccgtgcctcccagcatggttcagatgttgtgattgagaccgacttcggcctgcgtgtggcctacgaccttgtgtactatgtgcgggtcaccgtccctggaaactactaccagctgatgtgtggcctgtgtgggaactacaacggcgaccccaaggatgacttccagaagcccaatggctcgcaggcaggcaacgccaatgagttcggcaactcctgggaggaggtggtgcccgactctccctgcctgccgccgcccacctgcccgccggggagcgagggctgtatccccagcgaggagtgtcctcccgagctggagaagaagtatcagaaggaggagttctgtgggctcctctccagccccacagggccactgtcctcctgccacaagctggtggatccccagggtcccttgaaagattgcatctttgatctctgcctgggtggtgggaacctgagcattctctgcagcaacatccatgcctacgtgagtgcttgccaggcggctggaggccacgtggagccctggaggaatgaaactttctgtcccatggaatgccctcagaacagtcactacgagctctgtgcggacacctgctccctgggctgctcggctctcagtgcccctctgcagtgcccagatgggtgtgctgagggctgccagtgtgactccggcttcctctacaacggccaagcctgcgtgcccatccagcaatgtggctgctaccacaatggtgtctactatgagccggagcagacagtcctcattgacaactgtcggcagcagtgcacgtgccatgtgggtaaagtcgtggtgtgccaggaacacagctgcaagccggggcaggtgtgccagccctccggaggcatcctgagctgcgtcaacaaagacccgtgccacggcgtgacatgccggccacaggagacatgcaaggagcagggtggccagggtgtgtgcctgcccaactatgaggccacgtgctggctgtggggcgacccacactaccactccttcgatggccggaagtttgacttccagggcacctgtaactatgtgctggcaacaactggctgcccgggggtcagcacccagggcctgacacccttcaccgtcaccaccaagaaccagaaccggggcaaccctgctgtatcctacgtgagagtcgtcaccgtggctgccctcggcaccaacatctccatccacaaggacgagatcggcaaagtccgggtgaacggtgtgctcacagccttgcctgtctccgtggccgacgggcggatttcagtggcccagggtgcatcgaaggcactgctggtggctgactttggactgcaagtcagctatgactggaactggcgggtagacgtgacgctccccagcagctatcatggcgcagtgtgcgggctctgcggtaacatggaccgcaaccccaacaatgaccaggtcttccctaatggcacactggctccctccatacccatctggggcggcagctggcgagccccaggctgggacccactgtgttgggacgaatgtcgggggtcctgcccaacgtgccctgaggaccggttggagcagtacgaggggcctggcttctgcggacccctggcatctggcacagggggccccttcaccacctgccatgctcatgtgccacctgagagcttcttcaagggctgtgttctggacgtctgcatgggtggtggggaccatgacattctttgcaaggctctggcttcctacgtggccgcctgccaggccgctggggttgtcatcgaagactggcgggcacaggttggctgtgagatcacctgcccagaaaacagccactatgaggtctgtggcccaccctgcccggccagctgtccgtcccctgcaccccttacgacgccagccgtatgtgagggcccctgtgtggagggctgccagtgcgacgcgggtttcgtgttaagtgctgaccgctgtgttcccctcaacaacggctgcggctgctgggccaatggcacctaccacgaggcgggcagtgagttttgggctgatggcacctgctcccagtggtgtcgctgcgggcctgggggtggctcgctggtctgcacacctgccagctgtgggctgggtgaagtgtgtggcctcctgccatccggccagcacagctgccagcccgtcagcacagctgagtgccaggcgtggggtgacccccattacgtcactctggatgggcaccgattcgatttccaaggcacctgcgagtacctgctgagtgcaccctgccacggaccacccttgggggctgagaacttcactgtcactgtagccaatgagcaccggggcagccaggctgtcagctacacccgcagtgtcaccctgcaaatctacaaccacagcctgacactgagtgcccgctggccccggaagctacaggtcgacggcgtgttcgtggctctgcctttccagctggactcgctcctgcacgcacacctgagcggcgccgacgtggtggtgaccacaacctcagggctctcgctggctttcgatggggacagcttcgtgcgcctgcgcgtgccggcggcgtacgcggcctctctctgtggcttatgcgggaactacaaccaggaccccgcagacgacctgaaggctgtgggcgggaagcccgctggatggcaggtgggcggggcccagggctgcggggaatgtgtgtccaagccatgcccgtcgccgtgcaccccagagcagcaggagtccttcggcggcccggacgcctgcggcgtgatctccgccaccgacggcccgctggcaccctgccacggccttgtgccgcccgcgcagtacttccagggctgcttgctggacgcctgccaagttcagggccatcctggaggcctctgtcctgcagtggctacctacgtggcagcctgtcaggccgctggggcccagctcggcgagtggaggcggccggacttctgtcccttgcagtgccctgcccacagccactatgagctctgcggtgactcctgccctgtgagctgcccgagcctctcagcacccgagggctgtgagtcggcctgccgtgaaggctgtgtctgcgatgctggcttcgtactcagtggtgacacctgcgtacccgtgggccagtgtggctgcctccatgatggccgctactacccactgggcgaggtcttctacccgggccctgagtgtgagcgacgctgtgagtgtgggccaggtggccatgtcacctgccaggagggcgcagcctgtgggccccatgaggagtgccggttagaggatggtgtccaggcctgtcatgccacaggctgtggccgctgcctggccaacgggggcatccactacatcacccttgatggccgtgtctacgacctgcatggctcctgctcctatgtcttggcccaagtctgccacccaaagcctggggacgaggacttttccatcgtgcttgagaagaatgcagctggacatctccaacgcctcctggttactgtggctggccaggttgtgagcctagctcaggggcagcaggtcaccgtggacggcgaggctgtggccctgcctgtggctgtgggccgcgtgcgggtgaccgccgagggccgaaacatggttctgcagacgaccaaggggctgcggcttctctttgatggcgatgcccacctcctcatgtccatccccagccccttccgtggacggctctgtggcctctgtgggaacttcaatggcaactggagtgacgactttgtcctgcccaatggctcagcagcgtccagtgtggagaccttcggggctgcatggcgggtgcccggctcctccaagggctgtggcgagggctgcgggccccaaggctgcccagtgtgcttggcagaggagactgcaccctatgagagcaacgaggcctgcgggcagctccggaacccccagggccccttcgcgacctgccaggcggtgctgagtccctctgagtacttccgccaatgcgtatacgacctgtgcgcgcaaaagggtgacaaagccttcctgtgccgcagcctggcagcctacacggcggcctgtcaggcagctggcgtggccgtgaagccctggaggacagacagcttctgcccgctccattgccccgcccacagccactactccatctgcactcgcacctgccagggatcctgtgcggctctctccggcctcacgggctgcaccacccgctgttttgagggctgtgagtgcgacgaccgcttcctgctttcccagggtgtctgcatccctgtccaagattgtggctgcacccataatggccgatacttgccggtaaactcctccctgctgacctcagactgcagcgagcgctgttcctgttcctcaagctctggcctgacatgccaggccgctggctgcccaccaggccgtgtatgtgaggtcaaggctgaagcccggaactgctgggccacccgtggtctctgtgtcctgtctgtgggtgccaacctcaccacctttgatggggcccgtggtgccaccacctctcctggtgtctatgagctctcttcccgctgcccaggactacagaataccatcccctggtaccgtgtagttgccgaagtccagatctgccatggcaaaacggaggctgtgggccaggtccacatcttcttccaggatgggatggtgacgttgactccaaacaagggtgtgtgggtgaatggtctccgagtggatctcccagctgagaagttagcatctgtgtccgtgagtcgtacacctgatggctccctgctagtccgccagaaggcaggggtccaggtgtggcttggagccaatgggaaggtggctgtgattgtcagcaatgaccatgctgggaaactgtgtggggcctgtggaaactttgacggggaccagaccaatgattggcatgactcccaggagaagccagcgatggagaaatggagagcgcaggacttctccccatgttatggctgatcagtcatccaccaggaacgaagatttcctgaagaagacctggtccctctggaggttgcggtggctgaaggatgcatcatgtgctcctaccctgctctaccgcttttctgggtcacagaggccaaatgtgagagcattgaataaatatcttaagct

SEQ ID NO: 663 - DNA, 16382 bp, Homo sapiens; identical to SEQ ID NO: 662

SEQ ID NO: 664 - DNA, 1137 bp, Homo sapiens
gaattccgggcgcggcgtccggggcgagtgacacgcagagctgaagccatggttcatcaggtgctctaccgggcgctggtctccaccaagtggctggcggagtccatcaggactggcaagctggggcccggcctgcgggtgctggacgcgtcctggtactcaccaggcacccgagaggcccgcaaggagtacctcgagcgccacgtacccggcgcctctttctttgacatagaagagtgccgggacacggcgtcgccctacgagatgatgctgcccagcgaggctggcttcgccgagtatgtgggccgcctgggcatcagcaaccacacgcacgtggtggtgtatgatggtgaacacctgggcagcttctatgctccccgggtctggtggatgttccgtgtgtttggccaccgcaccgtatcagtgctcaatggtggcttccggaactggctgaaggagggccacccggtgacatccgagccctcacgcccagaaccggccgtcttcaaagccacactggaccgctccctgctcaagacctacgagcaggtgctggagaaccttgaatctaagaggttccagctggtggattcaaggtctcaagggcggttcctgggcaccgagccggagccggatgcagtaggactggactcgggccatatccgtggtgccgtcaacatgcctttcatggacttcctgactgaggatggcttcgagaagggcccagaagagctccgtgctctgttccagaccaagaaggtggatctctcgcagcctctcattgccacgtgccgcaagggagtcaccgcctgccacgtggccttggctgcctacctctgcggcaagcctgatgtggccgtgtacgatggctcctggtccgagtggtttcgccgggcccccccagagagccgtgtgtcccagggaaagtctgagaaggcctgagccgtgacctcttctgcttactgtaactgcggccggtttagtgaccccatgacttacagccggttcttacctcttaggtgaaggagatgacatgttttttagaattgctgtgcaaggctcaccctctctctgtcaacactggaataaactttgccttttctgaaaaaaaaaaaaaaaaaaaaaaaaccggaattc

SEQ ID NO: 665 - DNA, 2193 bp, Homo sapiens
cgatgatgattcagtggaatgggcccaagaccagcatttctgagaaggctcgggggctggctttgacctacagcctccgggacagggaacgtggtggtggtcgtgcacagattggtgtggtggatgatgaggccaaagccccggacctcatgcagatcatggaggctgtgctgggctgcagggtgggcagcctgcgtgccgccacgcccagcaaggatatcaaccagctgcagaaggccaatgttcgcctgtaccatgtctatgagaagggcaaagacctggtggtcctggagttggcgacccccccactgacccaggacctgctgcaggaggaggacttctacatcctggaccagggtggcttcaagatctatgtgtggcagggacgcatgtctagcctccaggagagaaaggctgccttcagccgggctgtgggcttcatccaggccaagggctacccgacctacaccaacgtggaggtggtgaacgacggcgccgagtcggccgcgttcaagcagctcttccggacttggtctgagaagcggcgcaggaaccagaagctcggcgggagggataaatcgattcatgtaaagctggacgtgggcaagctgcacacccagcctaagttagcggcccagctcaggatggtggacgacggctctgggaaggtggaggtgtggtgcatccaggacttacacaggcagcccgtggaccccaagcgtcatggacagctgtgtgcaggcaactgctaccttgtgctctacacataccagaggctgggccgtgttcagtacatcctgtacctatggcagggccaccaggccactgcggatgagattgaggccctgaacagcaacgctgaggaactagatgtcatgtatggtggcgtcctagtacaggagcatgtgaccatgggcagcgagcccccccacttcctcgccatcttccagggccagctggtgatcttccaggagagagctgggcaccatggaaaggggcagtcagcatccaccacaaggcttttccaagtgcaaggcactgacagccacaacaccaggaccatggaggtgccagcccgtgcctcatccctcaactccagtgacatcttcttgctggtcacagccagcgtctgctacctctggtttgggaagggctgtaatggtgatcagcgtgagatggcacgggtggtggtcactgtcatttccaggaagaatgaggaaacggtgctggagggtcaggagcctccccacttctgggaggccctgggaggccgggccccctaccccagcaacaagaggctccctgaggaggtccccagcttccagccacgactgtttgagtgctccagccacatgggctgcctggtcctcgcagaagtggggttcttcagccaggaggacctggacaagtatgacatcatgttactggacacctggcaggagatcttcctgtggcttggggaagctgcaagtgagtggaaggaggcggtggcctggggccaggagtacctgaagactcacccagcagggaggagcccggccacacccatcgtgctggtcaagcagggccatgagcctcccaccttcattggatggttcttcacttgggacccctacaagtggactagccacccgtcccacaaggaagtggtggatggcagcccggcagcagcatcaaccatctctgagataacagcagaagtcaacaacttgcggctatccagatggccgggcaatggcagggcaggtgccgtggccctgcaggccctcaagggctcccaggacagctcagagaatgatctggtgcgaagccccaagtcggctggcagcagaaccagcagctccgtcagcagcaccagcgccacgatcaacgggggcctgcgccgggaacaactgatgcaccaggctgttgaggacctgccagagggcgtggaccctgcccgcagggagttctatctctcagactctgacttccaagatatctttgggaaatccaaggaggaattctacagcatggccacgtggaggcagcggcaggagaaaaagcagctgggcttcttctgaacccaagccctctcgactgcccctatcccctggaccccaacatacctacaatgctggggaggccctgcttccactcccctcagaggcttttggtcatcctctgcgtgtcagtaaaagcaggcagcccata

SEQ ID NO: 666 - DNA, 298 bp, Homo sapiens
gggggtggcagtgcactttattaacaaacaaaacagtaccatacaggcaaaatcttacttcagtggcaaagcacacacataggtatactccaacgtgtagcactggggcaaacttcagacatggaacattaggcaccaagttcacaatcacactaaacatagttcacaatccttcaatccatactcttcagtggaggatgaggccttatttaacagttaactgggacagacagatgaagttttaaaatctaattcttggcctaactgtggagtggggctgactcagccttcagaactg

SEQ ID NO: 667 - DNA, 255 bp, Homo sapiens
  misc_feature (1)..(255): n=a,t,g or c
cagacaggctatcattctttattcttatccttttgttttaaagcatttttattagtctattttttncttaaatttttaaacagctatttttaaaaacacaacaaatacacaacacaaaacttggtaaaaataactcactatatggtacatatacgcagatggtgtaatatatttatataataaaagatgaaaatagtcactttccataataaaaataagtnctatttttngtttattttacaatatacttaatat

SEQ ID NO: 668 - DNA, 269 bp, Homo sapiens
tttttttttagaaaatgtcctaaaatgtgcattttattccatatcattatacaatgtttacatatagttaaaacttccttccaaaggaaaaccggtcctttacccaggttggtatggtgggtggtctaaatctttaacatgaagggactgaaaagagtggaaatccacactgattgttatcctacagattgtcatgagctgcacgtgtcgcaatcagaaggaatggaagtctcggaagagcagcgtgcttacagaccttggctttagtg

SEQ ID NO: 669 - DNA, 409 bp, Homo sapiens
  misc_feature (1)..(409): n=a,t,g or c
gaagaaactnnnntgtggatcctaaaattcatttggaaatgcaagagatgcagaagagtcaaaacagccttgaagcagaacaaagtaaaacttctcacaacaaagcagcactgatcaaggcactgtggcactggcataaggttaaacaggtcaatggantagagtcaagtgcccagaantaagcctgtacatttttggtcaactgattatcaataatggtgcgaagataattcaatggggaaaaataatgttttcaacaaatgggtgctggggacaactgggatatccacatgccaaaaggantgtgggggctctttacacccacacacaaaactttaatttcacattgggtccaaggtcttccacntaggngctggaattttttaaaatgccttttttnggggacccg

SEQ ID NO: 670 - DNA, 389 bp, Homo sapiens; identical to SEQ ID NO: 119
  misc_feature (1)..(389): n=a,t,g or c

SEQ ID NO: 671 - DNA, 382 bp, Homo sapiens
  misc_feature (1)..(382): n=a,t,g or c
ttttttttttttatatccatatctttatttaaacaagtttccataatagctaggagaatacagcattaatgacacacatttactaagcacaacaatggacaactacaaatttagagcataaatgtaattctgatattgttttggtttttatcttagcactaggtgatatctagtgaaaacccatgtttcaaaggcttttgttgatatgaggatgaattattaacttatttttaaaaattgcacgtgaggatatgctaggaatggggttctaggagtctaggagttaggttggataatggcctttcatgtctcagtatttctggcttccnttttaatgggggtaaatgtttcaccccaggggactttccaaaaaattggtatc

SEQ ID NO: 672 - DNA, 284 bp, Homo sapiens
ttttttttttttttttttttattgaatgcgtttattttaacaaccaaaaaattctaacagcctaacaatgcacataagttaaaaattaattatcacttagtgataacaaagatagttgatttacatggaaaaaagaacatttacaatatgttaatccttattcacattgttgataccgcaataaaacacaatttgtttttttcatttcacaaaaaaaaaaaaaagggcgggaaaattgtgctttgtcaaggggcactacaggggaaagtttcttcttccaaatg

SEQ ID NO: 673 - DNA, 438 bp, Homo sapiens
  misc_feature (1)..(438): n=a,t,g or c
tttttttttgactttaggcttctctatagcaatactttaatattccaaagaaaaatatgaactgagaattgtattatctagccaaattgtttttactgtgtaaaggctacagataaacatatttgacatggcaaaaatttagggaaattgttccatgagtcttttttaaggaaactattaaatcattaatttcagctgaccaagaggattaatgggaatgttttgagtttcaaatacatttaaactgtgggaactaaggaaatgtgaggatgacaacagaatgtaaatattatatgtcctcacaaggtagggantgatacaacaaaaattgaggggaaaagggaaaaggaaagtgggaagttcactggatacaataatagttggggcaccagagtgtatccggctaaagctaaggctggacagtccaaggggaggttt

SEQ ID NO: 674 - DNA, 503 bp, Homo sapiens
  misc_feature (1)..(503): n=a,t,g or c
tttttttttttttttttttttttggcaggccaaaaccctagtttatttcagcatcagcagttatcttagccatcaaaaaaataaactctaccaagggtnacggaagntctacagcaaggctaagggctcgccagacggnaancatcaggggtgcatggtgggcactgccagggcaataagttaggaagcagcagggctggntntcgggtttgggccgggcttcatttctgggcaggcatgaggtcgtcgatggcctggccctgctccagccgctgctccatctcgatgagcagcttcactccgtccaccaccatctgcaccagctccacctttgagaaagcccagggcgttcagcgtttgggagacgtncgaaagccccccggnccaccgcagtccgtnttccacaccgttntgtggcctncgtttttttgnaagttcgcagcctttttaaggcaccttccgagganttttttaatgttttgcccagggttggnaagtttttt

SEQ ID NO: 675 - DNA, 451 bp, Homo sapiens
  misc_feature (1)..(451): n=a,t,g or c
gaatttntttttattctttcagacctctcagggatgaacggacataggcttctaacacttaggtgtgggcaacattcttcgaagcacctccctcaaagtggaaaaggcctggggctcagacgagagaagagagaaggcagggagaaggtggaggtgaggaagggaggagggggctcagggggtgcaaatcgcagcggacctagaggtggcttggcaaatggaattcccaggaaggtttggaccccggcattggcgcccttcacatggacaagactccccagcacctgccccgtntgtgtggtccngatgggactggctgagtcctgggccctggccccggacaagaagcagcagaagcccacaggccaccacgtttcagccgggcancgaagtattgttgcagccgcttggtccgttccgttggttttcgtttcctttncccgacgacact

SEQ ID NO: 676 - DNA, 439 bp, Homo sapiens
  misc_feature (1)..(439): n=a,t,g or c
ncattannctttatntcctgtactgtgaagtgtgttgaaatgtggaagttatttcacaaagttaacagggtcttcaagacagaagagatatacgtgcagagtacacacatacacctacgtacacacctgtatatgtcgatgacgacagcatggagggaatgaacttgtgcatggagaagggggctttttttaaacttgaaagaaaccagcccattctgtgtgtgtttggaggaggggagcctgtaaagcctatttaccttgaatcccctctggcttacagctgcagagagcaaaggagagcagacatattctaggattggggcagtggggatgatgggtgattgcgttgctgctcaacgagtctggggtttgcagggtccaagggtaatgaccctttcccctgaggggccctcattcaaaggggctgagggttgcaagc

SEQ ID NO: 677 - DNA, 411 bp, Homo sapiens
  misc_feature (1)..(411): n=a,t,g or c
tatccttggatgtacaaaaaattcagaaaatgatctctgtagatattctgttttattttggtcatctttagaagttatcaggaatgtgtttaaaacaagaagagaacttttctaaggaatgatacatagaaaagattttattttaaaatgagttgtaaagcttgtgtttctttgttgctgcaagctatctgcccaagttaatgcaaatggacacattttttatgtcagaaaaacacacacacacacacacacacacacacacacacacgaaaaacaaaggaaaaaaatgcttgagctttttctaacttccccttgcagtctgttgtgtgagcagcctgtttatttcntctaatattatgtcagtttattctctttaatgggantgttaaaaaatgttattcacaggagtgc

SEQ ID NO: 678 - DNA, 420 bp, Homo sapiens
  misc_feature (1)..(420): n=a,t,g or c
ttgaccngatgagaaatcagcttgggtacagcccatgccngcagccctttcagtgggtggctccngatagtgttgtccnttcagttgctgggagcggtgaggcccagccctttccccttcctcccaccactattcctaacctggggcctggcaggggtggagtgatgtgatctaagggtcccngggngaagggtggagtggaagaggcagggtnttgggttaaagggaagattctgaggtctcagggcaaaggaaaaggtttttggatgaagactnaggcagtgctacctccctccacatntgaggntcaagcaggtttggncaagaacagagccctgcctggggctcttctnggccncagcctcaggagccaggggtttaaggccanagattaaattgaagttttnagcctttgataaa

SEQ ID NO: 679 - DNA, 415 bp, Homo sapiens
  misc_feature (1)..(415): n=a,t,g or c
ntggatgtacaaaaagaagatattttattgaggaagttgcaatgtttttacatacatgcacaatgcttacacaaattcagcttcgtgataatgcactttcatggagtcaaatttgcaaaaatgcataaaatganttagaactttctaaacatctttatacaatttataccttcagtattaaaaatggactgaggaggccgggcacagtggctcacacctgtaatccctgactttgagaggctgaagtggggcggatcacttgaggttaggagttggagacctgcctgggccaacatagtgaaaccctgtctgtaggtaaaantacaaaatttaacacttgagcccggggggcggnagggttgggagtgagctgaggattntacccactggcactccagcccggggttgacaaagt

SEQ ID NO: 680 - DNA, 254 bp, Homo sapiens
  misc_feature (1)..(254): n=a,t,g or c
tttaaggttacctgattcttttatttaagaaaagtgaaatacatggacctgaagtgagacagcagagggagggagtaagagcggccagggcaaggcagcttggctngccagcccccaaccctctgactgaaaagccagcagcaggctgcatctctgagggccatacctgctttgtacccaccttggggcctcagagctagctactctagaggaccacagggtgcagagagggtntcctgagggtccttcctaag

SEQ ID NO: 681 - DNA, 317 bp, Homo sapiens
  misc_feature (1)..(317): n=a,t,g or c
tcaagtctaagtgtttaattattattcacatatttcacagaaaaaaaggaatgtagcaaatgagtcggagttgtagaaaaaaaaaatcctggnttttacgtgtcattctgttttcatctgacagcagggctgtcccgacatcaggcacagcagctgcacttctctgacgcccctttgcagatgcagccctgggcacacttgggcacagcccaggggnaaacaggagcagcagcctgggggaaaaagggagagagaaggtcacaggcagacttnaccagggganctccctttcccaacagcaggcctgggctcaagct

SEQ ID NO: 682 - DNA, 340 bp, Homo sapiens
  misc_feature (1)..(340): n=a,t,g or c
ctagtacaaaaaaattaaatttgctttagttataaaagagctctgtcaatatacacaaactatatacttcagacattcacaaaaatgtgagcagaaggcttatcaaaagacatttaatacaattagttttcaacaaccccttggtggttccacatctacaaagatatccagcccaacccaaccccccttccaaatcccacccacacaggaaaaggcacatacttaccagaatttttaggcaggtatgggtttgggggaatttttgtggggttttgttttttttaaaaaaagggcccccgggggaaaggtttntttacggttttaatttgnccactgtcaa

SEQ ID NO: 683 - DNA, 309 bp, Homo sapiens
  misc_feature (1)..(309): n=a,t,g or c
cctctttctctctttttaattgctatatattagcttagaacaaggtacaaaatttggagattcacaggaacagcacagaagtttaacaatattaataaagttctaacacatgacaggaaagtttatctgggntcttgaaggcaacagctggntctgcatgcacattnctgggagtcnagtggattcnggaanaggtcttctctccatggctccatcttgctctttcacaaaggacccctaggtccatggcaccataagcccagggcnagtgatttgnagcatggagaagggaatngaagggncccgcta

SEQ ID NO: 684 - DNA, 351 bp, Homo sapiens
  misc_feature (1)..(351): n=a,t,g or c
tgttcctaacacaaatgtgaatttattggttgatttgatatttaaaatagtacttttacaaaatcatctcagaaaatatactacatttattaaaattcctacaaaccattgcagaaaatattaaaccctctaaccaacctaacactcgctttcagaggcacttgtgatgattttcacagcttccatagttgcaaagaacaaagaaatcatcttccaacaggggtggaattagataagaataatccaaaaaatatttatttctttacagactcacagattgcttgatgtttaggggctcttacctaggatacctaattattcaagggtttccnaatttagtagactttttca

SEQ ID NO: 685 - DNA, 383 bp, Homo sapiens
  misc_feature (1)..(383): n=a,t,g or c
cacaggaacaattcttttattgtacattggagaaatagccctgtgtgctggttcaaggtgcaacatacagaatattgaattaagaaaagagggaacggggaagggaanggaaacctctttgaggtccaaagttgncaacaaaaaatggtaaaagatttcctcacgcaaganggcatttttgcaaataccatgcaaaacaggcagctggtgtgccttaagagaatccctataaataacagaaaagacactccaagcattcctgtacgtggactcagagcacagagaaaagaaactaaaatgccttttggatttcaagatatttggcactcttgtgattacatttttttacagtccattaaaggggaataaactgacataatatt

SEQ ID NO: 686 - DNA, 1120 bp, Homo sapiens
acttcttcgcaccagggaagccccacccaccagaacgccaagatgtccagcaagcgggccaaagccaaggccaccaagaagcggccacagcgggccacatccaatgtcttcgcaatgtttgaccagtcccagatccaggagtttaaggaggctttcaacatgattgaccagaaccgtgatggcttcattgacaaggaggacctgcacgacatgctggcctcgctggggaagaaccccacagacgaatacctggagggcatgatgagcgaggccccggggccatacaacttcaccatgttcctcaccatgtttggggagaagctgaacggcacggaccccgaggatgtgattcgcaacgcctttgcctgcttcgacgaggaatcctcaggtttcatccatgaggaccacctccggaagctgctcaccaccatgggtgaccgcttcacagatgaggaagtggacgagatgtaccgggaggcacccgttgataagaaaggcaacttcaactacgtggagttcacccgcatcctcaaacatggcgccaaggataaacacgactaggccatccccagccccctgacacccagcccccgccagtcacccctccccgcacacacccgtccataccagctccctgcccatgaccctcgctcagggatccccctttgagggttagggtcccagttcccagtggaagaaacaggccaggagagtgcgtgccgagctgaggcagatgttcccacagtgaccccagagccctgggctatagtctctgacccctccaaggaaagaccaccttctggggacatgggctggagggcaggacctagaggcaccaagggaaccgcattccggggctgttccccgaggaggaagggaagcctctgtgtgccccccaggaggaagaggccctgagtcctgggatcagacaccccttcacgtgtatcccacacaaatgcaagctcaccaaggtcccctctcagtccccttccctacaccctgacgccagatgccgcacacccaacgccaccagccatgggagtgtgctcaggagtcgcggggcagacgtgacatctgtccagagggggcagaatctccaatagaggactgagacaacatg

SEQ ID NO: 687 - DNA, 1922 bp, Homo sapiens
gagacctgggcgttggtgaaggcgaggggaaagccagaatactggggtggcggacgccaaggggcgggtgtagcaggcaacctcagggaagctgggaaggcctagcagggtgagagaacccgcacacggggggcacagcgcctccctcgcgagccggtgcgaaaggggccgcctgcggtgtgcgcccagctgcgctcaagggaccttgcacttggcccatctcctgcgcacagcccaggccgggaccgcgggcggtgcggactcagcgggctgggtgcaagggcggggcggggcgtctgcgcccggccccgtctcctgactataaaagcagccgctggctgttgggctccactccgccttccacgtgcacccactgcctcttcccttctcgcttgggaactctagtctcgcctcgggttgcaatggaccccaactgctcctgtgccgctggtaagggacgcccgggttctgtgccttggaatgccaaattcccagacaccatagagagtgtccctgggtttgaggaggtcgtattttgctatcagaggtaaggggactcctttattggtccagtgctttcctgttggccaagctcctgagggcattttcctcctccctgttcctctatgtcagagttgagggtcctgaggctcaaggctgtcctgctcatgtcagagttgagggtcctgaggctcaaggctgtcctgcctcacgtcacctagttggtcacagggctgctggctgagccccaattctctaacctgactctgagctaccggattggataggagacattggataggagggacattgcctcttccaagttcaggacagaaagtcgaagtcttcctaggccgtgatctgcagggactttcctttggagtagaaataggagggtgcttggttttcccagcatgaatggagaggacatggggcttctcttcctcgtctctgagtgggaaaggagctctgacggctggctctggcacagagaagggggaagtggacactcattgacccactgctgtaccttctgcatctcactcaccgttcactggctttttctcttctagcaggtgtctcctgcacctgcgccagctcctgcaagtgcaaagagtgcaaatgcacctcctgcaagaagagtgagtgcggggccatctccaggaatctggggctgtggctaaggttgggagggaacccaaggctgtccctgagtgcctgcttctggggaaccggccttcctttgtccctgtaggttgtcacgcctgtctagtcttctgcactttccaaggcttatgtgaggtggggcagctttctcaaaggaagacccattccaatgtccaccagttgtctcctgacaaaaaccatgccatcatgaactaagggtcctctggggctggagggatggagacaggcctctgttggggcagggagttctatgatcgagtctgctctgacctctcaatctcctttcctccccaaggctgctgctcctgctgccctgtgggctgtgccaagtgtgcccaaggctgcatctgcaaaggggcatcggagaagtgcagctgctgcgcctgatgtcgggacagccctgctcccaagtacaaatagagtgacccgtaaaatctaggattttttgttttttgctacaatcttgacccctttgctacattcccttttttctgtgaaatatgtgaataataattaaacacttagacttgattcccgttctggttcctgttgtgtttttggaatgagggactggggtgggagattgaactgggagttcacactgggctctggacggaaatgtgagtgctaaacaagctgagcgccttcaggcagccccgttacttctctgacctccttcctctgtaaaaggcacctgcaccgtgccggatgatatggggatggggacatacgcg

SEQ ID NO: 688 - DNA, 2657 bp, Homo sapiens
tgggaacacaaacttgctggcgggaagagcccggaaagaaacctgtggatctcccttcgagatcatccaaagagaagaaaggtgacctcacattcgtgccccttagcagcactctgcagaaatgcctcctcagctgcaaaacggcctgaacctctcggccaaagttgtccagggaagcctggacagcctgccccaggcagtgagggagtttctcgagaataacgctgagctgtgtcagcctgatcacatccacatctgtgacggctctgaggaggagaatgggcggcttctgggccagatggaggaagagggcatcctcaggcggctgaagaagtatgacaactgctggttggctctcactgaccccagggatgtggccaggatcgaaagcaagacggttatcgtcacccaagagcaaagagacacagtgcccatccccaaaacaggcctcagccagctcggtcgctggatgtcagaggaggattttgagaaagcgttcaatgccaggttcccagggtgcatgaaaggtcgcaccatgtacgtcatcccattcagcatggggccgctgggctcacctctgtcgaagatcggcatcgagctgacggattcgccctacgtggtggccagcatgcggatcatgacgcggatgggcacgcccgtcctggaagcactgggcgatggggagtttgtcaaatgcctccattctgtggggtgccctctgcctttacaaaagcctttggtcaacaactggccctgcaacccggagctgacgctcatcgcccacctgcctgaccgcagagagatcatctcctttggcagtgggtacggcgggaactcgctgctcgggaagaagtgctttgctctcaggatggccagccggctggcagaggaggaagggtggctggcagagcacatgctgattctgggtataaccaaccctgagggtgagaagaagtacctggcggccgcatttcccagcgcctgcgggaagaccaacctggccatgatgaaccccagcctccccgggtggaaggttgagtgcgtcggggatgacattgcctggatgaagtttgacgcacaaggtcatttaagggccatcaacccagaaaatggctttttcggtgtcgctcctgggacttcagtgaagaccaaccccaatgccatcaagaccatccagaagaacacaatctttaccaatgtggccgagaccagcgacgggggcgtttactgggaaggcattgatgagccgctagcttcaggcgtcaccatcacgtcctggaagaataaggagtggagctcagaggatggggaaccttgtgcccaccccaactcgaggttctgcacccctgccagccagtgccccatcattgatgctgcctgggagtctccggaaggtgttcccattgaaggcattatctttggaggccgtagacctgctggtgtccctctagtctatgaagctctcagctggcaacatggagtctttgtgggggcggccatgagatcagaggccacagcggctgcagaacataaaggcaaaatcatcatgcatgacccctttgccatgcggcccttctttggctacaacttcggcaaatacctggcccactggcttagcatggcccagcacccagcagccaaactgcccaagatcttccatgtcaactggttccggaaggacaaggaaggcaaattcctctggccaggctttggagagaactccagggtgctggagtggatgttcaaccggatcgatggaaaagccagcaccaacgtcacgcccataggctacatccccaaggaggatgccctgaacctgaaaggcctggggcacatcaacatgatggagcttttcagcatctccaaggaattctgggacaaggaggtggaagacatcgagaagtatctggtggatcaagtcaatgccgacctcccctgtgaaatcgagagagagatccttgccttgaagcaaagaataagccagatgtaatcagggcctgagaataagccagatgtaatcagggcctgagtgctttacctttaaaatcattaaattaaaatccataaggtgcagtaggagcaagagagggcaagtgttcccaaattgacgccacctaataatcatcaccacaccgggagcagatctgaaggcacactttgatttttttaaggataagaaccacagaacactgggtagtagctaatgaaattgagaagggaaatcttagcatgcctccaaaaattcacatccaatgcatactttgttcaaatttaaggttactcaggcattgatcttttcagtgttttttcacttagctatgtggattagctagaatgcacaccaaaaagatacttgagctgtatatatatatgtgtgtgtgtgtgtgtgtgtgtgtgtgtgtgcatgtatgtgcacatgtgtctgtgtgatatttggtatgtgtatttgtatgtactgttattcaaaatatatttaatacctttggaaaatcttgggcaagatgacctactagttttccttgaaaaaaagttgctttgttattaatattgtgcttaaattatttttatacaccattgttccttacctttacataattgcaatatttcccccttactacttcttggaaaaaaattagaaaatgaagtttatagaaaag

SEQ ID NO: 689 - DNA, 2416 bp, Homo sapiens
agattatgatcgcctgaggcccctctcctacccagataccgatgttatactgatgtgtttttcctttttttttttttttttttaagtaattaagggtagttaaattatttaaagtatacaaagtccaaacagccaggggtaaggtctccaagaggccttcccagggtaagggagtgcggagaggccccggtcgccacccgcggtgcccatggagcgggtgaagatgatcaacgtgcagcgtctgctggaggctgccgagtttttggagcgccgggagcgagagtgtgaacatggctacgcctcttcattcccgtccatgccgagcccccgactgcagcattcaaagcccccacggaggttgagccgggcacagaaacacagcagcgggacgagcaacaccagcactgccaacagatctacacacaatgagctggaaaagaatcgacgagctcatctgcgcctttgtttagaacgcttaaaagttctgattccactaggaccagactgcacccggcacacaacacttggtttgctcaacaaagccaaagcacacatcaagaaacttgaagaagctgaaagaaaaagccagcaccagctcgagaatttggaacgagaacagagatttttaaagtggcgactggaacagctgcagggtcctcaggagatggaacgaatacgaatggacagcattggatcaactatttcttcagatcgttctgattcagagcgagaggagattgaagtggatgttgaaagcacagagttctcccatggagaagtggacaatataagtaccaccagcatcagtgacattgatgaccacagcagcctgccgagtattgggagtgacgagggttactccagtgccagtgtcaaactttcattcacttcatagaacccagcatgacataacagtgcagggcaaaatattcactgggccaattcaatacaaacaatctcttaaattgggttcatgatgcagtctcctctttaaaacaaaacaaaacaaaacaaaactatacttgaacaaaagggtcagaggacctgtatttaagcaaatacttagcaaaaagtggggcagagctcccaaggagaacaaatattcagaatattcatattggaaaaatcacaatttttaatggcagcagaaaacttgtgtgaaattttcttgatttgagttgattgagaagaggacattggagatgccatcctctttctcttttctcgtttgctcatactacattgagtagacacatttaaggatggggttatgaacccttcctgagctttatggtcctaaaagcaaaataaaaactattcgaatgaaaagacaagaaaatcaggtattaatcttggatagctaataatgagctattaaaactcagcctgggacagtttatcatgaagcctgtggatgatcaatcctttattattattttttttttttgaaaaaagctcatttcatgctctgcaaaaggagagactcccatgaagccttttgaaagggatcatcatgcagctcaactttctgttggattccatgctaagcaagctaaccttatcctgcattgttagcactaggcacccagctgccacctctccatcctgctgcccttaggccacatgggagcagtccatgcatgacagcctctatcctacaaggcctatgagtatggattgggggggccaaaaggaaaaagctccatgtgcctctttgtctgcgtgggtcagaagagttgtgcacgcagattagcaggccaaggtctgagccacagcagcatttttatttcagattttgataactgtttatatgtgttgaaaaccaaaatgacatctttttaaagcttatccataaaaaaaaatagatgtcttttatagtggaaaaacacatggggaaaaaaatcatctattttgatgcagcatttgataatgataaaacacctcacacctcactctttatagtgcacaaaatgaatgaggtctgggctaggtagaaaaagggtcaatgctatttttgtttttagaatcattaccttttaccagcttttaaccatctgatatctatagtagacacactatcatagttaacatagttaagttcagcacttgtctcattttaatgtaaagatttgcttccattttcctacaggcagtctctctcttcctcacagtcccactgtgcaggtgctattgttactcttacgaatattttcagtaatgttattttcttctaagtgaaatttctagcctgcactttgatgtcatgtgttccctttgtctttcaaactccaaggttcccctgtggccctctcccttaccctgggaaggcctcttggagaccttacccctggctgtttggactttgtatactttaaataatttaactacccttaattacttaaaaaaaaaaaaaaaa

SEQ ID NO: 690 - DNA, 4892 bp, Homo sapiens
ctgcagaaatgcctcctcagctgcaaaacggcctgaacctctcggccaaagttgtccagggaagcctggacagcctgccccaggcagtgagggagtttctcgagaataacgctgagctgtgtcagcctgatcacatccacatctgtgacggctctgaggaggagaatgggcggcttctgggccagatggaggaagagggcatcctcaggcggctgaagaagtatgacaactggtaagctcggcccccgctgcctgtcccagcaccctgcaggcagggctcccctgcgtctcctgggagttggtggagaaaggtgaatgaaggccttcgggtagtttcagactcttgagaagatgaatgcaatggtcagaaccatacagacttgaattttgtgacattagtgggccagcccaagctttaaatgaggtgtgtgcacaaaagctctgccaactagattcctgattaaaaaaaaggcagcccctctcctacagaccagctcctagtggagtaaatgtccacctggccatgtcttagacggtctgtgtgttcacagtgatggactgttgttagcgtgctcagcactctgctaggcatggaaagccacggtactgaaggagatggttcgctgcccgtggtgcttggctgaaaggaagcctgtgatttttgcagctggttggctctcactgaccccagggatgtggccaggatcgaaagcaagacggttatcgtcacccaagagcaaagagacacagtgcccatccccaaaacaggcctcagccagctcggtcgctggatgtcagaggaggattttgagaaagcgttcaatgccaggttcccagggtgcatgaaaggtgagcggaacattgatttgattgggtaaaacagcagagagccttttcttatttacatctatcctaatggtaattcaaacaataatggaagctccaccacctcagatgtctttcagttccatacatgaagttggcaatgtattgaaaatgcacatccctcttctgcttttacagactgtcttatacaaacgtgaaaactagttccatgcatatgggttttaaatagcttggtggacccaattgcacatttatgaaaactctttaatttcagcaggctgttcactttccagtggcctcttctaacccagggcctggtgaccagcagggtgtggtggtgttagtggaacaccgtgaaaatgggtctacctgggaaaaaaatgctggtcgtgttcgaagtccaaggtcatttctcaccagtgcccacccatcgcaccctgtaggtcgcaccatgtacgtcatcccattcagcatggggccgctgggctcacctctgtcgaagatcggcatcgagctgacggattcgccctacgtggtggccagcatgcggatcatgacgcggatgggcacgcccgtcctggaagcactgggcgatggggagtttgtcaaatgcctccattctgtggggtgccctctgcctttacaaagtaagtgtattatttcagaatcaaaagtcaaaataaaaaagaaagctgaacgcaaaccccagtgagtgcctcggggacccccaaccagggccctggcgcactgacttgggaggggtccttgttcacagagcctttggtcaacaactggccctgcaacccggagctgacgctcatcgcccacctgcctgaccgcagagagatcatctcctttggcagtgggtacggcgggaactcgctgctcgggaagaagtgctttgctctcaggaatgccagccggctggccaaggaggaagggtggctggcagagcacatgctggtgagctgcaggaagccctgatgtgcagatgagaggcctggggggtggcagaaacaaacagcattacagttcccacccgtcagcacacctctctgagcgtgcaggttcccggacagatcgggaaaccccaccagtaatgattagtttacacatatacatcgcttttgaagggcccccaaaacaccaggggaccatagagatccttttggacttcatgattcttgggagtgttgttgcactgatacctgaaggaatagatcttgagggcctacattccaacctctgggctgaagtaccaacctcggggagaaggaaacaaagatcacaataaagaatcttgtccccaacagattctgggtataaccaaccctgagggtgagaagaagtacctggcggccgcatttcccagcgcctgcgggaagtccaacctggccatgatgaaccccagcctccccgggtggaaggttgagtgcgtcggggatgacattgcctggatgaagtttgacgcacaaggtgactcttttagacccaactcttggtaacgattggactcaagcgaatcgttggccttcgaaacatgtcacattctcctcagtccagtgtttggatttttaaactctgttagtccagagttggccaagccttagaatatggatcctgtaagaattcttcaacttaatattcaatctggattgaaactgggccatatgttgctgtttgtttacatacatacatttgtttaaatggtattggtggaaaattgtggaggaagcaagagtcgtaaacgtatcaaagttgcatatgatgcttggatgaaaagagataaatgcatattctagggagggaaaaaagatttgagaagttggcatagaaattagtccggcaatatataagagtatatgttctgctttgcctggcactcactactgcttctctggtttaaaactctccaggtcatttaagggccatcaacccagaaaatggctttttcggtgtcgctcctgggacttcagtgaagaccaaccccaatgccatcaagaccatccagaagaacacaatctttaccaatgtggccgagaccagcgacgggggcgtttactgggaaggcattgatgagccgctagcttcaggcgtcaccatcacgtcctggaagaataaggagtggagctcagaggatggtgtgtccctgccagaggcctgtgtgtgccgggctgcagggactgcctgttttgagccaggcactcacgagcctttctctgtcttataggggaaccttgtgcccaccccaactcgaggttctgcacccctgccagccagtgccccatcattgatgctgcctgggagtctccggaaggtgttcccattgaaggcattatctttggaggccgtagacctgctggtgaggctctccttcatttaggctgggaacatgggtgtgctgggtaccgaaggcatctgtgaaatctctccttttccatgaccttgtcagagggtgcccaggggcttcctttcttgagcttccttcccaaagatccagaataattggcaagttcaaatgtagaaccaacccttctggtcacctggaacctttctgaatccttgatctattgtagcttgatcaaattttactttttactttgtggcctcagtcatgtaactttgagttagcagttttctgcaatttagcttggtgaatgcaaaactagctcgattacaagttattgtcttgccgtgtctttccgtgttgtgaataacaccactggttgtggagtctgaatttcaaagcctctgatgaacatttctctttttttttcctgctaaaggtgtccctctagtctatgaagctctcagctggcaacatggagtctttgtgggggcggccatgagatcagaggccacagcggctgcagaacataaaggtaaatcaaagtcctgatctgaaaccacagagaagtgggattagagcactcttcgtcactcttatgtctctctccttttctgtgtctgtgtgtggggagagagagagagagaaagagagagaggagaacaaagcatgctaatgtcaacaatcaatggcgtcagtcttgcctaggagagcctcatttactaatgaactccctctctgtttaacaggcaaaatcatcatgcatgacccctttgccatgcggcccttctttggctacaacttcggcaaatacctggcccactggcttagcatggcccagcacccagcagccaaactgcccaagatcttccatgtcaactggttccggaaggacaaggaaggcaaattcctctggccaggctttggagagaactccagggtgctggagtggatgttcaaccggatcgatggaaaagccagcaccaagctcacgcccataggctacatccccaaggaggatgccctgaacctgaaaggcctggggcacatcaacatgatggagcttttcagcatctccaaggaattctgggagaaggaggtggaagacatcgagaagtatctggaggatcaagtcaatgccgacctcccctgtgaaatcgagagagagatccttgccttgaagcaaagaataagccagatgtaatcagggcctgagtgctttacctttaaaatcattccctttcccatccataaggtgcagtaggagcaagagagggcaagtgttcccaaattgacgccaccataataatcatcaccacaccgtgagcagatctgaaaggcacactttgatttttttaaggataagaaccacagaacactgggtagtagctaatgaaattgagaaggaaatcttagcatgcctccaaaaattcacatccaatgcatagtttgttcaaatttaaggttactcaggcattgatcttttcagtgttttttcactttagctatgtggattagctagaatgcacaccaaaaaaatacttgagctgtatatatatatgtgtgtgtgtgtgtgtgtgtgtgtgtgtgtgcatgtatgtgcacatgtgtctgtgtggatatttgtgtatgtgtatttgtatgtactgttattgaaaatatatttaatacctttggaaaaatcttgggcaagatgacc

SEQ ID NO: 691 - DNA, 7345 bp, Homo sapiens
gatctggaagggtttatgaaaaaagcaaagaattatattaaacacaaaaacatcaagaataatctatatttaaaccagttgcttatgcaggtacatgtatattcactttcattaatatattgagatgattaaacttccttggcttggagatatctgaaaagtgtaattaattattattattattttaagagacagggtctcactctatcactcaggttggagtgcaatggcacaatcatagctcactgtaacttgaatgcttgaacctcgaacttctgagctcaagccttccacctgcctcagcctcccaaagtgctgggatttccagcatgaaccacaatacccagcctgaaaagtttaaatgttaatcagtttccttatttttcctacgtattatccagtgagcatttattaaatatctataatgagcttaatcttctacaaatttgtgtatcttgtgtatttgtgtacctacaaattgaaacatcttgatatttaatagtacctacatatttataacctaattacgtctgagttaatcctcgtacgattttttccatcttgaacagctatgatttgaacatttccttttgccacacatatgcaaatcagtaataaacttccgtacagtactttagagcttagaaaagacctttcatgtaagagtcacataatatcctatgaggctggcaagaaaatacatgttactcttattacagatgagaaactgggactcaaagaggtgtgaagctagtgtcccaacagttacttagcatttactgggtaagcccaggctctaactgggtctcctgacagaagtccagctctctctctctgctgcctctttgtcagaactcctggcctgccagcgaatttaactgtctatgagtaaattctaacatctaaggttctaagtataaaatatattgaggtttacagtggtgagaaaaagcaagtgtctgcgtattacagacagctgataaatacgtattgagtcatcagaaagtgaaaatagatgtaggactattatgcaaagcataggagaggaagagcatatgcttaagaaaaaatggcattcctagagttaacaagcatgtttcaaagtatctattactgaaatctacacgattttcctttccacaataaagtccacaactgttgtcttaaataataactgcaggttttgccctccaagtcaaacttggagctccaactactggcagctcaccgtaagaatatattaattatttccaatttccttttaagaagtcgaatacaaagtagagagaatatctgcagcttggttgcaaagccgcttaaacatttcactggctagttctggtaatattatccgaaatcaactcattttgtggttgaggtaatctatttgtctttaccaatcaagtcgttttaaaaccttcaggagtagagatgatacttgaagaattaacaaataaaacttaatcaaggaaactgttaactcattctcccccctactttttgccagttattaaatgttctggtaaatcctaactcaacaagaatgactcatgaggaaatcctgactccttgaactcactgattctggtgcattacagctatgaaatctctatgtctgcagctttctctcccaccataaggaaatctgtgatttctattttggcaggagatgtgaccaaggactcctgaggaatgaccctatagacagacccagccacgtgcctagtagtgatcaaaaatgcaaacccaattaaagcactgtcttctgataaagtcactttctcttgttcaatccctaatgttcattctcaaagtgttccaagacgccccagcaagctgcagagcagatcccaccctgcccctgggcaatcaacgtttcaggttactccttccttaagttaagtggcagagagaaacgggcgagggtctccccgttgcctcagttcacagaccagggggtgtcgaatgagtcctacagcaggacagcaaacaagaaatgaggcgcggggtcagggaacgcgctcaaaaaaggaagaaaaatcccactcttcattcgaaatcaggccactgcactccggcctcgtggcgggcgacctcctcctgccagggaatcgccgctctggcctcgggctggggagcccgtcagggtgggtgagggagcgccggcgcccccgcccggccgccgccaacttcggctccctccctccgtcgcaaagccctcgagcccgcccggccgccacgcttcagcaaaaggtcgtgcgcagcggcccacactgaagactctccatctgctcccacacctgccccagctggccgctgctatgtggcccgagtgcgcaagaagccggggccgcagacgtcagcagcgccccggcttcgagacccttcggcagcagccgtgactgccgccggcgggcgctgacccatccccgtgccagtctgcagccgaccaatccgcgtcctcttgaggcggggccggagccgcgaggccccgcccccaagccgaggcctcataaatgctgcgacgcacgcccagccgcaaacagccggggctccagcgggagaacgataatgcaaagtgctatgttcttggctgttcaacacgactgcagacccatggacaagagcgcaggcagtggccacaagagcgaggagaagcgagaaaagatgaaacggaccctgtgagtatggctttcttccctctcccgccaccccctgccccacactgcaagctgcaaacgcggtactttcgggctcgcctttgacgttaggaaactagcctgagcctatgcagggaaaaaaaatcgaaaaggtcaatttgttaagtaaggttaaatctgggtgatgctcgggtacagtttaagaaccgagggagacagttgatatgagggcggtggttgatgcgctaagaaattgcgggttggctttttgtcctcctgcattcaaaatgacatcagaatcctgcggctgaagcgcgtccccagcattcatacgttgcatgatgagttctcatcagcttacacagctactggaaggtgatgctcttgctggttctgaatatactcgtttaaaatccatttttgttttttaattatagagcagatctcacccagtccgaatgtggaacaaataattgttatgcagcgtctgcttaaaagaagtgtcgtaggtggggaaggaagagcgcaggggaatcagtcacccacctctttgtacagtctctggcgtggtccagaacctcctgctctaaagagagaagcgtgggccggctccagacagttccatgtctgtccttttcattaaagtgcaaaacgtctcggaattgtaattaaccttgcaaacaaactgatgccctttgtgagccagaaatagtgtctgccttttgaactaaattcattaacaattctttaaaataccctagtgattataggtagccctgcccttagttgtaaaactagtagatacggtcagattaatggacgaaactgctcagtacatgaggtttaaatgttaggtggataagacttatttgaagagttcttgctttgccttatgcggtttgtctctagttactgggtgactttatttggtaaaaaagcgttcagctgcagtagcatattcaagtgttgctagttagtaattatctttttaattttttgttttagtttaaaagattggaagacccgtttgagctacttcttacaaaattcctctactcctgggaagcccaaaaccggcaaaaaaagcaaacagcaagctttcatcaagtaagttgagaatcctgtgcttgcaaatatcaatagttagctgctgaactgaaaaggggaactctgatgtgcgtaagctaacatacagaacctctcttgcaggccttctcctgaggaagcacagctgtggtcagaagcatttgacgagctgctagccagcaaatgtaagttaactcttgagcttgagccattgctaacatcgcaaaagcctggaaaggctgcgtccacctaacaaaagagcagcttgcctgagggggattagactgcagtcactataggataaagcctgtttttctttcctttatttcccagggtttaacaaataaatgcatatattctctccaggtggggaagaaaatcagcctaaacaaattaaagtggcagttgcttatagttaaggttgagtcagtttttccattgcatacaatgttttcaagaggcttagttcccagagaatttatggctcccctataaatatttactttgcattgacagcaaagtacttatatttttgcagcagagtgccaacataagccttttgcctactggtatcttagtctttaaaaagctaaattttgagaattacaggtttgagcgaaatctagaaaattcatttagaaataattaaaatgtgagggataggagaaacataaggaatcatttggtctctcagttcttcacattctgcatgctcttttctccccccttcagatggtcttgctgcattcagggcttttttaaagtcggaattctgtgaagaaaatattgaattctggctggcctgtgaagacttcaaaaaaaccaaatcaccccaaaagctgtcctcaaaagcaaggaaaatatatactgacttcatagaaaaggaagctccaaaagaggtaaggaaacaagttcctaatttcagcacaatctggacatctttagcacaaaagtgaaacagtaatcaaggacaaagcgggctaggaggggtaaaaagtccctccacgttgtagctttcagttatgttaaagttctcctgtgacttagctagtaaagctaatcacacataatttttattttttgttttcaaatactaaattttaatctttaactctgaataccaaataaacaacttttttgttttatttcagataaacatagattttcaaaccaaaactctgattgcccagaatatacaagaagctacaagtggctgctttacaactgcccagaaaagggtatacagcttgatggagaacaactcttatcctcgtttcttggagtcagaattctaccaggacttgtgtaaaaagccacaaatcaccacagagcctcatgctacatgaaatgtaaaagggagcccagaaatggaggacatttcattctttttcctgaggggaaggactgtgacctgccataaagactgaccttgaattcagcctgggtgttcaggaaacatcactcagaactattgattcaaagttgggtagtgaatcaggaagccagtaactgactaggagaagctggtatcagaacagcttccctcactgtgtacagaacgcaagaagggaataggtggtctgaacgtggtgtctcactctgaaaagcaggaatgtaagatgatgaaagagacaatgtaatactgttggtccaaaagcatttaaaatcaatagatctgggattatgtggccttaggtagctggttgtacatctttccctaaatcgatccatgttaccacatagtagttttagtttaggattcagtaacagtgaagtgtttactatgtgcaagggtattgaagttcttatgaccacagatcatcagtactgttgtctcatgtaatgctaaaactgaaatggtccgtgtttgcattgttaaaaatgatgtgtgaaatagaatgagtgctatggtgttgaaaactgcagtgtccgttatgagtgccaaaaatctgtcttgaaggcagctacactttgaagtggtctttgaatacttttaataaatttattttgataaataatattgaacacttggagtctagatgtgattttatttttgataactggaaatgtggcagataaagggaaaaacatctttatagtaaaagacatttcagtttttgtgcctgcccagtgagaattgacagtcttcagaactgagaaatgatagttgcagacagataattctttttttaaaacctataagcattatgcagacctaaggaagtcacatccttagaaccactgcatttatgctttctagtcttaaaaaaaaaatcaagcttctcaaatgaagaaagaagccaaataaggtcaatgtatgcctgtctttatttactttccattggttccaagctcccccacaagtaccagcatgggcttccaagatacatacctgaaattgttcccttccataatgtatcaatagaaaatctcagaattttcctgattttcatgccttcatttggccaacaaagaatctgttactttaggtaatgataaagtcaaaagaagtgcgctttcgtttcttagacttaaatccagaaatgtgcttttttccacttgagagaggaagcccttgaatctgttttcaaactggctaattaaaaagcaccccttcctcagcaggctgtttttttcaatgtccttgattatggtcttaataaaaaaggaggaggaaccctgattttagagttggaagaactgacgcaaagtaatcatttctcatagctttgtgaccttggtgtccccattgtcttctctgactcttcattttagaccttcctgcctttctggttttataaagtagtaagggactttagaaatcataaagcactaagaacattttttttctgatttgccagaagaaaaattgacctccagtagtttactgtttccattgtgattgcactaattttcaccttagccagagtttctggcaccaacagacacaagctctattagagagactgccttgtctactgtatcacagcagccagaataatacataataggtgctccataaatattgattgaataaatgaatccaaagagtcattgaaagcaaatatttctttggagaataaatgtgtcaggtctagcataatccttaatttggaaagattttgaccaacagaggaactcaggagtcatgccatatatcatcctatttgtcaccaagtcatttattttacttcaaacctctctacagcctactctctgttaccactctgatcaaagacaccacgatctgatgcctagattactgcaatagtctcatctcctctcacccactcttccccctctcccacaccaatgtgttcctgccttttaactctagggatcccttcaagacaaatctgatcttgtctccagttgcttataaacacttgacaggttttgcaaacaattaggataaagacagtatctctaatatggcctaacacctgcatggcttgacccctccttttgttccaaccttgactctaccacatttctcccagctctttctgctaagccacactgtcctactttcctagcaggtgccatcgccactggcctcacaggaccttagcacctaatagttcctctgcatggaattc

SEQ ID NO: 692 - DNA, 2464 bp, Homo sapiens
cggaaacttgggggagtgcacagaagaacttcgggagcgcacgcgggaccagggaccaggctgagactcggggcgccagtccgggcaggggcagcgggacgcggccggagatgccctgtatccaagcccaatatgggacaccagcaccgagtccgggaccccgtgaccacctggcaagcgaccccctgacccctgagttcatcaagcccaccatggacctggccagccccgaggcagcccccgctgcccccactgccctgcccagcttcagcacgttcatggacggctacacaggagagtttgacaccttcctctaccagctgccaggaacagtccagccatgctcctcagcctcctcctcggcctcctccacatcctcgtcctcagccacctcccctgcctctgcctccttcaagttcgaggacttccaggtgtacggctgctaccccggccccctgagcggcccagtggatgaggccctgtcctccagtggctctgactactatggcagcccctgctcggccccgtcgccctccacgcccagcttccagccgccccagctctctccctgggatggctccttcggccacttctcgcccagccagacttacgaaggcctgcgggcatggacagagcagctgcccaaagcctctgggcccccacagcctccagccttcttttccttcagtcctcccactggccccagccccagcctggcccagagccccctgaagttgttcccctcacaggccacccaccagctgggggagggagagagctattccatgcctacggccttcccaggtttggcacccacttctccacaccttgagggctcggggatactggatacacccgtgacctcaaccaaggcccggagcggggccccaggtccaagtgaaggccgctgtgctgtgtgtggggacaacgcttcatgccagcattatggtgtccgcacatgtgagggctgcaagggcttcttcaagcgcacagtgcagaaaaacgccaagtacatctgcctggctaacaaggactgccctgtggacaagaggcggcgaaaccgctgccagttctgccgcttccagaagtgcctggcggtgggcatggtgaaggaagttgtccgaacagacagcctgaaggggcggcggggccggctaccttcaaaacccaagcagcccccagatgcctcccctgccaatctcctcacttccctggtccttgcacacctggattcagggcccagcactgccaaactggactactccaagttccaggagctggtgctgccccactttgggaaggaagatgctggggatgtacagcagttctacgacctgctctccggttctctggaggtcatccgaaagtgggcggagaagatccctggctttgctgagctgtcaccggctgaccaggacctgttgctggagtcggccttcctggagctcttcatcctccgcctggcgtacaggtctaagccaggcgagggcaagctcatcttctgctcaggcctggtgctacaccggctgcagtgtgcccgtggcttcggggactggattgacagtatcctggccttctcaaggtccctgcacagcttgcttgtcgatgtccctgccttcgcctgcctctctgcccttgtcctcatcaccgaccggcatgggctgcaggagccgcggcgggtggaggagctgcagaaccgcatcgccagctgcctgaaggagcacgtggcagctgtggcgggcgagccccagccagccagctgcctgtcacgtctgttgggcaaactgcccgagctgcggaccctgtgcacccagggcctgcagcgcatcttctacctcaagctggaggacttggtgccccctccacccatcattgacaagatcttcatggacacgctgcccttctgacccctgcctgggaacacgtgtgcacatgcgcactctcatatgccaccccatgtgcctttagtccacggacccccagagcacccccaagcctgggcttgagctgcagaatgactccaccttctcacctgctccaggaggtttgcagggagctcaagcccttggggagggggatgccttcatgggggtgaccccacgatttgtcttatcccccccagcctggccccggcctttatgttttttgtaagataaaccgtttttaacacatagcgccgtgctgtaaataagcccagtgctgctgtaaatacaggaagaaagagcttgaggtgggagcggggctgggaggaagggatgggccccgccttcctgggcagcctttccagcctcctgcctggctctctcttcctaccctccttccacatgtacataaactgtcactctaggaagaagacaaatgacagattctgacatttatatttgtgtattttcctggatttatagtatgtgacttttctgattaatatatttaatatattgaataaaaaatagacatgtagttg

SEQ ID NO: 693 - DNA, 3639 bp, Homo sapiens
aagtcttctgaattgtttttctggacttccaaatctcaagtgataagaccagcagaagcagatataaagacctgaagatagtcttttctgtccaaagatggaaaacagtactactaccatttctcgggaggagcttgaagaactacaagaggcatttaataaaatagatattgacaatagtgggtatgtcagtgactatgaacttcaagacctgtttaaggaagcaagccttcctctgcctggctacaaggtgcgcgagattgtggagaaaattctatcagttgctgacagcaacaaagatggcaaaatcagttttgaagagtttgtgtcactaatgcaagaattaaaaagcaaagatatcagcaaaacattccgaaaaataattaacaagagggaagggattactgctattggaggaacttcaactatttccagtgagggcacacagcattcttattcagaggaagaaaaagtggcttttgttaactggataaacaaagccctggagaatgaccctgactgtaagcatcttatacccatgaatcccaatgatgatagtcttttcaagtcacttgcagatggcatccttctttgcaaaatgatcaacttatctgaaccagatacaattgatgaaagagccatcaataagaaaaagctcacgccattcactatttctgaaaatttaaacctagctctgaattctgcctcagccattggttgtacagtggtcaacattggtgcatcagatctcaaagaaggaaaacctcacttggtcttgggacttctctggcagatcatcaaagttggcctttttgctgatattgagatttccaggaatgaagctctgattgcattgttaaatgaaggtgaggaactagaggagctgatgaagctttctcccgaggaattactgctgcgatgggtgaactaccatctgaccaatgcaggatggcataccatcagcaacttcagccaagacattaaggactcgagagcctattttcatctgcttaatcagattgcccctaaaggtggggaagatggacctgccattgccattgacctttcaggaattaatgagacaaatgacctgaagcgtgctggactcatgcttcaagaagcagataaactgggctgcaaacagtttgttactcctgcagatgtggtttcaggcaatcctaaacttaatttagcttttgtagctaatttgtttaacacatacccgtgcctgcacaagccgaataataatgacatcgatatgaatttactggaaggagagagcaaggaagagagaacatttcggaactggatgaattccttgggagtcaacccatacattaatcatttgtacagtgaccttgcagatgctttagtgatctttcagctctatgagatgatccgagtgccagtcaactggagccatgtcaacaaacctccttatcctgcccttggagggaacatgaagaagattgaaaactgtaactatgcagtggaacttgggaagaacaaggccaaattctccttggttggcattgctgggcaggacctaaatgaaaggaattcaacacttaccctggcattggtatggcagctgatgagaaggtacacattgaatgtgttatcggatcttggagagggtgaaaaagtaaatgatgaaattataattaaatgggtcaatcagactcttaaaagtgcaaacaaaaagacttctatttccagcttcaaggataaatctataagcacaagtttacctgtcctagatttaatagatgccattgcgccaaatgcagttcgtcaagaaatgatcaggagagaaaacttatctgatgaggacaagctgaacaatgctaaatacgccatttcagttgctcgaaagatcggtgcccggatatatgcattacctgatgacctcgtagaagtgaaaccaaagatggttatgacggtgtttgcatgcttaatgggaaaaggactgaacagaataaaataatcatttcatatgattttctgccacattaaacatattgtatgcctcacagtttacaggattctgaaatgtagtgggtgtaaaaccagagattatttgtatgctcaaaatagttatatattcattaatgaattcaatatcctgttcatactagttagagctggtcagcctttttgggtaacacagttaatttaccaactgatacagataatagaatatattcataatcaagctgatacttcatgattaaattatttttgttgcttaaaagtcgtattagacaagactaaatcattcttttttatggttcaaaaaagatgaatacaaacgtttttgcaggttctgctgtgaaatgtggtttgatttttttggtgtgttaattttgatcataaatgcattcatactcataatccagtttaatccttttatttgcttcctccaactatttaaagtggtccaaaaacacttttctgtaagtttctatactgtctaaaaccttatggtgaccagaattgtttattaatatcaaacttttttatatatgagaactaattcttgaataaaccccaaagttcactctcttgtttaagtagcagcagctttttacttaaaatttaattttaactacattgatactttacacatcctagtttggtaacacagctttaactatgtcatgcaacatatatatgttggtaggatgttattagagagatatgtgtgcatatatatttttttgcacctgaatcacccagcttttcataagtggtatgtttaattggtcattcagccaaccatcagtattttccccccacgacatgtgtaacacttttcagtctgtggatatctgatacattaagatttctttttataagtattcattttgaatgtgcatatagtcatttgaccccttccaaatacttgtagccaaacattggctagaacatcccaagatatgctgacactgtcctgttagcttcatattatacttgctagtttaggtctctatagaagccctatataatttagaatatgcccactgaatatctttaatagaaagtaacataaagctagtattcaatgtagagtattttcatatgtttttcacagcccgttacaaattggcaatgtttggttaatgtttgtattacttggaaatcgctacagcttggactatttttttctaaatttttagcattagtccatttctgctgctaacaattgaatccagaaatctactttctccatcttccactgttagtgccagtgagcaatactgttgtgcaacaaaaatgtcactttatctcagtgtgaatgagtagtctaaattccctttctaccattgatttaaatatatatattggtaagagagactgcccatgtgtttagaatagaattttttaaatgaaatgatcaacaggtggaatttgaaatatattcttctacaaaagagatttctttcccttttatattttgatgattgttttcttaagattaagatatgttcttgctcttttataagattatttaaattatgtttccctctgattttttttcaccattgtatttactaagttattggatttacatgaaatctggcactttagggtgttctttttctcacagagtatatttaataaaaatgctgtgtatat

SEQ ID NO: 694 - DNA, 3220 bp, Homo sapiens
gagctgtccccggtgccgccgacccgggccgtgccgtgtgcccgtggctccagccgctgccgcctcgatctcctcgtctcccgctccgccctcccttttccctggatgaacttgcgtcctttctcttctccgccatggaattctgctccgtgcttttagccctcctgagccaaagaaaccccagacaacagatgcccatacgcagcgtatagcagtaactccccagctcggtttctgtgccgtagtttacagtatttaattttatataatatatattatttattatagcatttttgatacctcatattctgtttacacatcttgaaaggcgctcagtagttctcttactaaacaaccactactccagagaatggcaacgctgattaccagtactacagctgctaccgccgcttctggtcctttggtggactacctatggatgctcatcctgggcttcattattgcatttgtcttggcattctccgtgggagccaatgatgtagcaaattcttttggtacagctgtgggctcaggtgtagtgaccctgaagcaagcctgcatcctagctagcatctttgaaacagtgggctctgtcttactgggggccaaagtgagcgaaaccatccggaagggcttgattgacgtggagatgtacaactcgactcaagggctactgatggccggctcagtcagtgctatgtttggttctgctgtgtggcaactcgtggcttcgtttttgaagctccctatttctggaacccattgtattgttggtgcaactattggtttctccctcgtggcaaaggggcaggagggtgtcaagtggtctgaactgataaaaattgtgatgtcttggttcgtgtccccactgctttctggaattatgtctggaattttattcttcctggttcgtgcattcatcctccataaggcagatccagttcctaatggtttgcgagctttgccagttttctatgcctgcacagttggaataaacctcttttccatcatgtatactggagcaccgttgctgggctttgacaaacttcctctgtggggtaccatcctcatctcggtgggatgtgcagttttctgtgcccttatcgtctggttctttgtatgtcccaggatgaagagaaaaattgaacgagaaataaagtgtagtccttctgaaagccccttaatggaaaaaaagaatagcttgaaagaagaccatgaagaaacaaagttgtctgttggtgatattgaaaacaagcatcctgtttctgaggtagggcctgccactgtgcccctccaggctgtggtggaggagagaacagtctcattcaaacttggagatttggaggaagctccagagagagagaggcttcccagcgtggacttgaaagaggaaaccagcatagatagcaccgtgaatggtgcagtgcagttgcctaatgggaaccttgtccagttcagtcaagccgtcagcaaccaaataaactccagtggccactcccagtatcacaccgtgcataaggattccggcctgtacaaagagctactccataaattacatcttgccaaggtgggagattgcatgggagactccggtgacaaacccttaaggcgcaataatagctatacttcctataccatggcaatatgtggcatgcctctggattcattccgtgccaaagaaggtgaacagaagggcgaagaaatggagaagctgacatggcctaatgcagactccaagaagcgaattcgaatggacagttacaccagttactgcaatgctgtgtctgaccttcactcagcatctgagatagacatgagtgtcaaggcagcgatgggtctaggtgacagaaaaggaagtaatggctctctagaagaatggtatgaccaggataagcctgaagtctctctcctcttccagttcctgcagatccttacagcctgctttgggtcattcgcccatggtggcaatgacgtaagcaatgccattgggcctctggttgctttatatttggtttatgacacaggagatgtttcttcaaaagtggcaacaccaatatggcttctactctatggtggtgttggtatctgtgttggtctgtgggtttggggaagaagagttatccagaccatggggaaggatctgacaccgatcacaccctctagtggcttcagtattgaactggcatctgccctcactgtggtgattgcatcaaatattggccttcccatcagtacaacacattgtaaagtgggctctgttgtgtctgttggctggctccggtccaagaaggctgttgactggcgtctctttcgtaacatttttatggcctggtttgtcacagtccccatttctggagttatcagtgctgccatcatggcaatcttcagatatgtcatcctcagaatgtgaagctgtttgagattaaaatttgtgtcaatgtttgggaccatcttaggtattcctgctcccctgaagaatgattacagtgttaacagaagactgacaagagtctttttatttgggagcagaggagggaagtgttacttgtgctataactgcttttgtgctaaatatgaattgtctcaaaattagctgtgtaaaatagcccgggttccactggctcctgctgaggtcccctttccttctgggctgtgaattcctgtacatatttctctactttttgtatcaggcttcaattccattatgttttaatgttgtctctgaagatgacttgtgatttttttttcttttttttaaaccatgaagagccgtttgacagagcatgctctgcgttgttggtttcaccagcttctgccctcacatgcacagggatttaacaacaaaaatataactacaacttcccttgtagtctcttatataagtagagtccttggtactctgccctcctgtcagtagtggcaggatctattggcatattcgggagcttcttagagggatgaggttctttgaacacagtgaaaatttaaattagtaacttttttgcaagcagtttattgactgttattgctaagaagaagtaagaaagaaaaagcctgttggcaatcttggttatttctttaagatttctggcagtgtgggatggatgaatgaagtggaatgtgaactttgggcaagttaaatgggacagccttccatgttcatttgtctacctcttaactgaataaaaaagcctacagtttttagaaaaaacccgaattc

SEQ ID NO: 695 - DNA, 15720 bp, Homo sapiens
caacccacaccgcccctgccagccaccatggggctgccactagcccgcctggcggctgtgtgcctggccctgtctttggcagggggctcggagctccagacagagggcagaacccgataccacggccgcaacgtctgcagcacctggggcaacttccactacaagaccttcgacggggacgtcttccgcttccccggcctctgcgactacaacttcgcctccgactgccgaggctcctacaaggaatttgctgtgcacctgaagcggggtccgggccaggctgaggcccccgccggggtggagtccatcctgctgaccatcaaggatgacaccatctacctcacccgccacctggctgtgcttaacggggccgtggtcagcaccccgcactacagccccgggctgctcattgagaagagcgatgcctacaccaaagtctactcccgcgccggcctcaccctcatgtggaaccgggaggatgcactcatgctggagctggacactaagttccggaaccacacctgtggcctctgcggggactacaacggcctgcagagctattcagaattcctctctgacggcgtgctcttcagtcccctggagtttgggaacatgcagaagatcaaccagcccgatgtggtgtgtgaggatcccgaggaggaggtggcccccgcatcctgctccgagcaccgcgccgagtgtgagaggctgctgaccgccgaggccttcgcggactgtcaggacctggtgccgctggagccgtatctgcgcgcctgccagcaggaccgctgccggtgcccgggcggtgacacctgcgtctgcagcaccgtggccgagttctcccgccagtgctcccacgccggcggccggcccgggaactggaggaccgccacgctctgccccaagacctgccccgggaacctggtgtacctggagagcggctcgccctgcatggacacctgctcacacctggaggtgagcagcctgtgcgaggagcaccgcatggacggctgtttctgcccagaaggcaccgtatatgacgacatcggggacagtggctgcgttcctgtgagccagtgccactgcaggctgcacggacacctgtacacaccgggccaggagatcaccaatgactgcgagcagtgtgtctgtaacgctggccgctgggtgtgcaaagacctgccctgccccggcacctgtgccctggaaggcggctcccacatcaccaccttcgatgggaagacgtacaccttccacggggactgctactatgtcctggccaagggtgaccacaacgattcctacgctctcctgggcgagctggccccctgtggctccacagacaagcagacctgcctgaagacggtggtgctgctggctgacaagaagaagaatgcggtggtcttcaagtccgatggcagtgtactgctcaaccagctgcaggtgaacctgccccacgtgaccgcgagcttctctgtcttccgcccgtcttcctaccacatcatggtgagcatggccattggcgtccggctgcaggtgcagctggccccagtcatgcaactctttgtgacactggaccaggcctcccaggggcaggtgcagggcctctgcgggaacttcaacggcctggaaggtgacgacttcaagacggccagcgggctggtggaggccacgggggccggctttgccaacacctggaaggcacagtcaacctgccatgacaagctggactggttggacgatccctgctccctgaacatcgagagcgccaactacgccgagcactggtgctccctcctgaagaagacagagaccccctttggcaggtgccactcggctgtggaccctgctgagtattacaagaggtgcaaatatgacacgtgtaactgtcagaacaatgaggactgcctgtgcgccgccctgtcctcctacgcgcgcgcctgcaccgccaagggcgtcatgctgtggggctggcgggagcatgtctgcaacaaggatgtgggctcctgccccaactcgcaggtcttcctgtacaacctgaccacctgccagcagacctgccgctccctctccgaggccgacagccactgtctcgagggctttgcgcctgtggacggctgcggctgccctgaccacaccttcctggacgagaagggccgctgcgtacccctggccaagtgctcctgttaccaccgcggtctctacctggaggcgggggatgtggtcgtcaggcaggaagaacgatgtgtgtgccgggatgggcggctgcactgtaggcagatccggctgatcggccagagctgcacggccccaaagatccacatggactgcagcaacctgactgcactggccacctcgaagccccgagccctcagctgccagacgctggccgccggctattaccacacagagtgtgtcagtggctgtgtgtgccccgacgggctgatggatgacggccggggtggctgcgtggtggagaaggaatgcccttgcgtccataacaacgacctgtattcttccggcgccaagatcaaggtggactgcaatacctgcacctgcaagagaggacgctgggtgtgcacccaggctgtgtgccatggcacctgctccatttacgggagtggccactacatcacctttgatgggaagtactacgactttgacggacactgctcctacgtggctgttcaggactactgcggccagaactcctcactgggctcattcagcatcatcaccgagaacgtcccctgtggcactacgggcgtcacctgctccaaggccatcaagatcttcatggggaggacggagctgaagttggaagacaagcaccgtgtggtgatccagcgtgatgagggtcaccacgtggcctacaccacgcgggaggtgggccagtacctggtggtggagtccagcacgggcatcatcgtcatctgggacaagaggaccaccgtgttcatcaagctggctccctcctacaagggcaccgtgtgtggcctgtgtgggaactttgaccaccgctccaacaacgacttcaccacgcgggaccacatggtggtgagcagcgagctggacttcgggaacagctggaaggaggcccccacctgcccagatgtgagcaccaaccccgagccctgcagcctgaacccgcaccgccgctcctgggccgagaagcagtgcagcatcctcaaaagcagcgtgttcagcatctgccacagcaaggtggaccccaagcccttctacgaggcctgtgtgcacgactcgtgctcctgtgacacgggtggggactgtgagtgcttctgctctgccgtggcctcctacgcccaggagtgtaccaaagagggggcctgcgtgttctggaggacgccggacctgtgccccatattctgcgactactacaaccctccgcatgagtgtgagtggcactatgagccatgtgggaaccggagcttcgagacctgcaggaccatcaacggcatccactccaacatctccgtgtcctacctggagggctgctacccccggtgccccaaggacaggcccatctatgaggaggatctgaagaagtgtgtcactgcagacaagtgtggctgctatgtcgaggacacccactacccacctggagcatcggttcccaccgaggagacctgcaagtcctgcgtgtgtaccaactcctcccaagtcgtctgcaggccggaggaaggaaagattcttaaccagacccaggatggcgccttctgctactgggagatctgtggccccaacgggacggtggagaagcacttcaacatctgttccattacgacacgcccgtccaccctgaccaccttcaccaccatcaccctccccaccacccccacctccttcaccactaccaccaccaccaccaccccgacctccagcacagttttatcaacaactccgaagctgtgctgcctctggtctgactggatcaatgaggaccaccccagcagtggcagcgacgacggtgaccgagaaccatttgatggggtctgcggggcccctgaggacatcgagtgcaggtcggtcaaggatccccacctcagcttggagcagcatggccagaaggtgcagtgtgatgtctctgttgggttcatttgcaagaatgaagaccagtttggaaatggaccatttggactgtgttacgactacaagatacgtgtcaattgttgctggcccatggataagtgtatcaccactcccagccctccaactaccactcccagccctccaccaaccacgacgaccacccttccaccaaccaccacccccagccctccaaccaccaccacaaccacccctccaccaaccaccacccccagccctccaataaccaccacgaccacccctctaccaaccaccactcccagccctccaataagcaccacaaccacccctccaccaaccaccactcccagccctccaaccaccactcccagccctccaaccaccactcccagccctccaacaaccaccacaaccacccctccaccaaccaccactcccagccctccaatgactacgcccatcactccaccagccagcactaccacccttccaccaaccaccactcccagccctccaacaaccaccacaaccacccctccaccaaccaccactcccagtcctccaacgactacgcccatcactccaccaaccagcactactacccttccaccaaccaccactcccagccctccaccaaccaccacaaccacccctccaccaaccaccactcccagccctccaacaaccaccactcccagtcctccaacaatcaccacaaccacccctccaccaaccaccactcccagccctccaacaacgaccacaaccacccctccaccaaccaccactcccagccctccaacgactacacccatcactccaccaaccagcactaccacccttccaccaaccaccactcccagccctccaccaaccaccacaaccacccctccaccaaccaccactcccagccctccaacaaccaccactcccagccctccaataaccaccacaaccacccctccaccaaccaccactcccagctctccaataaccaccactcccagccctccaacaaccaccatgaccaccccttcaccaaccaccacccccagctctccaataaccaccacaaccaccccttcctcaactaccactcccagccctccaccaaccaccatgaccaccccttcaccaaccaccactcccagccctccaacaaccaccatgaccacccttccaccaaccaccacttccagccctctaacaactactcctctacctccatcaataactcctcctacattttcaccattctcaacgacaacccctactaccccatgcgtgcctctctgcaattggactggctggctggattctggaaaacccaactttcacaaaccaggtggagacacagaattgattggagacgtctgtggaccaggctgggcagctaacatctcttgcagagccaccatgtatcctgatgttcccattggacagcttggacaaacagtggtgtgtgatgtctctgtggggctgatatgcaaaaatgaagaccaaaagccaggtggggtcatccctatggccttctgcctcaactacgagatcaacgttcagtgctgtgagtgtgtcacccaacccaccaccatgacaaccaccaccacagagaacccaactccgccaaccacgacacccatcaccaccaccactacggtgaccccaaccccaacacccaccggcacacagaccccaaccacgacacccatcaccaccaccactacggtgaccccaaccccaacacccaccggcacacagaccccaaccacgacacccatcaccaccaccactacggtgaccccaaccccaacacccaccggcacacagaccccaaccacgacacccatcaccaccaccactacggtgaccccaaccccaacacccaccggcacacagaccccaaccacgacacccatcaccaccaccactacggtgaccccaaccccaacacccaccggcacacagaccccaaccacgacacccatcaccaccaccactacggtgaccccaaccccaacacccaccggcacacagaccccaaccacgacacccatcaccaccaccactacggtgaccccaaccccaacacccaccggcacacagaccccaaccacgacacccatcaccaccaccactacggtgaccccaaccccaacacccaccggcacacagaccccaaccacgacacccatcaccaccaccactacggtgaccccaaccccaacacccaccggcacacagaccccaaccacgacacccatcaccaccaccactacggtgaccccaaccccaacacccaccggcacacagaccccaaccacgacacccatcaccaccaccactacggtgaccccaaccccaacacccaccggcacacagaccccaaccacgacacccatcaccaccaccactacggtgaccccaaccccaacacccaccggcacacagaccccaaccacgacacccatcaccaccaccactacggtgaccccaaccccaacacccaccggcacacagaccccaaccacgacacccatcaccaccaccactacggtgaccccaaccccaacacccaccggcacacagaccccaaccacgacacccatcaccaccaccactacggtgaccccaaccccaacacccaccggcacacagaccccaaccacgacacccatcaccaccaccactacggtgaccccaaccccaacacccaccggcacacagaccccaaccacgacacccatcaccaccaccactacggtgaccccaaccccaacacccaccggcacacagaccccaaccacgacacccatcaccaccaccactacggtgaccccaaccccaacacccaccggcacacagaccccaaccacgacacccatcaccaccaccactacggtgaccccaaccccaacacccaccggcacacagaccccaaccacgacacccatcaccaccaccactacggtgaccccaaccccaacacccaccggcacacagaccccaaccacgacacccatcaccaccaccactacggtgaccccaaccccaacacccaccggcacacagaccccaaccacgacacccatcaccaccaccactacggtgaccccaaccccaacacccaccggcacacagaccccaaccacgacacccatcaccaccaccactacggtgaccccaaccccaacacccaccggcacacagaccccaaccacgacacccatcaccaccaccactacggtgaccccaaccccaacacccaccggcacacagaccccaaccacgacacccatcaccaccaccactacggtgaccccaaccccaacacccaccggcacacagaccccaaccacgacacccatcaccaccaccactacggtgaccccaaccccaacacccaccggcacacagaccccaaccacgacacccatcaccaccaccactacggtgaccccaaccccaacacccaccggcacacagaccccaaccacgacacccatcaccaccaccactacggtgaccccaaccccaacacccaccggcacacagaccccaaccacgacacccatcaccaccaccactacggtgaccccaaccccaacacccaccggcacacagaccccaaccacgacacccatcaccaccaccactacggtgaccccaaccccaacacccaccggcacacagaccccaaccacgacacccatcaccaccaccactacggtgaccccaaccccaacacccaccggcacacagaccccaaccacgacacccatcaccaccaccactacggtgaccccaaccccaacacccaccggcacacagaccccaaccacgacacccatcaccaccaccactacggtgaccccaaccccaacacccaccggcacacagaccccaaccacgacacccatcaccaccaccactacggtgaccccaaccccaacacccaccggcacacagaccccaaccacgacacccatcaccaccaccactacggtgaccccaaccccaacacccaccggcacacagaccccaaccacgacacccatcaccaccaccactacggtgaccccaaccccaacacccaccggcacacagaccccaaccacgacacccatcaccaccaccactacggtgaccccaaccccaacacccaccggcacacagaccccaaccacgacacccatcaccaccaccactacggtgaccccaaccccaacacccaccggcacacagaccccaaccacgacacccatcaccaccaccactacggtgaccccaaccccaacacccaccggcacacagaccccaaccacgacacccatcaccaccaccactacggtgaccccaaccccaacacccaccggcacacagaccccaaccacgacacccatcaccaccaccactacggtgaccccaaccccaacacccaccggcacacagaccccaaccacgacacccatcaccaccaccactacggtgaccccaaccccaacacccaccggcacacagaccccaaccacgacacccatcaccaccaccactacggtgaccccaaccccaacacccaccggcacacagaccccaaccacgacacccatcaccaccaccactacggtgaccccaaccccaacacccaccggcacacagaccccaaccacgacacccatcaccaccaccactacggtgaccccaaccccaacacccaccggcacacagaccccaaccacgacacccatcaccaccaccactacggtgaccccaaccccaacacccaccggcacacagaccccaaccacgacacccatcaccaccaccactacggtgaccccaaccccaacacccaccggcacacagaccccaaccacgacacccatcaccaccaccactacggtgaccccaaccccaacacccaccggcacacagaccccaaccacgacacccatcaccaccaccactacggtgaccccaaccccaacacccaccggcacacagaccccaaccacgacacccatcaccaccaccactacggtgaccccaaccccaacacccaccggcacacagaccccaaccacgacacccatcaccaccaccactacggtgaccccaaccccaacacccaccggcacacagaccccaaccacgacacccatcaccaccaccactacggtgaccccaaccccaacacccaccggcacacagaccccaaccacgacacccatcaccaccaccactacggtgaccccaaccccaacacccaccggcacacagaccccaaccacgacacccatcaccaccaccactacggtgaccccaaccccaacacccaccggcacacagaccccaaccacgacacccatcaccaccaccactacggtgaccccaaccccaacacccaccggcacacagaccccaaccacgacacccatcaccaccaccactacggtgaccccaaccccaacacccaccggcacacagaccccaaccacgacacccatcaccaccaccactacggtgaccccaaccccaacacccaccggcacacagaccccaaccacgacacccatcaccaccaccactacggtgaccccaaccccaacacccaccggcacacagaccccaaccacgacacccatcaccaccaccactacggtgaccccaaccccaacacccaccggcacacagaccccaaccacgacacccatcaccaccaccactacggtgaccccaaccccaacacccaccggcacacagaccccaaccacgacacccatcaccaccaccactacggtgaccccaaccccaacacccaccggcacacagaccccaaccacgacacccatcaccaccaccactacggtgaccccaaccccaacacccaccggcacacagaccccaaccacgacacccatcaccaccaccactacggtgaccccaaccccaacacccaccggcacacagaccccaaccacgacacccatcaccaccaccactacggtgaccccaaccccaacacccaccggcacacagaccccaaccacgacacccatcaccaccaccactacggtgaccccaaccccaacacccaccggcacacagaccccaaccacgacacccatcaccaccaccactacggtgaccccaaccccaacacccaccggcacacagaccccaaccacgacacccatcaccaccaccactacggtgaccccaaccccaacacccaccggcacacagaccccaaccacgacacccatcaccaccaccactacggtgaccccaaccccaacacccaccggcacacagaccccaaccacgacacccatcaccaccaccactacggtgaccccaaccccaacacccaccggcacacagaccccaaccacgacacccatcaccaccaccactacggtgaccccaaccccaacacccaccggcacacagaccccaaccacgacacccatcaccaccaccactacggtgaccccaaccccaacacccaccggcacacagaccccaaccacgacacccatcaccaccaccactacggtgaccccaaccccaacacccaccggcacacagaccccaaccacgacacccatcaccaccaccactacggtgaccccaaccccaacacccaccggcacacagaccccaaccacgacacccatcaccaccaccactacggtgaccccaaccccaacacccaccggcacacagaccccaaccacgacacccatcaccaccaccactacggtgaccccaaccccaacacccaccggcacacagaccccaaccacgacacccatcaccaccaccactacggtgaccccaaccccaacacccaccggcacacagaccccaaccacgacacccatcaccaccaccactacggtgaccccaaccccaacacccaccggcacacagaccccaaccacgacacccatcaccaccaccactacggtgaccccaaccccaacacccaccggcacacagaccccaaccacgacacccatcaccaccaccactacggtgaccccaaccccaacacccaccggcacacagaccccaaccacgacacccatcaccaccaccactacggtgaccccaaccccaacacccaccggcacacagaccccaaccacgacacccatcaccaccaccactacggtgaccccaaccccaacacccaccggcacacagaccccaaccacgacacccatcaccaccaccactacggtgaccccaaccccaacacccaccggcacacagaccccaaccacgacacccatcaccaccaccactacggtgaccccaaccccaacacccaccggcacacagaccccaaccacgacacccatcaccaccaccactacggtgaccccaaccccaacacccaccggcacacagaccccaaccacgacacccatcaccaccaccactacggtgaccccaaccccaacacccaccggcacacagaccccaaccacgacacccatcaccaccaccactacggtgaccccaaccccaacacccaccggcacacagaccccaaccacgacacccatcaccaccaccactacggtgaccccaaccccaacacccaccggcacacagaccccaaccacgacacccatcaccaccaccactacggtgaccccaaccccaacacccaccggcacacagaccccaaccacgacacccatcaccaccaccactacggtgaccccaaccccaacacccaccggcacacagaccccaaccacgacacccatcaccaccaccactacggtgaccccaaccccaacacccaccggcacacagaccccaaccacgacacccatcaccaccaccactacggtgaccccaaccccaacacccaccggcacacagaccccaaccacgacacccatcaccaccaccactacggtgaccccaaccccaacacccaccggcacacagaccccaaccacgacacccatcaccaccaccactacggtgaccccaaccccaacacccaccggcacacagaccccaaccacgacacccatcaccaccaccactacggtgaccccaaccccaacacccaccggcacacagaccccaaccacgacacccatcaccaccaccactacggtgaccccaaccccaacacccaccggcacacagaccccaaccacgacacccatcaccaccaccactacggtgaccccaaccccaacacccaccggcacacagaccccaaccacgacacccatcaccaccaccactacggtgaccccaaccccaacacccaccggcacacagaccccaaccacgacacccatcaccaccaccactacggtgaccccaaccccaacacccaccggcacacagaccccaaccacgacacccatcaccaccaccactacggtgaccccaaccccaacacccaccggcacacagaccccaaccacgacacccatcaccaccaccactacggtgaccccaaccccaacacccaccggcacacagaccgggccccccacccacacaagcacagcaccgattgctgagttgaccacatccaatcctccgcctgagtcctcaacccctcagacctctcggtccacctcttcccctctcacggagtcaaccacccttctgagtaccctaccacctgccattgagatgaccagcacggccccaccctccacacccacggcacccacgaccacgagcggaggccacacactgtctccaccgcccagcaccaccacgtcccctccaggcacccccactcgcggtaccacgaccgggtcatcttcagcccccacccccagcactgtgcagacgaccaccaccagtgcctggaccccaacgccgaccccactctccacacccagcatcatcaggaccacaggcctgaggccctacccttcctctgtgcttatctgctgtgtcctgaacgacacctactacgcaccaggtgaggaggtgtacaacggcacatacggagacacctgttatttcgtcaactgctcactgagctgtacgttggagttctataactggtcctgcccatccacgccctccccaacacccacgccctccaagtcgacgcccacgccttccaagccatcgtccacgccctccaagccgacgcccggcaccaagccccccgagtgcccagactttgatcctcccagacaggagaacgagacttggtggctgtgcgactgcttcatggccacgtgcaagtacaacaacacggtggagatcgtgaaggtggagtgtgagccgccgcccatgcccacctgctccaacggcctccaacccgtgcgcgtcgaggaccccgacggctgctgctggcactgggagtgcgactgctactgcacgggctggggcgacccgcactatgtcaccttcgacggactctactacagctaccagggcaactgcacctacgtgctggtggaggagatcagcccctccgtggacaacttcggagtttacatcgacaactaccactgcgatcccaacgacaaggtgtcctgtccccgcaccctcatcgtgcgccacgagacccaggaggtgctgatcaagaccgtgcatatgatgcccatgcaggtgcaggtgcaggtgaacaggcaggcggtggcactgccctacaagaagtacgggctggaggtgtaccagtctggcatcaactacgtggtggacatccccgagctgggtgtcctcgtctcctacaatggcctgtccttctccgtcaggctgccctaccaccggtttggcaacaacaccaagggccagtgtggcacctgcaccaacaccacctccgacgactgcattctgcccagcggggagatcgtctccaactgtgaggctgcggctgaccagtggctggtgaacgacccctccaagccacactgcccccacagcagctccacgaccaagcgcccggccgtcactgtgcccgggggcggtaaaacgaccccacacaaggactgcaccccatctcccctctgccagctcatcaaggacagcctgtttgcccagtgccacgcactggtgcccccgcagcactactacgatgcctgcgtgttcgacagctgcttcatgccgggctcgagcctggagtgcgccagtctgcaggcctacgcagccctctgtgcccagcagaacatctgcctcgactggcggaaccacacgcatggggcctgcttggtggagtgcccatctcacagggagtaccaggcctgtggccctgcagaagagcccacgtgcaaatccagctcctcccagcagaacaacacagtcctggtggaaggctgcttctgtcctgagggcaccatgaactacgctcctggctttgatgtctgcgtgaagacctgcggctgtgtgggacctgacaatgtgcccagagagtttggggagcacttcgagttcgactgcaagaactgtgtctgcctggagggtggaagtggcatcatctgccaacccaagaggtgcagccagaagcccgttacccactgcgtggaagacggcacctacctcgccacggaggtcaaccctgccgacacctgctgcaacattaccgtctgcaagtgcaacaccagcctgtgcaaagagaagccctccgtgtgcccgctgggattcgaagtgaagagcaagatggtgcctggaaggtgctgtcccttctactggtgtgagtccaagggggtgtgtgttcacgggaatgctgagtaccagcccggttctccagtttattcctccaagtgccaggactgcgtgtgcacggacaaggtggacaacaacaccctgctcaacgtcatcgcctgcacccacgtgccctgcaacacctcctgcagccctggcttcgaactcatggaggcccccggggagtgctgtaagaagtgtgaacagacgcactgtatcatcaaacggcccgacaaccagcacgtcatcctgaagcccggggacttcaagagcgacccgaagaacaactgcacattcttcagctgcgtgaagatccacaaccagctcatctcgtccgtctccaacatcacctgccccaactttgatgccagcatttgcatcccgggctccatcacattcatgcccaatggatgctgcaagacctgcacccctcgcaatgagaccagggtgccctgctccaccgtccccgtcaccacggaggtttcgtacgccggctgcaccaagaccgtcctcatgaatcattgctccgggtcctgcgggacatttgtcatgtactcggccaaggcccaggccctggaccacagctgctcctgctgcaaagaggagaaaaccagccagcgtgaggtggtcctgagctgccccaatggcggctcgctgacacacacctacacccacatcgagagctgccagtgccaggacaccgtctgcgggctccccaccggcacctcccgccgggcccggcgctcccctaggcatctggggagcgggtgagcggggtgggcacagcccccttcactgccctcgacagctttacctcccccggaccctctgagcctcctaagctcggcttcctctcttcagatatttattgtctgagtctttgttcagtccttgctttccaataataaactcagggggacatgc

SEQ ID NO: 696 - DNA, 3457 bp, Homo sapiens
cctccacctcccgggttcaagcgattctcctgcctcagcctcccgagtagctgagactacaggcacgcgccaccacgcccagctaatttttgtatctttagtagagacgggctttcaccatgttggccaggatggtctcgatgtcttaacgtcgtgatccggccgcctcggcctcccaagtgctgggattacaggcgttagccactgcgcccggccccagccaggcagttttaatcgagcgctcacaaccactgagacgcagcgaagcacccaccataatatcccaggaggccgaccgccggttcagactttttcttttctttaatccccgtccaagggatccgccctcaccccccaccccagccaccccaattccctattccctccccttggacggcgccggggaaaacaagctgctcgagctttatttcttcggtgcaaccaactcagaatgaattcctccgcccctgcgtgctcagtgagtcggcaccctagcagtgaactgcatttaaaacctcaggaattgagcgaactctcccagtggctctcctcaccgggatccccttccacgcctcctccccgtgccgcgcctcagtccgcactgctcattggccgcgtgcctgccaatccgatgcacgtcggctagggcaaagaccgcgaaaaagcgcgtacacctggctctgggagcgcgcgcctaacgccagccagcagcaggaggcgcgcgaggcaccacggcctggcggccgagagtcagggaggaacctcatttacataacggccgcccctctgtctcctggcgggggccggagtcccgcccctcgtccaacttgaaatctgttgggtcacgggccagtcactccgacctaggcaagcctgtggtggagctggaagagtttgtgagggcggtcccgggagcggattgggtctgggagttcccagaggcggctataagaaccgggaactgggcgcggggagctgagttgctggtagtgcccgtggtgcttggttcgaggtggccgttagttgactccgcggagttcatctccctggttttcccgtcctaacgtcgctcgcctttcagtcaggatgtctgcccgtggcccggctatcggcatcgacctgggcaccacctattcgtgcgtcggggtcttccaacatggcaaggtggagatcatcgccaacgaccagggcaatcgcaccacccccagctacgtggccttcacggacaccgagcgcctcatcggcgacgccgccaagaaccaggtggccatgaaccccaccaacaccatcttcgacgccaagaggctgattggacggaaattcgaggatgccacagtgcagtcggatatgaaacactggccgttccgggtggtgagcgagggaggcaagcccaaagtgcaagtagagtacaagggggagaccaagaccttcttcccagaggagatatcctccatggtcctcacgaagatgaaggagatcgcggaagcctacctggggggcaaggtgcacagcgcggtcataacggtcccggcctatttcaacgactcgcagcgccaggccaccaaggacgcaggcaccatcacggggctcaatgtgctgcgcatcatcaacgagcccacggcggcggccatcgcctacggcctggacaagaagggctgcgcgggcggcgagaagaacgtgctcatctttgacctgggcggtggcactttcgacgtgtccatcctgaccatcgaggatggcatcttcgaggtgaagtccacggccggcgatacccacctgggcggtgaggacttcgacaaccgcatggtgagccacctggcggaggagttcaagcgcaagcacaagaaggacattgggcccaacaagcgcgccgtgaggcggctgcgcaccgcttgcgagcgcgccaagcgcaccctgagctcgtccacgcaggcgagcatcgagatcgactcgctctacgagggcgtggacttctatacgtccatcacgcgcgcccgcttcgaggagctcaatgccgacctctttcgcgggaccctggagccggtggagaaggcgctgcgcgacgccaagctggacaagggccagatccaggagatcgtgctggtgggcggctccactcgtatccccaagatccagaagctgctgcaggatttcttcaacggcaaggagctgaacaagagcatcaaccccgacgaggcggtggcctatggcgccgcggtgcaggcggccatcctcatcggcgacaaatcagagaatgtgcaggacctgctgctactcgacgtgaccccgttgtcgctgggcatcgagacagctggcggtgtcatgaccccactcatcaagaggaacaccacgatccccaccaagcagacgcagaccttcaccacctactcggacaaccagagcagcgtactggtgcaggtatacgagggcgaacgggccatgaccaaggacaataacctgctgggcaagttcgacctgaccgggattccccctgcgcctcgcggggtcccccaaatcgaggttaccttcgacattgacgccaatggcatccttaacgttaccgccgccgacaagagcaccggtaaggaaaacaaaatcaccatcaccaatgacaaaggtcgtctgagcaaggacgacattgaccggatggtgcaggaggcggagcggtacaaatcggaagatgaggcgaatcgcgaccgagtcgcggccaaaaacgccctggagtcctatacctacaacatcaagcagacggtggaagacgagaaactgaggggcaagattagcgagcaggacaaaaacaagatcctcgacaagtgtcaggaggtgatcaactggctcgaccgaaaccagatggcagagaaagatgagtatgaacacaagcagaaagagctcgaaagagtttgcaaccccatcatcagcaaactttaccaaggtggtcctggcggcggcagcggcggcggcggttcaggagcctccgggggacccaccatcgaagaagtggactaagcttgcactcaagtcagcgtaaacctctttgcctttctctctctctcttttttttttgtttgtttctttgaaatgtccttgtgccaagtacgagatctattgttggaagtctttggtatatgcaaatgaaaggagaggtgcaacaacttagtttaattataaaagttccaaagtttgttttttaaaaacattattcgaggtttctctttaatgcattttgcgtgtttgctgacttgagcatttttgattagttcgtgcatggagatttgtttgagatgagaaaccttaagtttgcacacctgttctgtagaagcttggaaacagtaaaatatataggagcttaaattgtttatttttatgtactactttaaaactaaactgaacattgcagtaatgttaaggacaggtatactttttgcaaacaaatgcataaatgcaaatgtaaagtaaa

SEQ ID NO: 697 - DNA, 3457 bp, Homo sapiens; identical to SEQ ID NO: 696

SEQ ID NO: 698 - DNA, 3775 bp, Homo sapiens
cattcataagactcagagctacggccacggcagggacacgcggaaccaagacttggaaacttgattgttgtggttcttcttgggggttatgaaatttcattaatcttttttttttccggggagaaagtttttggaaagattcttccagatatttcttcattttcttttggaggaccgacttactttttttggtcttctttattactcccctccccccgtgggacccgccggacgcgtggaggagaccgtagctgaagctgattctgtacagcgggacagcgctttctgcccctgggggagcaacccctccctcgcccctgggtcctacggagcctgcactttcaagaggtacagcggcatcctgtgggggcctgggcaccgcaggaagactgcacagaaactttgccattgttggaacgggacgttgctccttccccgagcttccccggacagcgtactttgaggactcgctcagctcaccggggactcccacggctcaccccggacttgcaccttacttccccaacccggccatagccttggcttcccggcgacctcagcgtggtcacaggggcccccctgtgcccagggaaatgtttcaggctttccccggagactacgactccggctcccggtgcagctcctcaccctctgccgagtctcaatatctgtcttcggtggactccttcggcagtccacccaccgccgcggcctcccaggagtgcgccggtctcggggaaatgcccggttccttcgtgcccacggtcaccgcgatcacaaccagccaggacctccagtggcttgtgcaacccaccctcatctcttccatggcccagtcccaggggcagccactggcctcccagcccccggtcgtcgacccctacgacatgccgggaaccagctactccacaccaggcatgagtggctacagcagtggcggagcgagtggcagtggtgggccttccaccagcggaactaccagtgggcctgggcctgcccgcccagcccgagcccggcctaggagaccccgagaggagacgctcaccccagaggaagaggagaagcgaagggtgcgccgggaacgaaataaactagcagcagctaaatgcaggaaccggcggagggagctgaccgaccgactccaggcggagacagatcagttggaggaagaaaaagcagagctggagtcggagatcgccgagctccaaaaggagaaggaacgtctggagtttgtgctggtggcccacaaaccgggctgcaagatcccctacgaagaggggcccgggccgggcccgctggcggaggtgagagatttgccgggctcagcaccggctaaggaagatggcttcagctggctgctgccgcccccgccaccaccgcccctgcccttccagaccagccaagacgcaccccccaacctgacggcttctctctttacacacagtgaagttcaagtcctcggcgaccccttccccgttgttaacccttcgtacacttcttcgtttgtcctcacctgcccggaggtctccgcgttcgccggcgcccaacgcaccagcggcagtgaccagccttccgatcccctgaactcgccctccctcctcgctcggtgaactctttagacacacaaaacaaacaaacacatgggggagagagacttggaagaggaggaggaggaggagaaggaggagagagaggggaagagacaaagtgggtgtgtggcctccctggctcctccgtctgaccctctgcggccactgcgccactgccatcggacaggaggattccttgtgttttgtcctgcctcttgtttctgtgccccggcgaggccggagagctggtgactttggggacagggggtgggaaggggatggacacccccagctgactgttggctctctgacgtcaacccaagctctggggatgggtggggaggggggcgggtgacgcccaccttcgggcagtcctgtgtgaggatgaagggacgggggtgggaggtaggctgtggggtgggctggagtcctctccagagaggctcaacaaggaaaaatgccactccctacccaatgtctcccacacccaccctttttttggggtgcccaggttggtttcccctgcactcccgaccttagcttattgatcccacatttccatggtgtgagatcctctttactctgggcagaagtgagcccccccttaaagggaattcgatgcccccctagaataatctcatccccccacccgacttcttttgaaatgtgaacgtccttccttgactgtctagccactccctcccagaaaaactggctctgattggaatttctggcctcctaaggctccccaccccgaaatcagcccccagccttgtttctgatgacagtgttatcccaagaccctgccccctgccagccgaccctcctggccttcctcgttgggccgctctgatttcaggcagcaggggctgctgtgatgccgtcctgctggagtgatttatactgtgaaatgagttggccagattgtggggtgcagctgggtggggcagcacacctctggggggataatgtccccactcccgaaagcctttcctcggtctcccttccgtccatcccccttcttcctcccctcaacagtgagttagactcaagggggtgacagaaccgagaagggggtgacagtcctccatccacgtggcctctctctctctcctcaggaccctcagccctggcctttttctttaaggtcccccgaccaatccccagcctaggacgccaacttctcccaccccttggcccctcacatcctctccaggaaggcagtgaggggctgtgacatttttccggagaagatttcagagctgaggctttggtacccccaaacccccaatatttttggactggcagactcaaggggctggaatctcatgattccatgcccgagtccgcccatccctgaccatggttttggctctcccaccccgccgttccctgcgcttcatctcatgaggatttctttatgaggcaaatttatattttttaatatcggggggtggaccacgccgccctccatccgtgctgcatgaaaaacattccacgtgccccttgtcgcgcgtctcccatcctgatcccagacccattccttagctatttatccctttcctggtttccgaaaggcaattatatctattatgtataagtaaatatattatatatggatgtgtgtgtgtgcgtgcgcgtgagtgtgtgagcgcttctgcagcctcggcctaggtcacgttggccctcaaagcgagccgttgaattggaaactgcttctagaaactctggctcagcctgtctcgggctgacccttttctgatcgtctcggcccctctgattgttcccgatggtctctctccctctgtcttttctcctccgcctgtgtccatctgaccgttttcacttgtctcctttctgactgtccctgccaatgctccagctgtcgtctgactctgggttcgttggggacatgagattttattttttgtgagtgagactgagggatcgtagatttttacaatctgtatctttgacaattctgggtgcgagtgtgagagtgtgagcagggcttgctcctgccaaccacaattcaatgaatccccgacccccctaccccatgctgtacttgtggttctctttttgtattttgcatctgaccccggggggctgggacagattggcaatgggccgtcccctctccccttggttctgcactgttgccaataaaaagctcttaaaaacgc

SEQ ID NO: 699 - DNA, 2518 bp, Homo sapiens
ccagcagtggctgcaccatgcacgtgaacggcaaagtggcgctggtgaccggcgcggctcagggcataggcagagcctttgcagaggcgctgctgcttaagggcgccaaggtagcgctggtggattggaatcttgaagcaggtgtacagtgtaaagctgccctgcatgagcaatttgaacctcagaagactctgttcatccagtgcgatgtggctgaccagcaacaactgagagacacttttagaaaagttgtagaccactttggaagactggacattttggtcaataatgctggagtgaataatgagaaaaactgggaaaaaactctgcaaattaatttggtttctgttatcagtggaacctatcttggtttggattacatgagtaagcaaaatggaggtgaaggcggcatcattatcaatatgtcatctttagcaggactcatgcccgttgcacagcagccggtttattgtgcttcaaagcatggcatagttggattcacacgctcagcagcgttggctgctaatcttatgaacagtggtgtgagactgaatgccatttgtccaggctttgttaacacagccatccttgaatcaattgaaaaagaagaaaacatgggacaatatatagaatataaggatcatatcaaggatatgattaaatactatggaattttggacccaccattgattgccaatggattgataacactcattgaagatgatgctttaaatggtgctattatgaagatcacaacttctaagggaattcattttcaagactatgatacaactccatttcaagcaaaaacccaatgaacagcttatgtgttagccatagctgaaaataagcacaaatagcttatattcagatcctatcttcatttgaatatagcttttaaatgaaatgttacagtttgaagttttccttcatgcacttggtgataaacgttttctaaatttttagttaagtatatggataaaaagttatgaactattaaaaatgtgatgtggaccaaaggctaggttgtaatcttgatagtctaaaaaatgatcaaaacaaatgattttcaaggaatattcaatattctgcctttcagaaagtgtatttatatctgtgcttcataaatattaatgttcttcagaacatcattttaaaggagatacttgaattgttatttaaatcaaaccagatgtaaaacactcacatacaagttcatactttaaaagaggaaagctacttaacaatgacaaatatttcacaataataatttttacttatataccatctttcaactgaacatttcagttcttccaagagcttcttagagtagtatattttgggggcagtcaaggaataaactacagtgtaaacatatcccagatgaaaactgctgtatggaaaaatgacagaaagtaactgattgacactgttgattcacagttcagcctcctatctgggaaagacatttctttcctctgctcactttaagaacttttaccgactccaaaaatctcaggaattaaacttttaacagttacagcaataaagaatagttagtactccaaaaatattatatttaagatgctcaacaagaaaaaaatgcaaatgtaatatttttttcaaattacttctttattgacttgtccaaatttcaaaagtgcctacccttcaataaaacttttttattctgatctccataaattacttagtcttctatgtatagctatcaaggaaataaaaccaattttgccacagccacaactgtaaatgtttttgtacccatgctgaaactcataacaacacagacataaaaatagctgtgaggttttgctttttttgttgtcagctatcttaagaatcattaaatacacctgctttgggtaaaactctttgcaagcagtaattaacactagtaacagtgaaagcacaagatttccaaatcagtcgttttctcaaaaaaatatcgtataagtgactcatcctgtctgctaactccagacctcccagcttgaagccaaatctttccatgtgagattgatatggatttcctagaagtactggaatgttgtcatatcttgccctattttaattctgctatagaaaacaattgccttcacttttaaggagtaatttgaatattaataactctggtctagattttcatataatgtattaaagacaaagtagtgaacatcaatgaacatctgatagagataaactgtaatcaggcataagcttgtttgtatgttctggcagtgactaatcagtaaatgatgtcggtttgcccagtatcacttatcttctgtatttttcctctgtcgtgtaaatagtataaccttttcatttatggacaattttttggactagtagccttcaatatacattctgctttgaattaattttttcaaatcaataaattatgtagacatttaaaatcaaatatcaagtagaattgaaaaatgtgagttacataagttaaaaacttactttaaatcttaccttctataggtagctc

SEQ ID NO: 700 - DNA, 489 bp, Homo sapiens
agagccgcaggtcagtcgtgaagagggagctctattgccaccatgagtttctccggcaagtaccaactgcagagccaggaaaactttgaagccttcatgaaggcaatcggtctgccggaagagctcatccagaaggggaaggatatcaagggggtgtcggaaatcgtgcagaatgggaagcacttcaagttcaccatcaccgctgggtccaaagtgatccaaaacgaattcacggtgggggaggaatgtgagctggagacaatgacaggggagaaagtcaagacagtggttcagttggaaggtgacaataaactggtgacagctttcaaaaacatcaagtctgtgaccgaactcaacggcgacataatcaccaataccatgacattgggtgacattgtcttcaagagaatcagcaagagaatttaaacaagtctgcatttcatattattttagtgtgtaaaattaatgtaataaagtgaactttgtttt

SEQ ID NO: 701 - DNA, 1763 bp, Homo sapiens
cccgggacggcagcaggtgggctgcacacggactctgggacaagtcgagctgaaaaccgcggagcaggggtggggtggagacgcccgcgacgccaaggctggggtcccggaacacgctgggaggagggtggaaggcaacctcggggaaactgggaaaggcggcctggacttcgggaacaccgcgtacctgcgggggcacagcccacccgagcgaacgggctccaaagggaaggtcccgcggtgcccaccggcagagctcagggggtggtgcgcccggcccttctgcggcgcacagcccagcccaggaacgcgggcggtgcggactcagcgggccgggtgcaggcgcggagctgggcctctgcgcccggcccgacctccgtctataaatagagcagccagttgcagggctccattctgctttccaactgcctgactgcttgttcgtctcactggtgtgagctccagcatcccctttgctcgaaatggaccccaactgctcttgcgccactggtaagggaagctctgcgccctggaatccccatttcccagccctattacagagggtctctgggtttcaggaagtcgcattttaagttctgagcgacggggactccagtacttcgttagatgctttcttcctgatcacgcccctgagagcattgccctcatccctgggcctctacgtcagagttaagaatactgaggctcaaggctgaactgctccacatcacccagttggtcatgggcctgctggctgggccccagtgctctgtccaggctctgagcaatcagtgtggttgggggtgctggaaacattgactcttcagagttcaggacagaaggttctggctcgcagtctcaatattcctgggttgtatgtgcacgtgggaccttcctggtgcggtaaaacaggagggtccttgccccttccccagcgttagtgagaggacatggggcttctgttcctctgtcctgagtgggaaaggagctctgagggctggccctgcacagaggagggggcactggagactcactgacccactgctgtaccttctgcatctcactcactgcccactgcgttttcctcttccttgtaggtggctcctgcacgtgcgccggctcctgcaagtgcaaagagtgcaaatgcacctcctgcaagaagagtgagtgcggggccatctccaggaatctggggctgtggctcaggttgggagggaactcaaggctggccctgagtgcatccttctggggaactgggctttctttgccctcattgcccgtgtcattccctctccaggctttctgccctaaattcagatggggcaggacagcatttttctcgtgggacacaaaccccaactgtaccccctatggtttcagaacagagctgtgccagacgaaaaaaagcatcctctgggtctgggttctgagctcgagccaggcttgctattagggcagggaggtgcccggtcaagtctactgccacctctcactctccccttcttccccaggctgctgttcctgctgccccgtgggctgtgccaagtgtgcccagggctgcgtctgcaaaggggcatcggagaagtgcagctgctgtgcctgatgtgggaacagctcttctcccagatgtaaatagaacaacctgcacaacctggatttttttaaaaatacaacactgagccatttgctgcatttctttttatactaaatatgtgactgacaataaaaacaattttgactttaatcttactccctgttcttct

SEQ ID NO: 702 - DNA, 1044 bp, Homo sapiens
tgctgctctcctcccgctccgtcctcctcgcctgccaccggtgcacccagtccgctcacccagcccagtccgtccggtcctcaccgcctgccggccggcccaccccccaccgcaggccatggacgccatcaagaagaagatgcagatgctgaagctggacaaggagaacgccatcgaccgcgccgagcaggccgaagccgacaagaagcaagctgaggaccgctgcaagcagctggaggaggagcagcaggccctccagaagaagctgaaggggacagaggatgaggtggaaaagtattctgaatccgtgaaggaggcccaggagaaactggagcaggccgagaagaaggccactgatgctgaggcagatgtggcctccctgaaccgccgcattcagctggttgaggaggagctggaccgggcccaggagcgcctggctacagccctgcagaagctggaggaggccgagaaggcggctgatgagagcgagagaggaatgaaggtcatcgaaaaccgggccatgaaggatgaggagaagatggaactgcaggagatgcagctgaaggaggccaagcacatcgctgaggattcagaccgcaaatatgaagaggtggccaggaagctggtgatcctggaaggagagctggagcgctcggaggagagggctgaggtggccgagagccgagccagacagctggaggaggaacttcgaaccatggaccaggccctcaagtccctgatggcctcagaggaggagtattccaccaaagaagataaatatgaagaggagatcaaactgttggaggagaagctgaaggaggctgagacccgagcagagtttgccgagaggtctgtggcaaagttggagaaaaccatcgatgacctagaagagaccttggccagtgccaaggaggagaacgtcgagattcaccagaccttggaccagaccctgctggaactcaacaacctgtgagggccagccccacccccagccaggctatggttgccaccccaacccaataaaactgatgttactagcctctc

SEQ ID NO: 703 - DNA, 1486 bp, Homo sapiens
gaattccaaatgcactcaagcagagaagaaatccacaagtactcaccagcctcctggtctgcagagaagacagaatcaatatgagcacagcaggaaaagtaatcaaatgcaaagcagctgtgctatgggagttaaagaaacccttttccattgaggaggtagaggttgcacctcctaaggctcatgaagttcgcattaagatggtggctgcaggaatctgtcgttcagatgagcatgtggttagtggcaacctggtgaccccccttcctgtgattttaggccatgaggcagccggcatcgtggaaagtgttggagaaggggtgactacagtcaaaccaggtgataaagtcatcccgctctttactcctcagtgtggaaaatgcagaatttgtaaaaacccagaaagcaactactgcttgaaaaatgatctaggcaatcctcgggggaccctgcaggatggcaccaggaggttcacctgcagcgggaagcccatccaccacttcgtcggcgtcagcaccttctcccagtacacagtggtggatgagaatgcagtggccaaaattgatgcagcctcgcccctggagaaagtctgcctcattggctgtggattttcgactggttatgggtctgcagtcaaagttgccaaggtcaccccagggtctacctgtgctgtgtttggcctgggaggggtcggcctatctgttgttatgggctgtaaagcagctggagcagccagaatcattgctgtggacatcaacaaggacaaatttgcaaaggctaaagagttgggggccactgaatgcatcaaccctcaagactacaagaaacccattcaggaagtgctaaaggaaatgactgatggaggtgtggatttttcgtttgaagtcatcggtcggcttgacaccatgatggcttccctgttatgttgtcatgaggcatgtggcacaagtgtcattgtaggggtacctcctgattcccagaacctctcaataaaccctatgctgctactgactggacgcacgtggaaaggagctatttttggaggctttaagagtaaagaatctgtcccgaaacttgtggctgactttatggctaagaagttttcactggatgcattaataacaaatattttaccttttgaaaaaataaatgaaggatttgacctgcttcgctctggaaagagtatccgtaccgtcctgacgttttgaaacaatacagatgccttcccttgtagcagttttcagcctcctctaccctacatgatctggagcaacagctaggaaatatcattaattctgctcttcagagatgttaaaaataaattacacgtgggagctttccaaagaaatggaaattgatgggaaattatttgtcaagcaaatgtttaaaatccaaatgagaactaaataaagtgttgaacatcaactggggaattgaagccaataaaccttccttcttaaccattcaaaaaaaaaaaaaggaattc

SEQ ID NO: 704 - DNA, 2088 bp, Homo sapiens
  misc_feature (1)..(2088): n=a,t,g or c
gtatactcattaccaaaaataacaatatctgcatttcattgttttaactttgttttctttcttttcttttagtgttcctctgaacaacagggagaatatctctgatcccacctcaccattgagaaccagatttgtgtaccatttgtctgacctgtaagatatatttttttccatagtaatatagatgtggaagttaatagcttttaattttaaccttgttagtaagaatgtttttaaaaatatgttggagtataaacatttacaaacataatctgaacttttgaatacattaattcctatgttaattattaggtatcataaattcataaaactttgtcacagataaaatttagctatacattttttctaaagaaaaaatcattggcattcatagaaaggccaatttctcttaatagttcaataagtgnatttgatcttataaaaaggcaggtgtttctttggaaatgacagactccaacatcaatttttttaaaaattctccctttcttgtcactataaataacttgtttagacagatatacagttgggaataagcctaacacagtagaaattgctgtatggtgtagataaaacaatcatattatcatatcattaattatattgcttactttcaactaatatatattaaagattggaaaatcccataagctattctgtattgtagagctgcttatgtctgaaaggagtcatcccttgctgtcatgtcagagctgcaagaactaattgattttggattgaaatgtgtagtcacattttgagacagcatttgaggggattgtctaatacatatatttgcttttcagctgtaaaaaatgtgatcctacagaagtggagctggataatcagatagttactgctacccagagcaatatctgtgatgaagacagtgctacagagacctgctacacttatgacagaaacaagtgctacacagctgtggtcccactcgtatatggtggtgagaccaaaatggtggaaacagccttaaccccagatgcctgctatcctgactaatttaagtcattgctgactgcatagctctttttcttgagaggctctccattttgattcagaaagttagcatatttattaccaatgaatttgaaaccagggcttttttttttttttgggtgatgtaaaaccaactccctgccaccaaaataattaaaatagtcacattgttatctttattaggtaatcacttcttaattatatgttcatactaagtatcaaaatcttccaattatcatgctcacctgaaagaggtatgctctcttaggaatacagtttctagcattaaacaaataaacaaggggagaaaataaaactcaaggagtgaaaatcaggaggtgtaataaaatgttcctcgcattcccccccgcttttttttttttttttgactttgccttggagagccagagcttccgcattttctttactattctttttaaaaaaagtttcactgtgtagagaacatatatgcataaacataggtcaattatatgtctccattagaaaaataataattggaaaacatgttctagaactagttacaaaaataatttaaggtgaaatctctaatatttataaaagtagcaaaataaatgcataattaaaatatatttggacataacagacttggaagcagatgatacagacttctttttttcataatcaggttagtgtaagaaattgccatttgaaacaatccattttgtaactgaaccttatgaaatatatgtatttcatggtacgtattctctagcacagtctgagcaattaaatagattcataagcatatacctgtgtgaaataaattgttggaaaaaagtttccttatgttaactttctttacgtaagttaacttgttattgatgaatggtttgtaagtatgatgtaatgaagcattaatcacagaactaatacatgtacatatttgaggtggctttgccattttatacccataattaaataaaagggcaaaatcccccctgataaataccatgtttatcatggcacataaaactttatggcagtttccaaggccaattgacatatatatttaaa

SEQ ID NO: 705 - DNA, 2088 bp, Homo sapiens; identical to SEQ ID NO: 704
  misc_feature (1)..(2088): n=a,t,g or c

SEQ ID NO: 706 - DNA, 1450 bp, Homo sapiens
gatgcacttgagcagggaagaaatccacaaggactcaccagtctcctggtctgcagagaagacagaatcaacatgagcacagcaggaaaagtaatcaaatgcaaagcagctgtgctatgggagttaaagaaacccttttccattgaggaggtggaggttgcacctcctaaggcccatgaagttcgtattaagatggtggctgtaggaatctgtggcacagatgaccacgtggttagtggtaccatggtgaccccacttcctgtgattttaggccatgaggcagccggcatcgtggagagtgttggagaaggggtgactacagtcaaaccaggtgataaagtcatcccactcgctattcctcagtgtggaaaatgcagaatttgtaaaaacccggagagcaactactgcttgaaaaacgatgtaagcaatcctcaggggaccctgcaggatggcaccagcaggttcacctgcaggaggaagcccatccaccacttccttggcatcagcaccttctcacagtacacagtggtggatgaaaatgcagtagccaaaattgatgcagcctcgcctctagagaaagtctgtctcattggctgtggattttcaactggttatgggtctgcagtcaatgttgccaaggtcaccccaggctctacctgtgctgtgtttggcctgggaggggtcggcctatctgctattatgggctgtaaagcagctggggcagccagaatcattgcggtggacatcaacaaggacaaatttgcaaaggccaaagagttgggtgccactgaatgcatcaaccctcaagactacaagaaacccatccaggaggtgctaaaggaaatgactgatggaggtgtggatttttcatttgaagtcatcggtcggcttgacaccatgatggcttccctgttatgttgtcatgaggcatgtggcacaagtgtcatcgtaggggtacctcctgattcccaaaacctctcaatgaaccctatgctgctactgactggacgtacctggaagggagctattcttggtggctttaaaagtaaagaatgtgtcccaaaacttgtggctgattttatggctaagaagttttcattggatgcattaataacccatgttttaccttttgaaaaaataaatgaaggatttgacctgcttcactctgggaaaagtatccgtaccattctgatgttttgagacaatacagatgttttcccttgtggcagtcttcagcctcctctaccctacatgatctggagcaacagctgggaaatatcattaattctgctcatcacagattttatcaataaattacatttgggggctttccaaagaaatggaaattgatgtaaaattatttttcaagcaaatgtttaaaatccaaatgagaactaaataaagtgttgaacatcagctggggaattgaagccaataaaccttccttctt

SEQ ID NO: 707 - DNA, 1360 bp, Homo sapiens
ccgccgccatgcccttctccaacagccacaacgcactgaagctgcgcttcccggccgaggacgagttccccgacctgagcgcccacaacaaccacatggccaaggtgctgacccccgagctgtacgcggagctgcgcgccaagagcacgccgagcggcttcacgctggacgacgtcatccagacaggcgtggacaacccgggccacccgtacatcatgaccgtgggctgcgtggcgggcggcgaggagtcctacgaagtgttcaaggatctcttcgaccccatcatcgaggaccggcacggcggctacaagcccagcgatgagcacaagaccgacctcaaccccgacaacctgcagggcggcgacgacctggaccccaactacgtgctgagctccggggtgcgcacgggccgcagcatccgtggcttctgcctccccccgcactgcagccgcggggagcgccgcgccatcgagaagctcgcggtggaagccctgtccagcctggacggcgacctggcgggccgatactacgcgctcaagagcatgacggaggcggagcagcagcagctcatcgacgaccacttcctcttcgacaagcccgtgtcgcccctgctgctggcctcgggcatggcccgcgactggcccgacgcccgcggtatctggcacaatgacaataagaccttcctggtgtgggtcaacgaggaggaccacctgcgggtcatctccatgcagaaggggggcaacatgaaggaggtgttcacccgcttctgcaccggcctcacccagattgaaactctcttcaagtctaaggactatgagttcatgtggaaccctcacctgggctacatcctcacctgcccatccaacctgggcaccgggctgcgggcaggtgtgcatatcaagctgcccaacctgggcaagcatgagaagttctcggaggtgcttaagcggctgcgacttcagaagcgaggcacaggcggtgtggacacggctgcggtgggcggggtcttcgacgtctccaacgctgaccgcctgggcttctcagaggtggagctggtgcagatggtggtggacggagtgaagctgctcatcgagatggagcagcggctggagcagggccaggccatcgacgacctcatgcctgcccagaaatgaagcccggcccacacccgacaccagccctcgtgcttcctaacttattgcctgggcagtgcccacatgcacccctgatgttgcccgtctggcgagcccttagccttgctgtagaaggactgtccgtcacccttggtagagtttatttttttgatggctaagatactgctgatgctgaaataaactagggttttggcctgcaaaaaaaa

SEQ ID NO: 708 - DNA, 1633 bp, Homo sapiens
cagaatctccggcagtttttgtacctcaagaagtaagtggaacacctttccctgtcatagttattttcatccagacatctggtggaagcatcagattccttacagatataagagaggcatcatttaaaaggtagaacaggatcgacaaacaaggatttatgtcaggatctctcagcctctgtgttaccgagggcatttctaacagtcttcttactacggcctccgccgaccgcgcgctcgccccgccgctcctgctgcagccccagggcccctcgccgccgccaccatggacgccatcaagaagaagatgcagatgctgaagctcgacaaggagaacgccttggatcgagctgagcaggcggaggccgacaagaaggcggcggaagacaggagcaagcagctggaagatgagctggtgtcactgcaaaagaaactcaagggcaccgaagatgaactggacaaatactctgaggctctcaaagatgcccaggagaagctggagctggcagagaaaaaggccaccgatgctgaagccgacgtagcttctctgaacagacgcatccagctggttgaggaagagttggatcgtgcccaggagcgtctggcaacagctttgcagaagctggaggaagctgagaaggcagcagatgagagtgagagaggcatgaaagtcattgagagtcgagcccaaaaagatgaagaaaaaatggaaattcaggagatccaactgaaagaggcaaagcacattgctgaagatgccgaccgcaaatatgaagaggtggcccgtaagctggtcatcattgagagcgacctggaacgtgcagaggagcgggctgagctctcagaaggccaagtccgacagctggaagaacaattaagaataatggatcagaccttgaaagcattaatggctgcagaggataagtactcgcagaaggaagacagatatgaggaagagatcaaggtcctttccgacaagctgaaggaggctgagactcgggctgagtttgcggagaggtcagtaactaaattggagaaaagcattgatgacttagaagagaaagtggctcatgccaaagaagaaaaccttagtatgcatcagatgctggatcagactttactggagttaaacaacatgtgaaaacctccttagctgcgaccacattctttcattttgttttgttttgttttgtttttaaacacctgcttaccccttaaatgcaatttatttacttttaccactgtcacagaaacatccacaagataccagctaggtcagggggtggggaaaacacatacaaaaagcaagcccatgtcagggcgatcctggttcaaatgtgccatttcccgggttgatgctgccacactttgtagagagtttagcaacacagtgtgcttagtcagcgtaggaatcctcactaaagcaggagaagttccattcaaagtgccaatgatagagtcaacaaggaaggttaatgttggaaacacaatcaggtgtggattggtgctactttgaacaaaaggtccccctgtggtcttttgttcaacattgtacaatgtagaactctgtccaacactaatttattttgtcttgagttttactacaagatgagactatggatcccgcatgcct

SEQ ID NO: 709 - DNA, 6378 bp, Homo sapiens
cccattactgttggagctacagggagagaaacaggaggagactgcaagagatcatttgggaaggccgtgggcacgctctttactccatgtgtgggacattcattgcggaataacatcggaggagaagtttcccagagctatggggacttcccatccggcgttcctggtcttaggctgtcttctcacagggctgagcctaatcctctgccagctttcattaccctctatccttccaaatgaaaatgaaaaggttgtgcagctgaattcatccttttctctgagatgctttggggagagtgaagtgagctggcagtaccccatgtctgaagaagagagctccgatgtggaaatcagaaatgaagaaaacaacagcggcctttttgtgacggtcttggaagtgagcagtgcctcggcggcccacacagggttgtacacttgctattacaaccacactcagacagaagagaatgagcttgaaggcaggcacatttacatctatgtgccagacccagatgtagcctttgtacctctaggaatgacggattatttagtcatcgtggaggatgatgattctgccattataccttgtcgcacaactgatcccgagactcctgtaaccttacacaacagtgagggggtggtacctgcctcctacgacagcagacagggctttaatgggaccttcactgtagggccctatatctgtgaggccaccgtcaaaggaaagaagttccagaccatcccatttaatgtttatgctttaaaagcaacatcagagctggatctagaaatggaagctcttaaaaccgtgtataagtcaggggaaacgattgtggtcacctgtgctgtttttaacaatgaggtggttgaccttcaatggacttaccctggagaagtgaaaggcaaaggcatcacaatgctggaagaaatcaaagtcccatccatcaaattggtgtacactttgacggtccccgaggccacggtgaaagacagtggagattacgaatgtgctgcccgccaggctaccagggaggtcaaagaaatgaagaaagtcactatttctgtccatgagaaaggtttcattgaaatcaaacccaccttcagccagttggaagctgtcaacctgcatgaagtcaaacattttgttgtagaggtgcgggcctacccacctcccaggatatcctggctgaaaaacaatctgactctgattgaaaatctcactgagatcaccactgatgtggaaaagattcaggaaataaggtatcgaagcaaattaaagctgatccgtgctaaggaagaagacagtggccattatactattgtagctcaaaatgaagatgctgtgaagagctatacttttgaactgttaactcaagttccttcatccattctggacttggtcgatgatcaccatggctcaactgggggacagacggtgaggtgcacagctgaaggcacgccgcttcctgatattgagtggatgatatgcaaagatattaagaaatgtaataatgaaacttcctggactattttggccaacaatgtctcaaacatcatcacggagatccactcccgagacaggagtaccgtggagggccgtgtgactttcgccaaagtggaggagaccatcgccgtgcgatgcctggctaagaatctccttggagctgagaaccgagagctgaagctggtggctcccaccctgcgttctgaactcacggtggctgctgcagtcctggtgctgttggtgattgtgatcatctcacttattgtcctggttgtcatttggaaacagaaaccgaggtatgaaattcgctggagggtcattgaatcaatcagcccggatggacatgaatatatttatgtggacccgatgcagctgccttatgactcaagatgggagtttccaagagatggactagtgcttggtcgggtcttggggtctggagcgtttgggaaggtggttgaaggaacagcctatggattaagccggtcccaacctgtcatgaaagttgcagtgaagatgctaaaacccacggccagatccagtgaaaaacaagctctcatgtctgaactgaagataatgactcacctggggccacatttgaacattgtaaacttgctgggagcctgcaccaagtcaggccccatttacatcatcacagagtattgcttctatggagatttggtcaactatttgcataagaatagggatagcttcctgagccaccacccagagaagccaaagaaagagctggatatctttggattgaaccctgctgatgaaagcacacggagctatgttattttatcttttgaaaacaatggtgactacatggacatgaagcaggctgatactacacagtatgtccccatgctagaaaggaaagaggtttctaaatattccgacatccagagatcactctatgatcgtccagcctcatataagaagaaatctatgttagactcagaagtcaaaaacctcctttcagatgataactcagaaggccttactttattggatttgttgagcttcacctatcaagttgcccgaggaatggagtttttggcttcaaaaaattgtgtccaccgtgatctggctgctcgcaacgtcctcctggcacaaggaaaaattgtgaagatctgtgactttggcctggccagagacatcatgcatgattcgaactatgtgtcgaaaggcagtacctttctgcccgtgaagtggatggctcctgagagcatctttgacaacctctacaccacactgagtgatgtctggtcttatggcattctgctctgggagatcttttcccttggtggcaccccttaccccggcatgatggtggattctactttctacaataagatcaagagtgggtaccggatggccaagcctgaccacgctaccagtgaagtctacgagatcatggtgaaatgctggaacagtgagccggagaagagaccctccttttaccacctgagtgagattgtggagaatctgctgcctggacaatataaaaagagttatgaaaaaattcacctggacttcctgaagagtgaccatcctgctgtggcacgcatgcgtgtggactcagacaatgcatacattggtgtcacctacaaaaacgaggaagacaagctgaaggactgggagggtggtctggatgagcagagactgagcgctgacagtggctacatcattcctctgcctgacattgaccctgtccctgaggaggaggacctgggcaagaggaacagacacagctcgcagacctctgaagagagtgccattgagacgggttccagcagttccaccttcatcaagagagaggacgagaccattgaagacatcgacatgatggacgacatcggcatagactcttcagacctggtggaagacagcttcctgtaactggcggattcgaggggttccttccacttctggggccacctctggatcccgttcagaaaaccactttattgcaatgcggaggttgagaggaggacttggttgatgtttaaagagaagttcccagccaagggcctcggggagcgttctaaatatgaatgaatgggatattttgaaatgaactttgtcagtgttgcctctcgcaatgcctcagtagcatctcagtggtgtgtgaagtttggagatagatggataagggaataataggccacagaaggtgaactttgtgcttcaaggacattggtgagagtccaacagacacaatttatactgcgacagaacttcagcattgtaattatgtaaataactctaaccaaggctgtgtttagattgtattaactatcttctttggacttctgaagagaccactcaatccatccatgtacttccctcttgaaacctgatgtcagctgctgttgaactttttaaagaagtgcatgaaaaaccatttttgaaccttaaaaggtactggtactatagcattttgctatcttttttagtgttaagagataaagaataataattaaccaaccttgtttaatagatttgggtcatttagaagcctgacaactcattttcatattgtaatctatgtttataatactactactgttatcagtaatgctaaatgtgtaataatgtaacatgatttccctccagagaaagcacaatttaaaacaatccttactaagtaggtgatgagtttgacagtttttgacatttatattaaataacatgtttctctataaagtatggtaatagctttagtgaattaaatttagttgagcatagagaacaaagtaaaagtagtgttgtccaggaagtcagaatttttaactgtactgaataggttccccaatccatcgtattaaaaaacaattaactgccctctgaaataatgggattagaaacaaacaaaactcttaagtcctaaaagttctcaatgtagaggcataaacctgtgctgaacataacttctcatgtatattacccaatggaaaatataatgatcagcaaaaagactggatttgcagaagttttttttttttttcttcatgcctgatgaaagctttggcaaccccaatatatgtattttttgaatctatgaacctgaaaagggtcagaaggatgcccagacatcagcctccttctttcaccccttaccccaaagagaaagagtttgaaactcgagaccataaagatattctttagtggaggctggatgtgcattagcctggatcctcagttctcaaatgtgtgtggcagccaggatgactagatcctgggtttccatccttgagattctgaagtatgaagtctgagggaaaccagagtctgtatttttctaaactccctggctgttctgatcggccagttttcggaaacactgacttaggtttcaggaagttgccatgggaaacaaataatttgaactttggaacagggttggaattcaaccacgcaggaagcctactatttaaatccttggcttcaggttagtgacatttaatgccatctagctagcaattgcgaccttaatttaactttccagtcttagctgaggctgagaaagctaaagtttggttttgacaggttttccaaaagtaaagatgctacttcccactgtatgggggagattgaactttccccgtctcccgtcttctgcctcccactccataccccgccaaggaaaggcatgtacaaaaattatgcaattcagtgttccaagtctctgtgtaaccagctcagtgttttggtggaaaaaacattttaagttttactgataatttgaggttagatgggaggatgaattgtcacatctatccacactgtcaaacaggttggtgtgggttcattggcattctttgcaatactgcttaattgctgataccatatgaatgaaacatgggctgtgattactgcaatcactgtgctatcggcagatgatgctttggaagatgcagaagcaataataaagtacttgactacctactggtgtaatctcaatgcaagccccaactttcttatccaactttttcatagtaagtgcgaagactgagccagattggccaattaaaaacgaaaacctgactaggttctgtagagccaattagacttgaaatacgtttgtgtttctagaatcacagctcaagcattctgtttatcgctcactctcccttgtacagccttattttgttggtgctttgcattttgatattgctgtgagccttgcatgacatcatgaggccggatgaaacttctcagtccagcagtttccagtcctaacaaatgctcccacctgaatttgtatatgactgcatttgtgggtgtgtgtgtgttttcagcaaattccagatttgtttccttttggcctcctgcaaagtctccagaagaaaatttgccaatctttcctactttctatttttatgatgacaatcaaagccggcctgagaaacactatttgtgactttttaaacgattagtgatgtccttaaaatgtggtctgccaatctgtacaaaatggtcctatttttgtgaagagggacataagataaaatgatgttatacatcaatatgtatatatgtatttctatatagacttggagaatactgccaaaacatttatgacaagctgtatcactgccttcgtttatatttttttaactgtgataatccccacaggcacattaactgttgcacttttgaatgtccaaaatttatattttagaaataataaaaagaaagatacttacatgttcccaaaacaatggtgtggtgaatgtgtgagaaaaactaacttgatagggtctaccaatacaaaatgtattacgaatgcccctgttcatgtttttgttttaaaacgtgtaaatgaagatctttatatttcaataaatgatatataatttaaagtt

SEQ ID NO: 710 - DNA, 1579 bp, Homo sapiens
atccttcgcgtactgacggaaacactggcggcacatattgaggccgtatttcaggatcagctgccggttcgaacacacgcgagaagagcaaagaagttaaaagagaagtgtctgtgtggctccttccacgtgggtgaaggactgtgccagctgagaggtggtagagcaggaagctgcctgagacctccatttatttggtgaaaaaccgccgcccttaagagagcaagtcgagggccgtgtaggagttggaggagagaaatgaaattttggaagagtcagcagaagatcgtcagtatttaaacacatcacatcatgcgtgagtacaagctagtggtccttggttcaggaggcgttgggaagtctgctctgacagttcagtttgttcagggaatttttgttgaaaaatatgacccaacgatagaagattcctacagaaagcaagttgaagtcgattgccaacagtgtatgctcgaaatcctggatactgcagggacagagcaatttacagcaatgagggatttgtatatgaagaacggccaaggttttgcactagtatattctattacagctcagtccacgtttaacgacttacaggacctgagggaacagattttacgggttaaggacacggaagatgttccaatgattttggttggcaataaatgtgacctggaagatgagcgagtagttggcaaagagcagggccagaatttagcaagacagtggtgtaactgtgcctttttagaatcttctgcaaagtcaaagatcaatgttaatgagatattttatgacctggtcagacagataaataggaaaacaccagtggaaaagaagaagcctaaaaagaaatcatgtctgctgctctaggcccatagtcagcagcagctctgagccagattacaggaatgaagaactgttgcctaattggaaagtgccagcattccagacttcaaaaataaaaaatctgaagaggcttctcctgttttatatattatgtgaagaatttagatcttatattggtttgcacaagttccctggagaaaaaaattgctctgtgtatatctcttggaaaataagacaatagtatttctcctttgcaatagcagttataacagatgtgaaaatatacttgactctaatatgattatacaaaagagcatggatgcatttcaaatgttagatattgctactataatcaaatgatttcatattgatctttttatcatgatcctacctatcaagcactaaaaagttgaaccattatactttatatctgtaatgatactgattatgaaatgtcccctgaaactcattgcagcagataacttttttgagtcattgacttcattttatatttaaaaaattatggaatatcatctgtcattatattctaattaaaattgtgcataatgctttggaaaaatgggtcttttataggaaaaaaactgggataactgatttctatggctttcaaagctaaaatatataatatactaaaccaactctaatattgcttcttgtgttttactgtcagattaaattacagcttttatggatgattaaattttagtacattttc

SEQ ID NO: 711 - DNA, 2035 bp, Homo sapiens
gaattccgggctccggggatgaggtcgcggccggcgggtcccgcgctgttgctgctgctgctcttcctcggagcggccgagtcggtgcgtcgggcccagcctccgcgccgctacaccccagactggccgagcctggattctcggccgctgccggcctggttcgacgaagccaagttcggggtgttcatccactggggcgtgttctcggtgcccgcctggggcagcgagtggttctggtggcactggcagggcgaggggcggccgcagtaccagcgcttcatgcgcgacaactacccgcccggcttcagctacgccgacttcggaccgcagttcactgcgcgcttcttccacccggaggagtgggccgacctcttccaggccgcgggcgccaagtatgtagttttgacgacaaagcatcacgaaggcttcacaaactggccgagtcctgtgtcttggaactggaactccaaagacgtggggcctcatcgggatttggttggtgaattgggaacagctctccggaagaggaacatccgctatggactataccactcactcttagagtggttccatccactctatctacttgataagaaaaatggcttcaaaacacagcattttgtcagtgcaaaaacaatgccagagctgtacgaccttgttaacagctataaacctgatctgatctggtctgatggggagtgggaatgtcctgatacttactggaactccacaaattttctttcatggctctacaatgacagccctgtcaaggatgaggtggtagtaaatgaccgatggggtcagaactcttcctgtcaccatggaggatactataactgtgaagataaattcaagccacagagcttgccagatcacaagtgggagatgtgcaccagcattgacaagttttcctggggctatcgtcgtgacatggcattgtctgatgttacagaagaatctgaaatcatttcggaactggttcagacagtaagtttgggaggcaactatcttctgaacattggaccaactaaagatggactgattgttcccatcttccaagaaaggcttcttgctgttgggaaatggctgagcatcaatggggaggctatctatgcctccaaaccatggcgggtgcaatgggaaaagaacacaacatctgtatggtatacctcaaagggatcggctgtttatgccatttttctgcactggccagaaaatggagtcttaaaccttgaatcccccataactacctcaactacaaagataacaatgctgggaattcaaggagatctgaagtggtccacagatccagataaaggtctcttcatctctctaccccagttgccaccctctgctgtccccgcagagtttgcttggactataaagctgacaggagtgaagtaatcatttgagtgcaagaagaaagaggcgctgctcactgttttcctgcttcagtttttctcttatagtaccatcactataatcaacgaacttctcttctccacccagagatggcttttccaacacattttaattaaaggaactgagtacattaccctgatgtctaaatggaccaaagatctgagatccattgtgattatatctgtatcaggtcagcagaagaaggaactgagcagttgaactctgagttcatcaattctaatatttggaaattatctacaatggaatcttccctctgttctctgataacctacttgcttactcaatgcctttaagccaagtcaccctgttgcctatgggaggaggtggaaggatttggcaagctcaaccacatgctatttagttagcatcagttgtcaccaacagtctttctgcaaagggcaggagagctttgggggaaaggaaaaggcttaccaggctgctatggtcaactcttcagaaattttcagagcaatctaaaagcgccaaaattcgctatgtttacagtgatactattaagaaaatgaatgtgattctgctctgtctttttaagtatgatcaaataaaaaatttgtacatcacaatcatttctacc

SEQ ID NO: 712 - DNA, 700 bp, Homo sapiens
ttctctctaggggagagtacggtttccatgaatatacagaggtcaaaacagtcacagtgaaaatctctcagaagaactcataaagaaaatacaagagtggagagaagctcttcaatagctaagcatctccttacagtcactaatatagtagattttaaagacaaaatttttcttttcttgattttttttaaacataagctaaatcatattagtattaatactacccatagaaaacttgacatgtagcttcttctgaaagaattatttgccttctgaaatgtgacccccaagtcctatcctaaataaaaaaagacaaattcggatgtatgatctctctagctttgtcatagttatgtgattttcctttgtagctacttttgcaggataataattttatagaaaaggaacagttgcatttagcttctttcccttagtgactcttgaagtacttaacatacacgttaactgcagagtaaattgctctgttcccagtagttataaagtccttggactgttttgaaaagtttcctaggatgtcatgtctgcttgtcaaaagaaataatccctgtaatatttagctgtaaactgaatataaagcttaataaaaacaaccttgcatgattcttgttacttttgaatttttttaagtacaagttttggtcacagtgatttcttcttgtcacttaaaaacagtgttaaa

SEQ ID NO: 713 - DNA, 952 bp, Homo sapiens
gcagtctgcagcatggcgtacccggggcatcctggcgccggcggcgggtactacccaggcgggtatggaggggctcccggagggcctgcgtttcccggacaaactcaggatccgctgtatggttactttgctgctgtagctggacaggatgggcagatagatgctgatgaattgcagagatgtctgacacagtctggcattgctggaggatacaaaccttttaacctggagacttgccggcttatggtttcaatgctggatagagatatgtctggcacaatgggtttcaatgaatttaaagaactctgggctgtactgaatggctggagacaacactttatcagttttgacactgacaggagtggaacagtagacccacaagaattgcagaaggccctgacaacaatgggatttaggttgagtccccaggctgtgaattcaattgcaaaacgatacagcaccaatggaaagatcaccttcgacgactacatcgcctgctgcgtcaaactgagggctcttacagacagctttcgaagacgggatactgctcagcaaggtgttgtgaatttcccatatgatgatttcattcaatgtgtcatgagtgtttaaatcaagaggaagctgcatgaatgtaatcaacattccaactggagctctcctttgcttgtcctctttgccttcggtaatatgtataaacttacatcacgactttctcttaacagctgttgtaaagtttattactttatgtacaactgaagttttgttttagttttgataataaattcttggaactttaataagatctagtctgttacaccatttagaactttcctcagccattatcagtcatgccttattttcttgctaaaactctatgtaaatttaagtatgcaaaatgtttaagtcacattatttatttttcattgtgagatactaaaaactgttatcagac

SEQ ID NO: 714 - DNA, 1081 bp, Homo sapiens; identical to SEQ ID NO: 155

SEQ ID NO: 715 - DNA, 1104 bp, Homo sapiens
ctctagagtcgagatccattgtgctctaaagtggatacagaaatctctgcaggcaagttgctccagagcatattgcaggacaagcctgtaacgaatagttaaattcacggcatctggattcctaatccttttccgaaatggcaggtgtgagtgcctgtataaaatattctatgtttaccttcaacttcttgttctggctatgtggtatcttgatcctagcattagcaatatgggtacgagtaagcaatgactctcaagcaatttttggttctgaagatgtaggctctagctcctacgttgctgtggacatattgattgctgtaggtgccatcatcatgattctgggcttcctgggatgctgcggtgctataaaagaaagtcgctgcatgcttctgttgtttttcataggcttgcttctgatcctgctcctgcaggtggcgacaggtatcctaggagctgttttcaaatctaagtctgatcgcattgtgaatgaaactctctatgaaaacacaaagcttttgagcgccacaggggaaagtgaaaaacaattccaggaagccataattgtgtttcaagaagagtttaaatgctgcggtttggtcaatggagctgctgattggggaaataattttcaacactatcctgaattatgtgcctgtctagataagcagagaccatgccaaagctataatggaaaacaagtttacaaagagacctgtatttctttcataaaagacttcttggcaaaaaatttgattatagttattggaatatcatttggactggcagttattgagatactgggtttggtgttttctatggtcctgtattgccagatcgggaacaaatgaatctgtggatgcatcaacctatcgtcagtcaaacccctttaaaatgttgctttggctttgtaaatttaaatatgtaagtgctatataagtcaggagcagctgtctttttaaaatgtctcggctagctagaccacagatatcttctagacatattgaacacatttaagatttgagggatataagggaaaatgatatgaatgtgtatttttactcaaaataaaagtaactgtttaaaaaaaaaaaaaaaaaaaaa

SEQ ID NO: 716 - DNA, 3196 bp, Homo sapiens
aagcttaggagctgaagaccctggttcaatcccgggcccagagatcatttattctatggctttaggtaagctatttattgatacttctgtgggcctcagtttcattattggtaaaaattatttcattattggtaaaattagacttaagtcctaatccttaagtcagaacagatccaattcttagagaaaaaggatatccagagagaactttctgcggtgtctgggacgcagcagtgccacacgaatggcagctgtgagtaatattcctcctctctggaaatgattcccgggagggactagggcaacgagagccactccaggtctgagaacatggagaacttgagatcagtgcttttggaagtgtggtcaacacagtttgtcaccaaagagataagggtctggcacccaaagataaatgaatgatgttacgaagcacactgtttaggtcagttggcgtatttttccagagcaaggcttctcaggctgggcgtggtggctcacaccagtaatcccagcactttttgggcagatgggttgagcccaggagttcgagaccagcctggacaacacagagaaaccccgtgtctacaaaaaatacaaaaattagctgggcatggtagcatgtgcctatagtcccagctactcaggaggctgaggttggaggacagcctgagcctgggaagtcaaggctgcagtgagccgagatctcaccactgtattccagcctaggcaacagagcaaaactctgtctcaaaaaaacaaaaacaaaaacaaaaaacccaaaagactttctggatgacggaagcagtgtctagattcacattctgaggcaaaacctttattttgtcgtggacaattccagtttgtggcccttccttagggaagcactgcttttgttcccgctgcatgtgctaacttccattcattcatggttctatccctttgtagccttcccttcacacttctcacttgcgtttcttccatctctgggcagactgttccaccaacaacccctcccaggctaagctgcggcgggagctcgacgaatccctccaggtcgctgagaggttgaccaggaaatacaacgagctgctaaagtcctaccagtggaagatgctcaacacctcctccttgctggagcagctgaacgagcagtttaactgggtgtcccggctggcaaacctcacgcaaggcgaagaccagtactatctgcgggtcaccacggtgagctgtgtcccggccacatgctgtcggtcggagcccgacgtgtgatcgagcaggggcatgtgtgcttttgactgagcatttatcacacggcagaaaatagaaaactttaggcgcccctgttgccttgaagcctcatcacccactcagggaaaatataaccctgctttacaaaggagcaaagtaagagaggttccacagcttggccaaggtgtgatagctagacagatgacttggacgggtatttgaaccatgcatgcctggctgccaagcctgtattttgttgttgttgtttttgttttggtgcacaaatctgtgaataaaccagaagcctctgttcttttctcaaagctacaaggctgccctctggcatgtaaaatggcttatgaattagtacatcactctctgccagtgataaaaacttctctctaggccagacatggtgctcatgcctgtaatcccagcactttgggaggcagaggcaagaggatgttgaggccaggaatttgagaccagcctgggcaacacagcaagattccctctctacaaaaaatacaaaaatcagtcaggtgtggtggcacacacttgtagtcccagctattcaggaggctgaggtgggaggattgcctgagccctgaagtggaggctgcagtgagctgtgatcacgccactgcactccagcctgggtgacagagtgagactctgtctcttaaaaaatatatatatataaaataataaaataaagtaaaaaatcaaataaaacttatttctagtactgggaactcttctttttcttttctttcttccctccaggccctctggattccttttctaccctactctgaccaagggctgcctaaagcaaatgtttggaaaccacttttattctttggggtgctccctgggctggtcatttgcagatgacatttgccccaacacatgagtgtctgtgaaccaggtccgttctgtccactgagctgtacttacgtctagatgtataagaagcatggggtcagctctctaggtttccttggaggagcaggaggacttccttatcagaagcctgacttctgttgcagagcgcatgcattttgaccacagtgtttcagctcttcccttttctcttgttccatttaggtggcttcccacacttctgactcggacgttccttccggtgtcactgaggtggtcgtgaagctctttgactctgatcccatcactgtgacggtccctgtagaagtctccaggaagaaccctaaatttatggagaccgtggcggagaaagcgctgcaggaataccgcaaaaagcaccggtaagcaggcgggcctttcctgcgcgtgcagggcccagtgagtctctgggagccacaaaaaaacaaacaaagtgcagactctatagcctggtgggaacgactccgcccggagccagagcccaagaacaaagccaggaagttacgggggaattttatttttcctttggaggatgttttactttggaggataactgttttttatttcagggaggagtgagatgtggatgttgcttttgcacctacgggggcatctgagtccagctccccccaagatgagctgcagccccccagagagagctctgcacgtcaccaagtaaccaggccccagcctccaggcccccaactccgcccagcctctccccgctctggatcctgcactctaacactcgactctgctgctcatgggaagaacagaattgctcctgcatgcaactaattcaataaaactgtcttgtgagctgatcgcttggagggtcctctttttatgttgagttgctgcttccggcatgccttcattttgctatggggggcaggcaggggggatggaaaataagtagaaacaaaaaagcagtggctaagatggtatagggactgtcataccagtgaagaataaaagggtgaagaataaaagggatatgatgacaaggttgatccgttga

SEQ ID NO: 717 - DNA, 1540 bp, Homo sapiens
gccctcggccccgggccggcccgccccgcctcggccgccgcctggcgagccgccgggtccccgctcggccggtggccgaggccggagggccgcggcgggcggcggccgaggcggctccggccagggccgggccgggggccggggggcggcggcgggcaggcggccgcgtcggccggggccgggacgatgactctggagtccatgatggcgtgttgcctgagcgatgaggtgaaggagtccaagcggatcaacgccgagatcgagaagcagctgcggcgggacaagcgcgacgcccggcgcgagctcaagctgctgctgctcggcacgggcgagagcgggaagagcacgttcatcaagcagatgcgcatcatccacggcgccggctactcggaggaggacaagcgcggcttcaccaagctcgtctaccagaacatcttcaccgccatgcaggccatgatccgggccatggagacgctcaagatcctctacaagtacgagcagaacaaggccaatgcgctcctgatccgggaggtggacgtggagaaggtgaccaccttcgagcatcagtacgtcagtgccatcaagaccctgtgggaggacccgggcatccaggaatgctacgaccgcaggcgcgagtaccagctctccgactctgccaagtactacctgaccgacgttgaccgcatcgccaccttgggctacctgcccacccagcaggacgtgctgcgggtccgcgtgcccaccaccggcatcatcgagtaccctttcgacctggagaacatcatcttccggatggtggatgtggggggccagcggtcggagcggaggaagtggatccactgctttgagaacgtgacatccatcatgtttctcgtcgccctcagcgaatacgaccaagtcctggtggagtcggacaacgagaaccggatggaggagagcaaagccctgttccggaccatcatcacctacccctggttccagaactcctccgtcatcctcttcctcaacaagaaggacctgctggaggacaagatcctgtactcgcacctggtggactacttccccgagttcgatggtccccagcgggagccccaggcggcgcgggagttcatcctgaagatgttcgtggacctgaaccccgacagcgacaagatcatctactcacacttcacgtgtgccaccgacacggagaacatccgcttcgtgttcgcggccgtgaaggacaccatcctgcagctcaacctcaaggagtacaacctggtctgagcgccccaggcccagggagacgggatggagacacggggcaggaccttccttccacggagcctgcgctgccgggcgggtggcgctgccgagtccgggccggggctctgccgcgggaggagattttttttttttcatatttttaacaaatggtttttatttcacagttatcaggggatgtacatctctccctccgtacacttcgcgcaccttctcaccttttgtcaacggcaaaggcagcctttttctggccttgacttatggctcgcttttttct

SEQ ID NO: 718 - DNA, 1581 bp, Homo sapiens
ataactaaattacattttcttggtcttttgactatgaaatagtttaccctagcaacatgaaaaacaagagacctaagctattagaagaaatgcagttctatgtatcttgtgtgtatagtttttccctgggtggttttcaacgaccagtgactccttagctggtttcctcagctgctagcacttgctctgggtacttgtcctcaacacgtccatctgcaacaatgtgtgcctaggaaataaactcaacttactactcacccaaccaaaatgtaattttttaaacgcagcacacactgggtggattccaaagtcatgattatgctttactatgcactctgtactattcagaccactactctcattcattactgcaattaactgcacacataactattttttattgctaattatacaccactgatttccactttaaaaaaacattagcatttgtctctaattaaatatttactgcttgtgttttacagacccgatatcaggttcttctttagactgggcttatgacctgggcatcaaacacacatttgcctttgagctccgagataaaggcaaatttggttttctccttccagaatcccggataaagccaacgtgcagagagaccatgctagctgtcaaatttattgccaagtatatcctcaagcatacttcctaaagaactgccctctgtttggaataagccaattaatccttttttgtgcctttcatcagaaagtcaatcttcagttatccccaaatgcagcttctatttcacctgaatccttctcttgctcatttaagtcccatgttactgctgtttgcttttacttactttcagtagcaccataacgaagtagctttaagtgaaaccttttaactacctttctttgctccaagtgaagtttggacccagcagaaagcattattttgaaaggtgatatacagtggggcacagaaaacaaatgaaaaccctcagtttctcacagattttcaccatgtggcttcatcaatttatgtgctaatacaataaaataaaatgcacttaatgctttaaaattcatctttttatgataaacaatattctctgtatttctctatagcattaataatcaatattaatgccattcattcagtctgttaataagaaataatatcttcaattttcaaaaacataatttgcctatctttttctgatagaagtagacattgtttatatcttcaaaaaagcaaaaggatgtcctagcaggaaataaagtggttcatatagagatgaatctcagtcctttaaataaccgatccagttctcatcagcataatgtacattaaattcaaaatagtttaatttaacctgccataatcagaagaaaccacctgctaaaacatctgtttgccggtacagacacagacaagacagtctggtcagctgtgacccctgccctcctaatggatagaaaggaaacctggaaacatactgtaagttgaggacggaaagtcatgttgaccaaaggcaatcagggtaacttgctgcatttgtaccatttatactcctattatttaagatagtattattggatagcttctccc

SEQ ID NO: 719 - DNA, 2287 bp, Homo sapiens
gtggggtaacagctactttggtgttaaacccaccccctcacctgccttttgtggtatagctggtgaccctaatcatcaggccattgcaacatagcatggaagatggtgcgaggtggcgtgtggtccctggccttctccctctactgccttgcaccataggccatgtcctcccagcagcaccagctgagtagacttcagaagtggcttgagcccttataccatggttatgtcaaagggagtgggccctggggtggagggtaccctcatcactggtggcagccattaactatttccttccctgcctagtcctggcataaggcctgctttcgatgtgccaagtgtggcaaaggccttgagtcaaccaccctggcagacaaggatggcgagatttactgcaaaggtgggtgttttcacttctaattgagggtcaggaggcccaagggggtaggggggctaagtagttttgcctttgctgaatgtaaactaattcctggccttgggatccaagatctgaacatctagtatgattccttcattgtacagatgaggaaacaagaccagagggggaaagcaacttggccagcatcatctggcaaattgaggcaggcatagggctagaccctggcttcctaactcccagtccaatgttcttacagcagatgatgcttctataattttggtggcaggggcaatgggtacagggtacaaccaagagcctcttcgctattttactattgagattggggtgctgtggaggtgagggggtaccagtggaccttccttccctagcagtctggctgggcactaggagtgggggatcttcagcaggagggtgggtggtgtggctgggggtggaggaagaacatgcccttatctctctcctctctctgcaggatgttatgctaaaaacttcgggcccaagggctttggttttgggcaaggagctggggccttggtccactctgagtgaggccaccatcacccaccacaccctgcccactcctgcgcttttcatcgccattccattcccagcagctttggagacctccaggattatttctctgtcagccctgccacatatcactaatgacttgaacttgggcatctggctccctttggtttgggggtctgcctgaggtcccaccccactaaagggctccccaggcctgggatctgacaccatcaccagtaggagacctcagtgttttgggtctaggtgagagcaggcccctctccccacacctcgccccacagagctctgttcttagcctcctgtgctgcgtgtccatcatcagctgaccaagacacctgaggacacatcttggcacccagaggagcagcagcaacaggctggagggagagggaagcaagaccaagatgaggaggggggaaggctgggttttttggatctcagagattctcctctgtgggaaagaggttgagcttcctggtgtccctcagagtaagcctgaggagtcccagcttagggagtcactattggaggcagagaggcatgcaggcggggtcctaggagcccctgcttctccaggcctcttgcctttgagtctttgtggaatggatagcctcccactaggactgggaggagaataacccaggtcttaaggaccccaaagtcaggatgttgtttgatcttctcaaacatctagttccctgcttgatgggaggatcctaatgaaatacctgaaacatatattggcatttatcaatggctcaaatcttcatttatctctggccttaaccctggctcctgaggctgcggccagcagagcccaggccagggctctgttcttgccacacctgcttgatcctcagatgtggagggaggtaggcactgcctcagtcttcatccaaacacctttccctttgccctgagacctcagaatcttccctttaacccaagaccctgcctcttccactccacccttctccagggacccttagatcacatcactccacccctgccaggccccaggttaggaatagtggtgggaggaaggggaaagggctgggcctcaccgctcccagcaactgaaaggacaacactatctggagccacccactgaaagggctgcaggcatgggctgtacccaagctgatttctcatctggtcaataaagctgtttagaccagaactctggtgtccaatcctgtgtctgtggagctgggagggaactcaatgggagcaatcaaattagcaggggctttgggaggccgaggcaggcggatcacctgaggtcaggagtttgagaccagcctggctaacatg

SEQ ID NO: 720 - DNA, 2320 bp, Homo sapiens
gggccggccgcccctccgccagccaagtccgccgctctgacccccggcagcaagtcgccaccatggtgaagatcgtgacagttaagacccaggcgtaccaggaccagaagccgggcacgagcgggctgcggaagcgggtgaaggtgttccagagcagcgccaactacgcggagaacttcatccagagtatcatctccaccgtggagccggcgcagcggcaggaggccacgctggtggtgggcggggacggccggttctacatgaaggaggccatccagctcatcgctcgcatcgctgccgccaacgggatcggtcgcttggttatcggacagaatggaatcctctccacccctgctgtatcctgcatcattagaaaaatcaaagccattggtgggatcattctgacagccagtcacaacccagggggccccaatggagattttggaatcaaattcaatatttctaatggaggtcctgctccagaagcaataactgataaaattttccaaatcagcaagacaattgaagaatatgcagtttgccctgacctgaaagtagaccttggtgttctgggaaagcagcagtttgacttggaaaataagttcaaacccttcacagtggaaattgtggattcggtagaagcttatgctacaatgctgagaagcatctttgatttcagtgcactgaaagaactactttctgggccaaaccgactgaagatctgtattgatgctatgcatggagttgtgggaccgtatgtaaagaagatcctctgtgaagaactcggtgcccctgcgaactcggcagttaactgcgttcctctggaggactttggaggccaccaccctgaccccaacctcacctatgcagctgacctggtggagaccatgaagtcaggagagcatgattttggggctgcctttgatggagatggggatcgaaacatgattctgggcaagcatgggttctttgtgaacccttcagactctgtggctgtcattgctgccaacatcttcagcattccgtatttccagcagactggggtccgcggctttgcacggagcatgcccacgagtggtgctctggaccgggtggctagtgctacaaagattgctttgtatgagaccccaactggctggaagttttttgggaatttgatggacgcgagcaaactgtccctttgtggggaggagagcttcgggaccggttctgaccacatccgtgagaaagatggactgtgggctgtccttgcctggctctccatcctagccacccgcaagcagagtgtggaggacattctcaaagatcattggcaaaagcatggccggaatttcttcaccaggtatgattacgaggaggtggaagctgagggcgcaaacaaaatgatgaaggacttggaggccctgatgtttgatcgctcctttgtggggaagcagttctcagcaaatgacaaagtttacactgtggagaaggccgataactttgaatacagcgacccagtggatggaagcatttcaagaaatcagggcttgcgcctcattttcacagatggttctcgaatcgtcttccgactgagcggcactgggagtgccggggccaccattcggctgtacatcgatagctatgagaaggacgttgccaagattaaccaggacccccaggtcatgttggccccccttatttccattgctctgaaagtgtcccagctgcaggagaggacgggacgcactgcacccactgtcatcacctaagaagacaggcctgatgtggtacgtccctccacccccggacccatccaagtcatctgattgaagagcatgacagaaacaaaatgtattcaccaagcattttaggatttgactttttcactaaccagttgacgagcagtgcatttacaaggcactgccaaacaagatgcccttgggagctgtgagggaaagaggacctgcgggcttagatcaatctcaattccttttcatgccctcctgcattgctgctgcgtgggtatttgtctccttagccatcaggtacagtttacactacaatgtaagctataggtggagcatcagcagtgagtgaggccattcttcatccttaggatgtggcaatgaaatgatggtgcaagttcctttctcttttgtgaatctttccccccatttcctgtttacatgtaacccaacaaaatgcaatttctagtgccttctgtccaatcagttctttcctctgagtgagacgtacttggctacagatttctgccttgttttgcgacattgtcccattcacacagatattttgggataataaaggaaaataagctaca

SEQ ID NO: 721 - DNA, 3610 bp, Homo sapiens
cctgcctgcccgcctgcttgctctctggctgtgctcctgcttaaagaaatcagtccttcctttccgacttagtcctcgggaagaagtttcagactacaaggtatcattggaacatttcaagatcatcaaatcaaattccacagggattggtgaccaaccagaaggctcagacatctgattgctgacctgtccagacatcatctggtctccctgaacctgaaatcacaccatggatgattttgagcgtcgcagagaacttagaaggcaaaagagggaggagatgcgactcgaagcagaaagaatcgcctaccagaggaatgacgatgatgaagaggaggcagcccgggaacgccgccgccgagcccgacaggaacggctgcggcagaagcaggaggaagaatccttgggacaggtgaccgaccaggtggaggtgaatgcccagaacagtgtgcctgacgaggaggccaagacaaccaccacaaacactcaagtggaaggggatgatgaggccgcattcctggagcgcctggctcggcgtgaggaaagacgccaaaaacgccttcaggaggctctggagcggcagaaggagttcgacccaacaataacagatgcaagtctgtcgctcccaagcagaagaatgcaaaatgacacagcagaaaatgaaactaccgagaaggaagaaaaaagtgaaagtcgccaagaaagatacgagatagaggaaacagaaacagtcaccaagtcctaccagaagaatgattggagggatgctgaagaaaacaagaaagaagacaaggaaaaggaggaggaggaagaggagaagccaaagcgagggagcattggagaaaatcaggtagaggtgatggtggaagagaaaacaactgaaagccaggaggaaacagtggtaatgtcattaaaaaatgggcagatcagttcagaagagcctaaacaagaggaggagagggaacaaggttcagatgagatttcccatcatgaaaagatggaagaggaagacaaggaaagagctgaggcagagagggcaaggttggaagcagaagaaagagaaagaattaaagccgagcaagacaaaaagatagcagatgaacgagcaagaattgaagcagaagaaaaagcagctgcccaagaaagagaaaggagagaggcagaagagagggaaaggatgagggaggaagagaaaagggcagcagaggagaggcagaggataaaggaggaagagaaaagggcagcagaggagaggcagaggataaaggaggaagagaaaagggcagcagaggagaggcagaggataaaagaggaagagaaaagggcagcagaggagaggcaaagggccagggcagaggaggaagagaaggctaaggtagaagagcagaaacgtaacaagcagctagaagagaaaaaacgtgccatgcaagagacaaagataaaaggggaaaaggtagaacagaaaatagaagggaaatgggtaaatgaaaagaaagcacaagaagataaacttcagacagctgtcctaaagaaacagggagaagagaagggaactaaagtgcaagctaaaagagaaaagctccaagaagacaagcctaccttcaaaaaagaagagatcaaagatgaaaagattaaaaaggacaaagaacccaaagaagaagttaagagcttcatggatcgaaagaagggatttacagaagttaagtcgcagaatggagaattcatgacccacaaacttaaacatactgagaatactttcagccgccctggagggagggccagcgtggacaccaaggaggctgagggcgccccccaggtggaagccggcaaaaggctggaggagcttcgtcgtcgtcgcggggagaccgagagcgaagagttcgagaagctcaaacagaagcagcaggaggcggctttggagctggaggaactcaagaaaaagagggaggagagaaggaaggtcctggaggaggaagagcagaggaggaagcaggaggaagccgatcgaaaactcagagaggaggaagagaagaggaggctaaaggaagagattgaaaggcgaagagcagaagctgctgagaaacgccagaagatgccagaagatggcttgtcagatgacaagaaaccattcaagtgtttcactcctaaaggttcatctctcaagatagaagagcgagcagaatttttgaataagtctgtgcagaaaagcagtggtgtcaaatcgacccatcaagcagcaatagtctccaagattgacagcagactggagcagtataccagtgcaattgagggaacaaaaagcgcaaaacctacaaagccggcagcctcggatcttcctgttcctgctgaaggtgtacgcaacatcaagagtatgtgggagaaagggaatgtgttttcatcccccactgcagcaggcacaccaaataaggaaactgctggcttgaaggtaggggtttctagccgcatcaatgaatggctaactaaaaccccagatggaaacaagtcacctgctcccaaaccttctgacttgagaccaggagacgtatccagcaagcggaacctctgggaaaagcaatctgtggataaggtcacttcccccactaaggtttgagacagttccagaaagaacccaagctcaagacgcaggacgagctcagttgtagagggctaattcgctctgttttgtatttatgttgatttactaaattgggttcattatcttttatttttcaatatcccagtaaacccatgtatattatcactatatttaataatcacagtctagagatgttcatggtaaaagtactgcctttgcacaggatcctgtttctaaagaaacccatgctgtgaaatagagacttttctactgatcatcataactctgtatctgagcagtgataccaaccacatctgaagtcaacagaagatccaagtttaaaattgctgcggaatgtgtgcagtatctagaaaaatgaaccgtagtttttgtttttttaaatacagaagtcatgttgtttctgcactttataataaagcatggaagaaattatcttagtaggcaattgtaacactttttgaaagtaacccatttcagatttgaaatactgcaataatggttgtctttaaaaaaaaaaagaatgtactgttaaggtattactttttttcatgctgatgattcatatctaaattacattattatgttagctgacagtggtactgattttttaggttggttgttttgtggatttctttagtagtgatagtagcctgaaccacattttagataactcaattatgtatgtatgtgcatacacatatacaaacacactaatggtagaatgcttttttatgtgctagactattatatttagtagtatgtcattgtaactagccaatatcacagcttttgaaaaattaaaaaatcatcatcactataatatttcatatttgccaacagaaacatggcagataggtatcaatatgttttcaatgcctgatgacctataagaagaaagtattgaaaagaagagagattagaactgttagaaggagttgaaattttctaaaagacatagtatttagtttataattaaatgcattcttgaagtcc

SEQ ID NO: 722 - DNA, 1071 bp, Homo sapiens; identical to SEQ ID NO: 170

SEQ ID NO: 723 - DNA, 1083 bp, Homo sapiens
atcctgtctgtccgaacccagacacaagtcttcactccttcctgcgagccctgaggaagccttctttccccagacatggccaacaagggtccttcctatggcatgagccgcgaagtgcagtccaaaatcgagaagaagtatgacgaggagctggaggagcggctggtggagtggatcatagtgcagtgtggccctgatgtgggccgcccagaccgtgggcccttgggcttccaggtgtggctgaagaatggcgtgattctgagcaagctggtgaacagcctgtaccctgatggctccaagccggtgaaggtgcccgagaacccaccctccatggtcttcaagcagatggagcaggtggctcagttcctgaaggcggctgaggactctggggtcatcaagactgacatgttccagactgttgacctctttgaaggcaaagacatggcagcagtgcagaggaccctgatggctttgggcagcttggcagtgaccaagaatgatgggcactaccgtggagatcccaactggtttatgaagaaagcgcaggagcataagagggaattcacagagagccagctgcaggagggaaagcatgtcattggccttcagatgggcagcaacagaggggcctcccaggccggcatgacaggctacggacgacctcggcagatcatcagttagagcggagagggctagccctgagcccggcgctcccccagctccttggctgcagccatcccgcttagcctgcctcacccacacccgtgtggtaccttcagccctggccaagctttgaggctctgtcactgagcaatggtaactgcacctgggcagctcctccctgtgcccccagcctcagcccaacttcttacccgaaagcatcactgccttggcccctccctcccggcggcccccatcacctctactgtctcctccctgggctaagcaggggagaagcgggctgggggtagcctggatgtgggcgaagtccactgtcctccttggcggcaaaagcccattgaagaagaaccagcccagcctgccccctatcttgtacctggaatatttttggggttggaactc

SEQ ID NO: 724 - DNA, 455 bp, Homo sapiens
  misc_feature (1)..(455): n=a,t,g or c
tacgaatcgatgttttaaatttattaacatgacgatatgcctttgttacacaaaacttgctagagcagagtattttatttttttcttgcacgttttaaatatagatggaccagtgaaatcaatatcagcatttacatgacattaccatgcagaaacacttgataaccgaaagacatatagattggtagaaagaacatctcagacaggttttttttatgtcttcaaaggtttcaccagggtgtggtacagatgaaaagaagtggtgttaatgacctacctgcaccgataataaagcaaatagaatgattatatacattaagatcagcttgattaaaaataaattttatatngcaggtaaattgatncattaaaatgaacccagtttaactcttctcgtgtgttgttttaaggtaggtcactgaaacgcngagataaaatcngatggggaaaattta

SEQ ID NO: 725 - DNA, 399 bp, Homo sapiens
  misc_feature (1)..(399): n=a,t,g or c
nttttacaagtgggcatgagtttttattctcagtgcacagcagtattggtttctgttcatcagcaaaaagctttattggctccaacaaattatcccttttaaaactcctcttcttcttctggtctcagtggaacaacacatttgaatttcagatttgcagtttatagcattttttttccctaagaaccatataaatacatgcaaaaccttgtacatagagcttaaataatatcaaaatgcaaatatagattgggtgcactgttaagctgaattgcaaattatggcaacacacactggactggggtatacgttgctttgatatcaccatttgtttgtttatgtcatgcagaccacaatagtcaatcntttgnttttcctttttgnacaaaaataccagtg

SEQ ID NO: 726 - DNA, 503 bp, Homo sapiens
agcttgttcaaatatcttatttaatattagagtcacaaattacacattttgttatatttaaatcccttgggccttgtaatcaaagaagcacatgcagattgacttttacatgctgtgtagtattccttaggtgcaatagatagaaagtgaggatatttgtccacctactcagattttcaagatcagattccaccggtttagtagttttcagtggaggagccagtggaatttgggctcatttggaaatcttggcaatcaaaagcattctgagaggcagtgttgcttcaatccaagtattgggggagtttaccatcttctcccagagagcaacttcctctgaagtagagtccatccagtccacttcagtcccataacttttacctgttccaaagccaatacgaagacctcccaaaaattggttgggttaatttgtaatggtcccagacagtaagccctacacaggcttccatcagatcttcaggcctgaacccatcatacaccat

SEQ ID NO: 727 - DNA, 432 bp, Homo sapiens
  misc_feature (1)..(432): n=a,t,g or c
ccattaaaaaaactttattttcattttttacaaagaatatccccatctgggtcaaaaatatanctggttaagtacnaaatatagtctttaccatacanaaagatncataanacaaaaacatgaaaccaaccatcttcagcccacactttctggctgtaatanctctcagaaaagggtggagctcagtgctctgncacaggacagtgaacaaagtgctatggctgagagtgactgaccaagtgctggcagctgcacgtgaggggccaatatccctatctcctaacacagggcaggaagggggttcaaagggcttntatagaagacctgccctctagtttcctcatnggcagtatttcggaggttctgatncacagggttgggcatcttggatcaagagttcctccttggggtttgaagtnacagtggggcaag

SEQ ID NO: 728 - DNA, 375 bp, Homo sapiens
  misc_feature (1)..(375): n=a,t,g or c
tcgcattcaacttaaatgnttaacatngacaatgtcttggaacaataagcaaacaatgcttaaatttttcattcaaattcactttccacatgtcaaaagacctcaaggtagaaaaaaataaaataaaaatataaatatctgagaatccatcttaataaataaattaaaaacncnnnccaacgttttcacnnccccntgttaatgtcagaacattcagaccacctcaacaatgcatgatcagtaacattacaatgaacattgatgttgaagaaaaactacagtacatggatatagctatttatttctatctaccagaaaataaagtcgtatcttttcttagtataatattggtcatttctaatcagaacacactat

SEQ ID NO: 729 - DNA, 425 bp, Homo sapiens
  misc_feature (1)..(425): n=a,t,g or c
aanaaaaggccctcaaatatatacagacaaaaaattactgtgaagattttttcgggaaaagctaccaaattcagtgttgtgagaaaaactggtaaccatgcagaaattttaacatctatgaattttttttccaaaatacacacatatttttttaaaaaaggaattctgtgtcaagtataactcaaaataaatacaaattcacaagtagaactattgaatacttcatatggggtaaacaccattatctcccaactagatcgctagatctaccaactgcaagcgattgtcccttttgaacgtactaaaaccacacactttcccatcccctgggctcctggccctctgagcacttaattctcaatgggcacctggcctgcatggcagggggctttgctgaccacaagagagttccccagttcagccag

SEQ ID NO: 730 - DNA, 454 bp, Homo sapiens
gttgttggaaaaacatttattgcaattcagtgtcaaaagttttttacaaaaatatgccaccgtctggtacaaacaactataaaaaatcagttcatcatgcaagaaaagtgtgcaaataatttatacagaaggactcagctcacacaatattaaataaacatctctgcatgtaattggtctaactttatgctttagttacaatgttcaaccccctctaatacttttcatttaaaaaagtacattaaagcttctaagcttaggacacaggctgtaatatacgcccactttagccatggtgattggcacttggtagaataaagattggcaccaaggattcccaagtatagaatacagcttggagccttctgcttaacagacttgtgcttcgttaattaaacaaacacatctatactcaaagacagaaaaagtcatgtttaaactccagaaataatgt

SEQ ID NO: 731 - DNA, 427 bp, Homo sapiens
aaaaataagatttaatgctttattgctcttgatggcaaatcaaaatatgctttagaaataaagttaatttactggaaaataggagtttttgcaccaaaccataaaattgcatttcattacatcaagagaaccccctcattgtctacaatcatgcccgcttcctttcccctcagcgcccgggacacgtgaccgagatcataccctaaattcctgatccttttgcagttgccacatactgtggttttagtacatcataaaaaagtgcttgtcctgtggcctcagctgggaggcctggcgctggggctaaggggcccaaggcaccatccaaaggctgggaggaaagaacccaaacccaggccctcctcctgccctccagcctttgacaggcaactcatttgggcatgatctgttttggtgtgtttaaaac

SEQ ID NO: 732 - DNA, 399 bp, Homo sapiens
cagaggatctttacatgtttattaaatctgaatttgaagatacattccaatcttgcataaagtgtttgttgggcttttacattacgtaattaaaaaacaaaattttttaaccaattttatgtgccatgtcacgtttaatgctatcttgtgtgaccagatcccaccagtaatgacaaaactgtcttaaacctcattttttttttttttttgagacaagagtttcactcttgttgcccaaacgagagcaatggcaccatctcgactcactgcaacctctgcctcccaggttcaagcaattctcctgcctcagcctcccaagtagctcgggattacacgcatgcgccaccatgcctggctacttttgtatttttaatagagacagggtttcttcatgttggt

SEQ ID NO: 733 - DNA, 488 bp, Homo sapiens
ttcatattttaaaataatcttttatttgctcaccatagacattctgacctacattacattgatatacattatatttatttgcagtgagaactgaataatttaccacacagtataaatcacaaaattataattcctgaatttctagcattattgttatgcatgtgagcggttaaccagaataatcaaacatcattgatgttaatctaagtgagaagttggtaataaacacttctaattatgaatctagaaatttcaggagacaaattccaccattgaattcttgtatcttcagaatcagacctagcatatataatcagaaaataaattttgaagttcaaatcagtggtgtgtgtgttagaaatgtcaacatgtaaaacagaatgctagttaacaatcacattttcctaagaaaaaatttgcatcttaatcatacgaatatcacgaaaacagaccatttccagttttcactgtagtcctggatggttttc

SEQ ID NO: 734 - DNA, 426 bp, Homo sapiens
gaggtttggaaatgtgcttttattttcaaactcaggtatgtgacactctacagttcaatgctagcacacctgtgtgaggcttaacaacatgaggaactgatagccagtgatacacaaatccagcacttcctctccatttactctgtcaggctgtatatggggagcaacacatatggctttgtggcagccagaaagtgaaggtctttttaggaggtgacatcaacaatgacacaaacacatcactctgcaactgaaggcagggaaccagactcctagggctaagcagagatgtcagacttcagaggcatttgggggactcttcagatccacatcctcactgaaaatccagggcctgtttctctccagttcactaccgcttgggcagcagctcccactgcttcaggctgggtctttgctttccagaaa

SEQ ID NO: 735 - DNA, 228 bp, Homo sapiens
ttttttttttttttctcttcaaatatttaatcagtttggagacctctgcattccaatccaattgggtaaaaattctaaagaaagcaagattaaggggtcctcaaagaaaacactgggctaaaatggagaggagactgggtttgggaagacagaacatagcatgtgtctgaaggcctttcgaaggaattctacgacatattttttaaaaatactccaaatgaacaagac

SEQ ID NO: 736 - DNA, 426 bp, Homo sapiens
  misc_feature (1)..(426): n=a,t,g or c
cggtagagacagggtcttgctatgttgcccaggctagtctcaaactcctgggctcaagcagttcttgcctcagcctcccaaattgctgggattacaggcatgagccaccatgactggcctaaaacaaaataaattcttaatggcatttcgtggaatgtgtttaagagccaaaactgtgaaaatgtaagctttatctttcttttttcctagattatttaaagaggattgtagccacacttcagatgaatgtttacaagccaaataatgatttaagagtgtgctcaataaaaaggccataggtttaagaattaaatggaataatataaattactaggtcaacaagaatatttcatgtatagtacactgtctaaggaatgcagagaaattttacaagaaacccccagactaaatacttcnttaagaaca

SEQ ID NO: 737 - DNA, 447 bp, Homo sapiens; identical to SEQ ID NO: 197

SEQ ID NO: 738 - DNA, 288 bp, Homo sapiens; identical to SEQ ID NO: 198
  misc_feature (1)..(288): n=a,t,g or c

SEQ ID NO: 739 - DNA, 440 bp, Homo sapiens
  misc_feature (1)..(440): n=a,t,g or c
aaattaaattttttattcatttttttgcatcaaaatagtgcttaaaattggaatttatactcacaagacatagctaacatccaaagtagacaattaaaaaatattatttgaaaattatgtacttagtactgaagacttcctaaatttgcacattagctagattgccattagcaccattagagagttgatctttggctaatgattattcaggaaaatttcaaccattacaatcagtgagtataattttatatttcagcaacgatagtgggtcatgttcagcaacagcttcacttacaaattaaagtaagctcacttcagtgttgcactctgatgctgtttttttaccccttctcttgcaaataaccagtgaaataaaaattgcctctaactggcaatcgnaacaagggaggaattatggctagncaactagttgctaatga

SEQ ID NO: 740 - DNA, 307 bp, Homo sapiens
  misc_feature (1)..(307): n=a,t,g or c
tgtatttaaaaaaatttatttgtgatctgtacatgtgataaagtggggtagacctttaaagccaacaaaacaaaaatccaaagtaaaaatgtataaatacaatatatattttcttacaaaaatgggagatttacaaaatatacatactgtacttatcnctattttacaaatttcacatgcacttaaaagatacagcacaaaagatgccaaaacctgtgttggagttttaaaaatctgacagatgagatagttttgaaggttgaagaaacacaagatcgattttaatggaaaaagcagttccactcaa

SEQ ID NO: 741 - DNA, 453 bp, Homo sapiens
ttcaatataaatgtgtaattttaatatttaatttaaaataaaaccaaggctggattgggttgggaaagaacgtttgatttgcagaagaatataggaatttttttaatcacgacattacaagtcatttgtgaaaacagccttcctcctgccaccggtccctatacaacctgcttaggaaatatggaggtgaatcatcccccttacctcttccctaccagggcttggttctccccaaaatccaaaggagaaataaatgtcttccgttgcctcttcccatttttacagtcagcttctaaccccttgcaaagccctgaatcagagccaagcacctcagaaaatgagggtcccttggttctcttattgaagttgggcacatgtggtcagagaagccccaaggaaggccacagggactgacacctttacttttggaatttgtgcagccagtttgtcagg

SEQ ID NO: 742 - DNA, 248 bp, Homo sapiens
atattttcatttttcatcctaatttactgaagccattttctttggttagctttagaattatctttctttatactaaccagcttagcatgtaataattcttgcccatgtgactacaaaacattagatatctccacaaataaaaacgagattcaccaacacaaatattccttctctttaagttcacaaaatgcaagaagaaaagaaaaatgatgttaggttgtcagtaaggaaagcatttctagatgaga

SEQ ID NO: 743 - DNA, 558 bp, Homo sapiens
  misc_feature (1)..(558): n=a,t,g or c
tcttgagtcaatatgatttattgttttctcttctgccattaacattctagctactgggtaagttgttctccatccttgggatctcatggttgggaggagaggtctgggttccctcccacaaaactctcaacgatagaatagaagcacagctgcctcagttatctcacggctgctgctgtaaccaacatgagttccatatccactccaatcaaaaccagaaaaatctccacactgctggggactggcctctggaaaagtatcctcctccaccaatgcagtgatgctcagtgttacatccggtgaccctcattcccagcacacaaggcgttgggctgctctctcgttattaaataccctggaactgaacaaatcccgcagtgaattcccgctgggccataaggggtgagtaataagatgctgtttttctgggcgtcgccaaaaatnatagaccacagggatcaccgggccgntggtcagtccaanactttccttctccatatttcacnggaaaatttcgggtanatgcccaanagattatgtnccagtgtctgggggaaa

SEQ ID NO: 744 - DNA, 409 bp, Homo sapiens
  misc_feature (1)..(409): n=a,t,g or c
agtctagatgaatttattgccattcacatatttcatagaaaaaaagatgtagcaaacgggtcagggttgtacaaaaaaaaaaaaaaatccaggtttatataggttgctctatttacatctgagagcacagctgtcctggcatcaggcacagcagctgcacttgtctgacgtccctttgcagatgcagccctgggcacacttggcacagcccacaggnangcanggagcagcagctcttcttgcaggaggtgcatttgcactctttgcatttgcaggagccggcacaggcacaggagccaacaggcgangcaggagcagttggggtccatttcgaggcaaggagaagcaggagttcccgattcaagaggaaaacacgcagcgggacagattctcgtgccgaattcttggc

SEQ ID NO: 745 - DNA, 298 bp, Homo sapiens
atccagtgtaaaaaggaagttggaatgggagttggcgggcagtgaacgagtgtggggaaggattggtgctggggcaacaggaaggggccttgggcgtttggctgcactaactttggtagctcagtgtgcatctagagtgggacttgggagggagctaagcttgggctgggctgcttggggcttggcatagggtggaaagggctacctggggctctgaccacactgtagtatgtgtggaggggcctcccgtctcccacaacttctgctataacaataaactgtagaggatcttaaagag

SEQ ID NO: 746 - DNA, 436 bp, Homo sapiens
  misc_feature (1)..(436): n=a,t,g or c
gaagtatacttccaagcaaaatttattagatgtctattcaagaaaaacacaatgacctttgcttgtaagaattcaaagtcaattacctggaagccaggtatgaatagttttttcttttaaaatcagatacagagagtagaaacagtaatttttcttaaatatgacaggcaacagatattgaagtcttttctcataaatggcatcaaagagaattattcatttatcagcaaagngcatgcagttgacttaatttcaaacctgaagcctttaaaatatgaagctggttatgaacttgacagaaatcaaggtaggctactcaacgatgtttctttaccttcttcctaatggaaattcccttgtcatcagtcagtagatatgtacatttcatttgggcttctacggatctttttaaccttcataggatttttggcataaa

SEQ ID NO: 747 - DNA, 474 bp, Homo sapiens
  misc_feature (1)..(474): n=a,t,g or c
gaatgtatatatttattataatctccaaaataatttcacttggtacaactgcttcttaaaaccatatcaatatcaggctcagaatttaattacaaccaagcaattcacaaaaacactgagcaacaaaacatgcttaatatttctttgagaaagacccttcaaatatgtgtacagcatcactgggagttacacaaaactgttacaaggtgaccattaagtgccccaattctgcacttctgacatacatgaatggctaatgtaaccacgtttgggaatctttttacatctcaaaataaagctttctgatgcaacttgccatccttttaaattttaaaggatattcttgggtaattccttaggaaagtaaaactacacacactttcagagaaaccaataagctgcttagatttttaaaattttttatattatacacttcaattatggggtatttaattaaagncctccaaaaaaanc

SEQ ID NO: 748 - DNA, 147 bp, Homo sapiens
cagtgtccataaataaagttttattggaatacagccacgttcgttcatgtatgtgttgtctatggctgcttttgcactacaatggcagaattgggtggttgcaacatattttatggcccccagccctaaaatatttactgtttggcc

SEQ ID NO: 749 - DNA, 441 bp, Homo sapiens
ttttttttttgtttcaaccacaagtatttattgatggatcgaagatacaattttaatggaacaataaggcacaaccgtggattaaaacactttgctatacagccaaaaggggggaaaatctataaccttaggaactttatgccaatcaagaagcctctaaagtacctctctaatagatcagtatcagacattcttcccttttacataattcctatattacatcacttaatcataaaatctgactgatacttcataaagaattcctcattcatttatatttgagccatccagcctggctactcccctgttctccacccttttccatcactttgcagtggtattttttagcaatcttcaatagttttccaaagcaaggaaacaagcaagcaagcaatgagtcagaaagtcaaccaagggcagatgtgtgggctaaatacactc

SEQ ID NO: 750 - DNA, 447 bp, Homo sapiens
tttttttttataaagaaattttattgcataattcttgtatacaataaacataggaaaagggtttttaatgaaaattcatgtcatttttcaaaagtgttgaactgtctggagaaaaattattacaaagctatctaaggcaaaaataatatttaaccatctaaacaaaagataatcccctttaccatttgttttgtatttaaagcaagacattttaaacacaagtaatacggagaagttttcaaattgctacgtcatttgcattaagaatttaaatgcatctaagaagtgaagagtttaaacacatgggaatgttctctagtaacagatattgctgctttcttcagatccattctgcttgaatgtaaggctatactttttgcacaccaacagaattctggcatcttctaatggtacagtaagagctggagtgcagagagggaaagtccc

SEQ ID NO: 751 - DNA, 421 bp, Homo sapiens
  misc_feature (1)..(421): n=a,t,g or c
ttttntgtnaaatcatactttattctggagcctcttggtcaggcttgattcgcacactccctctgcagtgactccaggaacccctctcacagctcagagcggaagtgaaggctgcagctgccatcttctccgcatagtccgcatcgaagcgctcattctgcgccacggtgaaggtggtcttccagtccccagccatgcctttcctcatgaagggggagatgctgtggtccatgaactcccggcggacggtggtgtagttggtcatagggttcttcttcatctccttgaacgacgtgtgctcaaccatgaggtccacagtctcctctggcagggagcgccccacaaactccagggatctttttgaatctcccttttgggggttctccttcatgtcttcatagaagaggtagagaacagggtg

SEQ ID NO: 752 - DNA, 435 bp, Homo sapiens
  misc_feature (1)..(435): n=a,t,g or c
gcatcaagaattantaaatacagtgtatcattattttaaagacatgtttagggaaaaaaccagcttctcttccccttaaagttattggtggtgggagggcaagagaggaagagatggcagctttttaagtgaaattttaatcttatctatcttttgttcattttgagtccccaaataaaatatttctgtactttaatttcttaatcactattgtcagcttgggttgctacacatttaattacaatataaagttgacattgagggatgaaggaaacttaattatacttttccttatttctatttaaccaataaggattttaataggcaaattaggaacaaggattttaccctcccttaataactaaggggttagggtaaggtgggaatttggtatccaggtaacncggggtttcnggattcnggggtgtacccggt

SEQ ID NO: 753 - DNA, 431 bp, Homo sapiens
  misc_feature (1)..(431): n=a,t,g or c
acttccaagatnaacatttttctgtttattcttagaatgtgaattttttttttcaactcagggccaagtacaaacttttgatttttgaaattttttcaactcagggccaagtacaatcttttgatttaaaaattttttttcatgaacaaaccatcagtagttattaaggagcccaagaaataggagatgtgaaagcaggatttctttgtgtttcctttgaatgttgttattttgagtattatcattatcagggtaggagggaaggaaagggtagggctggggaaggtagggtccttatggatatcttgactatgggatccccaggatttacatttcacctggtcacagnggcacacataatttaggataaacatgttcaaggaatggacataaacagaggggtaaacacaggggggctttacatttggggg

SEQ ID NO: 754 - DNA, 348 bp, Homo sapiens
  misc_feature (1)..(348): n=a,t,g or c
nctttttaataatttcagaataaagtctcatttcagtgcagtgggctgggtggtgggggagagggttgaaagccccacttgggtccccgagggtccattgagccctctcaggccagctccaggaatcctgggcctgggtcacagagcagagttgcttgcagggtcctagtggccatcgggctggggcaggacatcatctctcagagggtcagaggctcagagctgggtgcagctcagcaggtcacggccctccaccagctctgggttctcccgcatcatgtgggtgggctgctttttcccccaccaggggcctnagctccagcagctnggtggggtnagcttagcaac

SEQ ID NO: 755 - DNA, 424 bp, Homo sapiens
  misc_feature (1)..(424): n=a,t,g or c
ttttttttttactatcttcaaatttgttttatttcttgttcataattaacagtgcaaagnaattacagcctttaccacttatgcagagataacgaatcaaatttcaaagcataataggtatgttactacctttttacaaaaccatgaaaagcaaaggatttatgcctacactaggtgaagaagccacactgttatatgttatgctaggatgtgtatgccaggggatcaagtgtgctacaaggccaagagcaaagacctgcaattactccaaatgatagccaagtccttcttcgggcatctttatggcatttacctaaattatgcccgaggctctgtggtgtgtgtgtgtgtgcacggtgtncatatatggtttaaggggttcaaaagggatttgggggcccagttgggggttcatttgctaggg

SEQ ID NO: 756 - DNA, 301 bp, Homo sapiens
  misc_feature (1)..(301): n=a,t,g or c
tttttttttttaattttattaagtacacactttaataacgactataaaggaaatattttacagccatagagatcaataactttccatgcggaaataaaaaattcattgctcaataacattattgaggcaagtgaagaaagattactctcttgtcaatctgaaatgttaattttttcagtgcaaaaccagttataaaatatttaaactcaatatttaaaaataaaangtggnnccaattcagcaatgttcaagttctaaatttcataaaacaaatcattacatacattttatagtaaaatac

SEQ ID NO: 757 - DNA, 266 bp, Homo sapiens
  misc_feature (1)..(266): n=a,t,g or c
tttttttttttttttttttttcttnaccaagactgtttttatttaaaatatacttggaataggtgaatattaatctaagcattttcctatcacttttaaaattttatactatgtactttgtattaaatagtacagtagtttcagtaagacatgtaaaatttgccattttaaccaccttaangtgtacaattcagngacatttattatatttacaatgttgtgcaaccatcaccactaattcatcaaattttaataatcttttaatt

SEQ ID NO: 758 - DNA, 345 bp, Homo sapiens
ttttttttcctaaggctctacttcaaagtgctggctattcaaccaactaatctgaataggtatttggatggtgaggtaaaagctattttaaggtctgttctcatctcactttaataaggtgaaaaaaattgccatatgtactaaaaatagttcactgttctgaaactcaatgcctgtttgccaaaacaatattaatgatgcatattctatgcattttttccccaaatatgggcatctgccgtgcacaaaattcaggaatgggaaaccacgagatatttgaaataacaccatcctctttacatgggttaaaaaagtcaaatggaatccagttacttttaattaaaa

SEQ ID NO: 759 - DNA, 382 bp, Homo sapiens
ttttttttaaagaaagtttactatgtgtaatgcaaggcacttatgtctctgcttaaagctacaagggaaaaaatgacaagcccagtttttttcaagggaaatattttttctctgtgaaaggtcagtagtaaaagagctagtttaaagtcatggagtttttgccaaaaaccatgtctcgaggttttatgcatttctaatggctttgcccataggagagatacccagagtggacaaacagaggctaaggaaaaaaatgctgttcatttagatcagaataacctcgctccaatctgggaaaccactcaaatgacacatacaagtctgtatgaaaaggcaaaacaaactcctgggtgatatgcagttattccattcaacatgttta

SEQ ID NO: 760 - DNA, 356 bp, Homo sapiens
gatggagaaaattttatttatgtaattttcatctgtagagatgcttctgtcctcatctttatatttgtctccctcttctcattgaactgcaaaattcctgaaggatgagacctgggatgtttaatgcaaaccgtacattctcagcagagcacaagtatcaaagggacattggatatattttaataatgatctaacacaagcaaaaataaccactgaaaatataaaactcaacaagagacataagaaaaaagcagacagaaaacaaaaaaaattcttattttaggaatgatgctatatgtaacttgtaaaatatttaagtttttatacatgaggttatattgggtttccttatttaa

SEQ ID NO: 761 - DNA, 444 bp, Homo sapiens
  misc_feature (1)..(444): n=a,t,g or c
aaagattcccnnnntttttatttctggaactgtacaccaggtattaaagtacaacaaatacaaaataatgctcaaaaaaatcagtgtttatgtacaaatattaaaatcaatgcaatagcaacttcctcttgaacatctgatactgaaacttgttctgattgtcactaatttatctcatactcacagggtacttatttcaaactgggacaattggaatcactggtcatctaagaggaatattaatatctaccatatttaacaataaaactaatagtttcctccatttagtgaaaaaattagggaactttttaaaaaacataggtaacgtcaatattttattaaattatttcaatttccntttgtgggccatgtgctttggaaactcggggcaaacattctccntgggnggtcgggttntttgttaggttacttcnagttggattt

SEQ ID NO: 762 - DNA, 368 bp, Homo sapiens
  misc_feature (1)..(368): n=a,t,g or c
caagggctggaattnaaattattgtcacagagcacaggagagaccgcttgggtctcaatgaaggtttgcttttcctcttctccaggggaagctactgcaagaaggcccaccagccaggctaggtcaaatggggttggggccacaacatgatagttaaacccataaacacagacttgattcgntcccagcttcacgacttcttagctgtgtgaccttaggtaagtctgttaacctctctcagccttggctttgtggagtggagtgaagagcagggcctgcttcactggggtnttatcaggatggagggggacaaggcctntgaaagtntttagcacagcgcctgggcagatcgtgaccagtcacggagt

SEQ ID NO: 763 - DNA, 261 bp, Homo sapiens
  misc_feature (1)..(261): n=a,t,g or c
agtannataccacagagaatagttgggatgaaaggcatccagcccctgcttcctttaagatggcctctaggcaggtgggtgttctgtaagcctggcaaaaattctggagccaatctctggcaaggctgagtgccaggcggggcctagggacccagggtcggtgcttaatgcctcccgcccattggaaattactgacctccaaatatatatatatatatgttttttaatttaaaggggaagtacactgcacaccttcctcca

SEQ ID NO: 764 - DNA, 691 bp, Homo sapiens
gacccctcacactcacctagccaccatggacatcgccatccaccacccctggatccgccgccccttctttcctttccactcccccagccgcctctttgaccagttcttcggagagcacctgttggagtctgatcttttcccgacgtctacttccctgagtcccttctaccttcggccaccctccttcctgcgggcacccagctggtttgacactggactctcagagatgcgcctggagaaggacaggttctctgtcaacctggatgtgaagcacttctccccagaggaactcaaagttaaggtgttgggagatgtgattgaggtgcatggaaaacatgaagagcgccaggatgaacatggtttcatctccagggagttccacaggaaataccggatcccagctgatgtagaccctctcaccattacttcatccctgtcatctgatggggtcctcactgtgaatggaccaaggaaacaggtctctggccctgagcgcaccattcccatcacccgtgaagagaagcctgctgtcaccgcagcccccaagaaatagatgccctttcttgaattgcattttttaaaacaagaaagtttccccaccagtgaatgaaagtcttgtgactagtgctgaagcttattaatgctaagggcaggcccaaattatcaagctaataaaatatcattcagcaac

SEQ ID NO: 765 - DNA, 2704 bp, Homo sapiens
gcttagtgtaaccagcggcgtatattttttaggcgccttttcgaaaacctagtagttaatattcatttgtttaaatcttattttatttttaagctcaaactgcttaagaataccttaattccttaaagtgaaataattttttgcaaaggggtttcctcgatttggagctttttttttcttccaccgtcatttctaactcttaaaaccaactcagttccatcatggtgatgttcaagaagatcaagtcttttgaggtggtctttaacgaccctgaaaaggtgtacggcagtggcgagagggtggctggccgggtgatagtggaggtgtgtgaagttactcgtgtcaaagccgttaggatcctggcttgcggagtggctaaagtgctttggatgcagggatcccagcagtgcaaacagacttcggagtacctgcgctatgaagacacgcttcttctggaagaccagccaacaggtgagaatgagatggtgatcatgagacctggaaacaaatatgagtacaagttcggctttgagcttcctcaggggcctctgggaacatccttcaaaggaaaatatgggtgtgtagactactgggtgaaggcttttcttgaccgcccgagccagccaactcaagagacaaagaaaaactttgaagtagtggatctggtggatgtcaatacccctgatttaatggcacctgtgtctgctaaaaaagaaaagaaagtttcctgcatgttcattcctgatgggcgggtgtctgtctctgctcgaattgacagaaaaggattctgtgaaggtgatgagatttccatccatgctgactttgagaatacatgttcccgaattgtggtccccaaagctgccattgtggcccgccacacttaccttgccaatggccagaccaaggtgctgactcagaagttgtcatcagtcagaggcaatcatattatctcagggacatgcgcatcatggcgtggcaagagccttcgggttcagaagatcaggccttctatcctgggctgcaacatccttcgagttgaatattccttactgatctatgttagcgttcctggatccaagaaggtcatccttgacctgcccctggtaattggcagcagatcaggtctaagcagcagaacatccagcatggccagccgaaccagctctgagatgagttgggtagatctgaacatccctgataccccagaagctcctccctgctatatggatgtcattcctgaagatcaccgattggagagcccaacaactcctctgctagatgacatggatggctctcaagacagccctatctttatgtatgcccctgagttcaagttcatgccaccaccgacttatactgaggtggatccctgcatcctcaacaacaatgtgcagtgagcatgtggaagaaaagaagcagctttacctacttgtttctttttgtctctcttcctggacactcactttttcagagactcaacagtctcgtcaatggagtgtgggtccaccttagcctctgacttcctaatgtaggaggtggtcagcaggcaatctcctgggccttaaaggatgcggactcatcctcagccagcgcccatgttgtgatacaggggtgtttgttggatgggtttaaaaataactagaaaaactcaggcccatccattttctcagatctccttgaaaattgaggccttttcgatagtttcgggtcaggtaaaaatggcctcctggcgtaagcttttcaaggttttttggaggctttttgtaaattgtgataggaactttggaccttgaacttacgtatcatgtggagaagagccaatttaacaaactaggaagatgaaaagggaaattgtggccaaaactttgggaaaaggaggttcttaaaatcagtgtttcccctttgtgcacttgtagaaaaaaaagaaaaaccttctagagctgatttgatggacaatggagagagctttccctgtgattataaaaaaggaagctagctgctctacggtcatctttgcttagagtatactttaacctggcttttaaagcagtagtaactgccccaccaaaggtcttaaaagccatttttggagcctattgcactgtgttctcctactgcaaatattttcatatgggaggatggttttctcttcatgtaagtccttggaattgattctaaggtgatgttcttagcactttaattcctgtcaaattttttgttctccccttctgccatcttaaatgtaagctgaaactggtctactgtgtctctagggttaagccaaaagacaaaaaaaattttactacttttgagattgccccaatgtacagaattatataattctaacgcttaaatcatgtgaaagggttgctgctgtcagccttgcccactgtgacttcaaacccaaggaggaactcttgatcaagatgcccaaccctgtgatcagaacctccaaatactgccatgagaaactagagggcaggtgttcataaaagccctttgaacccccttcctgccctgtgttaggagatagggatattggcccctcactgcagctgccagcacttggtcagtcactctcagccatagcactttgttcactgtcctgtgtcagagcactgagctccacccttttctgagagttattacagccagaaagtgtgggctgaagatggttggtttcatgtgggggtattatgtaccc

SEQ ID NO: 766 - DNA, 408 bp, Homo sapiens
  misc_feature (1)..(408): n=a,t,g or c
caaaaaaaataaggtgtctttattgtnttggatgcaaatatagtttaaaaaatgcattgtagtgttgantacagctggtggaaacgngctttttgacagcngngcaatcagaggggtgtactcagggtgacgtggaccggagggggcctctggcaaaccagactcttctctggtttgtncttcagaccacgaggtggaaccatctcttcaaaggagccctgccaccatcaccaaagctcacaccagaaaaaaccgccatttacacaacaaactgaacctgaaaaaggaacggaacatggtgcttccgccgtgaacaaaatcagcaagtgaatccgttttcctttcccgggcttttcgnaaaagattcggctagaggaaaaggggggcactttggggcagcccntaggg

SEQ ID NO: 767 - DNA, 281 bp, Homo sapiens
  misc_feature (1)..(281): n=a,t,g or c
agtgtaataattttattaataaaacgaacccatagggttcaaacaagcatacaaagtaattcccttccctgtgggttaaattgttacatttttaataataaaactaaganagctttcatagttaacttaccaaaaacataacgcttgcctattgtttcttactgtgcaaaacaaaaccaaagttttgcccacaganggnttttgtgcaccaaancatgcacatttncaatttcaaaatttctgcatcaaaatgnaaattccaaggccacgtttttgttttt

SEQ ID NO: 768 - DNA, 339 bp, Homo sapiens
  misc_feature (1)..(339): n=a,t,g or c
tttaaaaatatgatcattctttattgttaattggtaatattttctcatacattaggtaaatgtcaagctttgggtctctggagtataactttttgtaacattagccattatttggtaacagaatttaaggatgatggaatgatggaaggtattacatntttctaaaacttaattaagctctaggtcagataacaatggagtaaagtgatacctgcgtttttttccccagtgtaatcttaatttactattgtattttncacttaaaattttgtagggaaaaaagttttcaagggaacactaagattaaattgactaggttcaaatatgcttccccaatga

SEQ ID NO: 769 - DNA, 370 bp, Homo sapiens
  misc_feature (1)..(370): n=a,t,g or c
aagagtttaacacaatttattttatgcttaaataatcgactaggtcatccagtgtatggtttttcatacatatgtcattagagctatgngtcaatgaatgctgattttatgngaatataatcaacaaattaaagantttcaccaaaacccaaataaaaatgccctttaaaacacagcagccttattaacctaatatgacactgctagaatggttacaaatgattggcttactgaaaggggtctacatcttntagccagtacacaatacagtaataattttncagngggctgccattctactagctaagggtttctgntcagnccnttttaaatacccccgactggggccntttatgngcaccatncacct

SEQ ID NO: 770 - DNA, 367 bp, Homo sapiens
  misc_feature (1)..(367): n=a,t,g or c
ccatgttaagaatattttatttgttttttgagattacatagtcattattgctgatctaatacaatcacttagacataaagatttccaagaacttctcagaaatggtgatctttagaagtgttattcctttcagtaagatgacaganctagatgattacgtatatagatatatagatatatatatatatatgtatatatagngtttagaacctgtccacatataatttgctggtgttgcctattttccttccgtaattttccnttattgaaaaagcttaatgcaacaatgcattttgattcctttttaaaaaccacgggcaaagttaattttgagaaaaccacaggngcagcaatatcagatctgttt

SEQ ID NO: 771 - DNA, 163 bp, Homo sapiens
ttttttttttatttttttttactgttgaccatgtagttttatttcatcagtactcccatttttaatggattcaggcagcaccccagagtacaggactgagttcctaggggtggcctgacccagcagctgtcttcttttccaggaggaaaaagctttttattaa

SEQ ID NO: 772 - DNA, 413 bp, Homo sapiens
  misc_feature (1)..(413): n=a,t,g or c
tataatagctaccatttattgagcacctactttgtgccaggcantttacatacatttgtgcttataattcttacaacaacctcgggaggtaggcattattatcaccatttgacatatgagaaaacagaggcttagcaaggttaagcggcttgttcaaggtcacagagctggtagataagtgatagaatcagcacttgagttgtgcatctgtgagggccccaaagctttcatcaggcattttccacactgagaaaataaagaaggtagaggagtgggtgtattagtctgttttcacactgctgataaagacataccccgagactggggtaatttatggaagganaaaggagggttttaatggaactcacagttccctgtgggctggggagggcctcaccaatcatgggtgggaa

SEQ ID NO: 773 - DNA, 409 bp, Homo sapiens
  misc_feature (1)..(409): n=a,t,g or c
cagcttagcttaagatatttattcaatgctctcacatttggcctctgtgacccagaaaagcggtagagcagggtaggagcacatgatgcatccttcagccactgcaacctccagagggaccaggtcttcttcaggaaatcttcgttcctggtggatgactgatcagccataacatggggagaagtcctgcgctctccatttctccatcgctggcttctcctgggagtcatgccaatcattggtctggtccccgtcaaagtttccacaggccccacacagtttcccagcatgggtcattgctgacaatcacagccaccttcccattgggctccaagccacnacctggggacccctgccttctggcggganttagcaggggagccattcagggtgttacggacttcacggn

SEQ ID NO: 774 - DNA, 281 bp, Homo sapiens
  misc_feature (1)..(281): n=a,t,g or c
tcaggatttaaccatggtttattgcagacctattgtgtgccaggcatgagccangtgctcccacaaacagcgtctccaggtacgagaagtgtaatttcgaccctggaacaccttcctgcactcagacagaagcatgtgcagactgctctcagcaacgccacctccttcactccctggccattgggccccttctctctacctgtcccctgtcactccacttcctgccccaggncttctcttagggattttccagggctttgggggagctgctgctttcagtt

SEQ ID NO: 775 - DNA, 298 bp, Homo sapiens
taaagtttatttcatttttaataacaattagaggacaaaatgtttaaaatttgcagtttaaaacatgcacattcacaaaaggccaatgacacataacactgcatagaaataatattactcaattttaataactataaaacacagtgcatcaaacatcaagataaacaaacctgagaaaactactataaccacagattcaatactctccactcatgcagcttcacaatttctacagcagtttcagcaggaatggtttttcagggagctgaaaatactactttatctttaacgcaaaact

SEQ ID NO: 776 - DNA, 385 bp, Homo sapiens
  misc_feature (1)..(385): n=a,t,g or c
cagctcacaagacagttttattgaattagttgcatgcagganaattctgttcttccatgagcagcagagtcgagtgttagagtgcaggnccagagcggggagaggctggnggagttggggnctggagntggggctggttacttggtgacgtgcagantctctctggggggctgcagctcatcttggggggagctggactcagatgcccccgtangtgcaaaagcaacatccacatctcactcctcccggtgctttttgcggtattcctgcagcgtttctccgccacggtctccataaatttagggttcttcctgggagacttctacagggaccgtcacagtgatgggatcagagtcaaagagcttcacgaccacctcagtgacac

SEQ ID NO: 777 - DNA, 244 bp, Homo sapiens
  misc_feature (1)..(244): n=a,t,g or c
ntttttttttttttcaagtcaaaactgttttattgtcngtttacatatttaatagaaaaaggaatgtagcaaatgctcagggttgtatgaaaaaaaaatccaggtttgtgcaggttgctctgtttacatctgggagcagggctgtccccacatcaggcacagcagctgcacttctccgacgcccctttgcagacgcagccctgggacacttggcacagccatggnagaccaggagcagcagctc

SEQ ID NO: 778 - DNA, 338 bp, Homo sapiens
  misc_feature (1)..(338): n=a,t,g or c
ggtgaattattgatttattgcacatcaggagaaacacaagattactgctataataaattcactcttacatgctttagaaaaatcagtaaaaatagaaaacatggtaacanttaaagtgaaaaanttggggtcattaaagaatgtctgactgattagcttgcagtttttgagacggctgagaactaccatcaatgagatcaccttaaacaaacactcttaatgacttggaaaaagtccccntcccaaagtcaactntagggnattcaatattgtgatatttaactggaatttaaggttatggtttaaaccccattttattgaggtaggngggagggatt

SEQ ID NO: 779 - DNA, 465 bp, Homo sapiens
  misc_feature (1)..(465): n=a,t,g or c
ttttaaaggnnnnaatgtgactattttaattattttggtggcagggagttggttttacatcacccaaaaaaaaaaaaaaagccctggtttcaaattcattggtaataaatatgctaactttctgaatcaaaatggagagcctctcaagaaaaagagctatgcagtcagcaatgacttaaattagtcaggatagcaggcatctggggttaaggctgtttccaccattttggtctcaccaccatatacgngtgggaccacagctgtgtagcacttgtttcngtcataagtntagcaggtctctgtagcactgtcttcatcacagatattgctctggggtagcagtaactatctgattatcccagctccacttctgtagggncacattttttacagaggtcagacaaatgggtacacaaatctggttccccaatgggtnaggtngggtccagagntattctccccgtt

SEQ ID NO: 780 - DNA, 232 bp, Homo sapiens
  misc_feature (1)..(232): n=a,t,g or c
ttttatcaactgtnaattgatataattataattggnatgcaatatgtcttacaacaaatgtggatacaatgacatcaaatatcaaagaattttcccacctttccatctttaaatgacttcagctaacttaccccaagngaaaaatctggcattganctcttggntagcattattaccaatatcaactagcactattaaantcaaagttgaaatgggacattcntttgccnaa

SEQ ID NO: 781 - DNA, 3345 bp, Homo sapiens
gaattccgtctcgaccactgaatggaagaaaaggacttttaaccaccattttgtgacttacagaaaggaatttgaataaagaaaactatgatacttcaggcccatcttcactccctgtgtcttcttatgctttatttggcaactggatatggccaagaggggaagtttagtggacccctgaaacccatgacattttctatttatgaaggccaagaaccgagtcaaattatattccagtttaaggccaatcctcctgctgtgacttttgaactaactggggagacagacaacatatttgtgatagaacgggagggacttctgtattacaacagagccttggacagggaaacaagatctactcacaatctccaggttgcagccctggacgctaatggaattatagtggagggtccagtccctatcaccatagaagtgaaggacatcaacgacaatcgacccacgtttctccagtcaaagtacgaaggctcagtaaggcagaactctcgcccaggaaagcccttcttgtatgtcaatgccacagacctggatgatccggccactcccaatggccagctttattaccagattgtcatccagcttcccatgatcaacaatgtcatgtactttcagatcaacaacaaaacgggagccatctctcttacccgagagggatctcaggaattgaatcctgctaagaatccttcctataatctggtgatctcagtgaaggacatgggaggccagagtgagaattccttcagtgataccacatctgtggatatcatagtgacagagaatatttggaaagcaccaaaacctgtggagatggtggaaaactcaactgatcctcaccccatcaaaatcactcaggtgcggtggaatgatcccggtgcacaatattccttagttgacaaagagaagctgccaagattcccattttcaattgaccaggaaggagatatttacgtgactcagcccttggaccgagaagaaaaggatgcatatgttttttatgcagttgcaaaggatgagtacggaaaaccactttcatatccgctggaaattcatgtaaaagttaaagatattaatgataatccacctacatgtccgtcaccagtaaccgtatttgaggtccaggagaatgaacgactgggtaacagtatcgggacccttactgcacatgacagggatgaagaaaatactgccaacagttttctaaactacaggattgtggagcaaactcccaaacttcccatggatggactcttcctaatccaaacctatgctggaatgttacagttagctaaacagtccttgaagaagcaagatactcctcagtacaacttaacgatagaggtgtctgacaaagatttcaagaccctttgttttgtgcaaatcaacgttattgatatcaatgatcagatccccatctttgaaaaatcagattatggaaacctgactcttgctgaagacacaaacattgggtccaccatcttaaccatccaggccactgatgctgatgagccatttactgggagttctaaaattctgtatcatatcataaagggagacagtgagggacgcctgggggttgacacagatccccataccaacaccggatatgtcataattaaaaagcctcttgattttgaaacagcagctgtttccaacattgtgttcaaagcagaaaatcctgagcctctagtgtttggtgtgaagtacaatgcaagttcttttgccaagttcacgcttattgtgacagatgtgaatgaagcacctcaattttcccaacacgtattccaagcgaaagtcagtgaggatgtagctataggcactaaagtgggcaatgtgactgccaaggatccagaaggtctggacataagctattcactgaggggagacacaagaggttggcttaaaattgaccacgtgactggtgagatctttagtgtggctccattggacagagaagccggaagtccatatcgggtacaagtggtggccacagaagtaggggggtcttccttaagctctgtgtcagagttccacctgatccttatggatgtgaatgacaaccctcccaggctagccaaggactacacgggcttgttcttctgccatcccctcagtgcacctggaagtctcattttcgaggctactgatgatgatcagcacttatttcggggtccccattttacattttccctcggcagtggaagcttacaaaacgactgggaagtttccaaaatcaatggtactcatgcccgactgtctaccaggcacacagactttgaggagagggcgtatgtcgtcttgatccgcatcaatgatgggggtcggccacccttggaaggcattgtttctttaccagttacattctgcagttgtgtggaaggaagttgtttccggccagcaggtcaccagactgggatacccactgtgggcatggcagttggtatactgctgaccacccttctggtgattggtataattttagcagttgtgtttatccgcataaagaaggataaaggcaaagataatgttgaaagtgctcaagcatctgaagtcaaacctctgagaagctgaatttgaaaaggaatgtttgaatttatatagcaagtgctatttcagcaacaaccatctcatcctattacttttcatctaacgtgcattataattttttaaacagatattccctcttgtcctttaatatttgctaaatatttcttttttgaggtggagtcttgctctgtcgcccaggctggagtacagtggtgtgatcccagctcactgcaacctccgcctcctgggttcacatgattctcctgcctcagcttcctaagtagctgggtttacaggcacccaccaccatgcccagctaatttttgtatttttaatagagacggggtttcgccatttggccaggctggtcttgaactcctgacgtcaagtgatctgcctgccttggtctcccaatacaggcatgaaccactgcacccacctacttagatatttcatgtgctatagacattagagagatttttcatttttccatgacatttttcctctctgcaaatggcttagctacttgtgtttttcccttttggggcaagacagactcattaaatattctgtacattttttctttatcaaggagatatatcagtgttgtctcatagaactgcctggattccatttatgttttttctgattccatcctgtgtccccttcatccttgactcctttggtatttcactgaatttcaaacatttgtcagagaagaaaaaagtgaggactcaggaaaaataaataaataaaagaacagccttttgcggccgcgaattc

SEQ ID NO: 782 - DNA, 2441 bp, Homo sapiens
tctgattgacttcaagaaggagtcagagatcagcttaagggcaaaggctggaagcagagcgaactgggagcagagcacacagagccgtggagcgagagatgccggccctgggctgggccgtggctgccatcctgatgctgcagacggccatggcggagccctccccggggactctgcccaggaaggcaggggtgttttcagacctaagcaaccaagagctgaaggcagtgcacagcttcctctggtccaagaaggagctgaggctgcagccctccagtaccaccaccatggccaagaacaccgtgtttctcatcgagatgctgctgcccaagaagtaccatgtgctgaggtttctggataaaggtgaaaggcatcctgtgcgggaagcccgtgccgtcatcttctttggtgaccaggagcatcccaatgtcaccgagtttgctgtggggcccctgccagggccctgctacatgcgagcactgtcccccaggcctgggtaccagtcctcctgggcatcgaggcccatctccacagcagagtatgccctcctctaccacaccctgcaggaagccaccaagcccctgcatcagttcttcctcaataccacaggcttctcattccaagactgccatgacagatgcctggccttcaccgatgtggccccccggggtgtggcttctggccagcgccgcagttggcttatcatacagcgctatgtagaaggctactttctgcaccccactgggctggagctcctcgtggatcatgggagcacagatgctgggcactgggccgtggagcaggtgtggtacaacgggaagttctatgggagcccagaggaactggctcggaagtatgcagatggagaggtggacgtggtggtcctggaggacccgctgcctgggggcaaggggcatgacagcacagaggagccgcccctcttctcctcccacaagccccgcggggacttccccagccccatccatgtgagcggcccccgcttggtccagccccacggccctcgcttcaggctggagggcaacgctgtgctctacggcggctggagctttgccttccggctgcgctcctccttcgggctgcaggtcctgaacgtgcacttcggcggagagcgcattgcctatgaggtcagcgtgcaagaggcagtggcgctgtatggaggacacacacctgcaggcatgcagaccaagtacctcgatgtcggctggggcctgggcagcgtcactcatgagttagcccccggcatcgactgcccggagaccgccaccttcctggacactttccactactatgatgccgatgacccggtccattatccccgagccctctgcctctttgaaatgcccacaggggtgccccttcggcggcactttaattccaactttaaaggtggcttcaacttctatgcggggctgaagggccaggtgctggtgctgcggacaacttcaactgtctacaattatgattacatttgggactttatcttctaccccaacggggtgatggaggccaagatgcatgccactggctacgtccacgccaccttctacacccccgaggggctgcgccacggcactcgcctgcacacccacctgattggcaacatacacactcacttggtgcactaccgcgtagacctggatgtggcaggcaccaagaacagcttccagacactgcagatgaagctagaaaacatcaccaacccctggagcccaagacaccgcgtggtccagccaactctggagcagacgcagtactcctgggagcgccaggcggccttccgcttcaaaaggaagctgcctaagtacctgctctttaccagcccccaggagaacccctggggccacaagcgcagctaccgcctgcagatccactccatggccgaccaggtgctgcccccaggctggcaggaggagcaggccatcacctgggcaaggtaccccctggcagtgaccaagtaccgggagtcggagctgtgcagcagcagcatctaccaccagaacgacccctggcacccgcccgtggtctttgagcagtttcttcacaacaacgagaacattgaaaatgaggacctggtggcctgggtgacggtgggcttcctgcacatcccccactcagaggacattcccaacacagccacacctgggaactccgtgggcttcctgctccggccattcaacttcttcccagaggacccctccctggcatccagagacactgtgatcgtgtggcctcgggacaacggccccaactacgtccagcgctggatccctgaggacagggactgctcgatgcctcccccttttagctacaatgggacctatagacctgtgtgaccagcccccagttcctcccccagttcctcccaggaagcccaggagcctcactggggcagacaataaaccctcagagcctcaaaaaaa

SEQ ID NO: 783 - DNA, 2280 bp, Homo sapiens; identical to SEQ ID NO: 233

SEQ ID NO: 784 - DNA, 1897 bp, Homo sapiens
gacgagagaaagcgagtgtccctctcgcgccccaggccggtgtacccccgcactccgcgccccggcctagaagctctctctccccgctccccggcccggcccccgccccgccccgccccagcccgctggcgccatggagcgctggccttggccgtcgggcggcgcctggctgctcgtggctgcccgcgcgctgctgcagctgctgcgctcagacctgcgtctgggccgcccgctgctggcggcgctggcgctgctggccgcgctcgactggctgtgccagcgcctgctgcccccgccggccgcactcgccgtgctggccgccgccggctggatcgcgttgtcccgcctggcgcgcccgcagcgcctgccggtggccactcgcgcggtgctcatcaccggctgtgactctggttttggcaaggagacggccaagaaactggactccatgggcttcacggtgctggccaccgtattggagttgaacagccccggtgccatcgagctgcgtacctgctgctcccctcgcctaaggctgctgcagatggacctgaccaaaccaggagacattagccgcgtgctagagttcaccaaggcccacaccaccagcaccggcctgtggggcctcgtcaacaacgcaggccacaatgaagtagttgctgatgcggagctgtctccagtggccactttccgtagctgcatggaggtgaatttctttggcgcgctcgagctgaccaagggcctcctgcccctgctgcgcagctcaaggggccgcatcgtgactgtggggagcccagcgggggacatgccatatccgtgcttgggggcctatggaacctccaaagcggccgtggcgctactcatggacacattcagctgtgaactccttccctggggggtcaaggtcagcatcatccagcctggctgcttcaagacagagtcagtgagaaacgtgggtcagtgggaaaagcgcaagcaattgctgctggccaacctgcctcaagagctgctgcaggcctacggcaaggactacatcgagcacttgcatgggcagttcctgcactcgctacgcctggccatgtccgacctcaccccagttgtagatgccatcacagatgcgctgctggcagctcggccccgccgccgctattaccccggccagggcctggggctcatgtacttcatccactactacctgcctgaaggcctgcggcgccgcttcctgcaggccttcttcatcagtcactgtctgcctcgagcactgcagcctggccagcctggcactaccccaccacaggacgcagcccaggacccaaacctgagccccggcccttccccagcagtggctcggtgagccatgtgcacctatggcccagccactgcagcacaggaggctccgtgagcccttggttcctccccgaaaacccccagcattacgatcccccaagtgtcctggaccctggcctaaagaatcccacccccacttcatgcccactgccgatgcccaatccaggcccggtgaggccaaggtttcccagtgagcctctgcgcctctccactgtttcatgagcccaaacaccctcctggcacaacgctctaccctgcagcttggagaactccgctggatggggagtctcatgcaagacttcactgcagcctttcacaggactctgcagatagtgcctctgcaaactaaggagtgactaggtgggttggggaccccctcaggattgtttctcggcaccagtgcctcagtgctgcaattgagggctaaatcccaagtgtctcttgactggctcaagaattagggccccaactacacacccccaagccacagggaagcatgtactgtacttcccaattgccacattttaaataaagacaaatttttatttcttct

SEQ ID NO: 785 - DNA, 1823 bp, Homo sapiens
cccccaatttcccagctgctaaaggaagaggaaggtacctgtgcgtgcacgcagacgggaagggctggggaagcgggaggactgagaaaaccagatcttagcaaagcaatgtctcaagatggtgcttctcagttccaagaagtcattcggcaagagctagaattatctgtgaagaaggaactagaaaaaatactcaccacagcatcatcacatgaatttgagcacaccaaaaaagacctggatggatttcggaagctatttcatagatttttgcaagaaaaggggccttctgtggattggggaaaaatccagagaccccctgaagattcgattcaaccctatgaaaagataaaggccaggggcctgcctgataatatatcttccgtgttgaacaaactagtggtggtgaaactcaatggtggtttgggaaccagcatgggctgcaaaggccctaaaagtctgattggtgtgaggaatgagaatacctttctggatctgactgttcagcaaattgaacatttgaacaaaacctacaatacagatgtccctcttgttttaatgaactcttttaacacggatgaagataccaaaaaaatactacagaagtacaatcattgtcgtgtgaaaatctacactttcaatcaaagcaggtacccgaggattaataaagaatctttacggcctgtagcaaaggacgtgtcttactcaggggaaaatacagaagcttggtaccctccaggtcatggtgatatttacgccagtttctacaactctggattgcttgatacctttataggagaaggcaaagagtatatttttgtgtctaacatagataatctgggtgccacagtggatctgtatattcttaatcatctaatcaacccacccaatggaaaacgctgtgaatttgtcatggaagtcacaaataaaacacgtgcagatgtaaagggcgggacactcactcaatatgaaggcaaactgagactggtggaaattgctcaagtgccaaaagcacatgttgacgagttcaagtctgtatcaaagttcaaaatatttaatacaaacaacctatggatttctcttgcagcagttaaaagactgcaggagcaaaatgccattgacatggaaatcattgtgaatgcaaagactttggatggaggcctgaatgtcattcaattagaaactgcagtaggggctgccatcaaaagctttgagaattctctaggtattaatgtgccaaggagccgttttctgcctgtcaaaaccacatcagatctcttgctggtgatgtcaaacctctatagtcttaatgcaggatctctgacaatgagtgaaaagcgggaatttcctacagtgcccttggttaaattaggcagttcttttacgaaggttcaagattatctaagaagatttgaaagtataccagatatgcttgaattggatcacctcacagtttcaggagatgtgacatttggaaaaaatgtttcattaaagggaacggttatcatcattgcaaatcatggtgacagaattgatatcccacctggagcagtattagagaacaagatagtgtctggaaaccttcgcatcttggaccactgaaatgaaaaatactgtggacacttaaataatgggctagtttcttacaatgaaatgttctctaggatttaggcactaaaaggtactttactatgttactgtaccctgcagtgttgatttttaaaatagagttttctgcagtatgcttttagtctaagaaaagcacagatggtgcaatactttccttctttgaagagatcccaaagttagttactcttaagtgc

SEQ ID NO: 786 - DNA, 1429 bp, Homo sapiens
cagcatggctacgaaatgtgggaattgtggacccggctactccacccctctggaggccatgaaaggacccagggaagagatcgtctacctgccctgcatttaccgaaacacaggcactgaggccccagattatctggccactgtggatgttgaccccaagtctccccagtattgccaggtcatccaccggctgcccatgcccaacctgaaggacgagctgcatcactcaggatggaacacctacagcagctgcttcggtgatagcaccaagtcgcgcaacaagctggtcttgcccagtctcatctcctctcgcatctatgtggtggacgtgggctctgagcccgggccccaaaagctgcacaaggtcattgagcccaaggacatccatgccaagtgcgaactggcctgtctccacaccagccactgcctggccagcggggaagtgatgatcagctccctgggggacgtcaagggcaatggcaaagggggttttgtgctgctggatggggagacgttcgaggtgaaggggacatgggagagacctgggggtgctgcaccgttgggctatgacttctggtaccagcctcgacacaatgtcatgatcagcactgagtgggcagctcccaatgtcttacgagatggctttaaccccgctgatgtggaggctggactgtacgggagccacttatatgtatgggactggcagcgccatgagattgtgcagaccctgtctctaaaagatgggctgatacccttggagatccgcttcctgcacaacccaagtgccacccagggttttgtaggctgtgcctcagctccaaacatccagcgcttctacaaaacgagggaaggtacatggtcagtggagaaggtgatccaggtgccccccaagaaagtgaagggctggctgctgccaggggtgccaggcctgatcaccgacatcctgctctccctggacgaccgcttcctctacttcagcaactggctgcatggggacctgaggcagtatgacatctctgacccacagagaccccgcctcacaggacagctcttcctcggaggcagcattgttaagggaggccctgtgcaagtgctggaggacgaggaactaaagtcccagccagagcccctagtggtcaagggaaaacgggtggctggaggccctcagatgatccagctcagcctggatggcaagcgcctctacatcaccacgtcgctgtacagtgcctgggaaaagcagttttaccctgatctcatcagggaaggctctgtaatgctgcaggttgatgtagacacagtaaaaggagggctgaagttgaaccccaactgcctggtggacttcgggaaggagccccttggcccagccctggctcacgagcttcgctaccctgggggcgattgtagctctgacatctggatttgaaggctc

SEQ ID NO: 787 - DNA, 5926 bp, Homo sapiens; identical to SEQ ID NO: 247

SEQ ID NO: 788 - DNA, 2254 bp, Homo sapiens
caaccatatccaagcctttgcccgaatacatcctatctgccacacatccagcgtgaggtccctccagctacaaggtgggcaccatggcggagaagtttgactgccactactgcagggatcccttgcaggggaagaagtatgtgcaaaaggatggccaccactgctgcctgaaatgctttgacaagttctgtgccaacacctgtgtggaatgccgcaagcccatcggtgcggactccaaggaggtgcactataagaaccgcttctggcatgacacctgcttccgctgtgccaagtgccttcaacccttggccaatgagacctttgtggccaaggacaacaagatcctgtgcaacaagtgcaccactcgggaggacttccccaagtgcaaggggtgcttcaaggccattgtggcaggagatcaaaacgtggagtacaaggggaccgtctggcacaaagactgcttcacctgtagtaactgcaagcaagtcatcgggactggaagcttcttccctaagggggaggacttctactgcgtgacttgccatgagaccaagttggccaagcattgcgtgaagtgcaacaaggccatcacatctggaggaatcacttaccaggatcagccctggcatgccgattgctttgtgtgtgttacctgctctaagaagctggctgggcagcgtttcaccgctgtggaggaccagtattactgcgtggattgctacaagaacttcgtggccaagaagtgtgctggatgcaagaaccccatcactgggtttggtaaaggctccagtgtggtggcctatgaaggacaatcctggcacgactactgcttccactgcaaaaaatgctccgtgaatctggccaacaagcgctttgttttccaccaggagcaagtgtattgtcccgactgtgccaaaaagctgtaaactgacaggggctcctgtcctgtaaaagggcatttgaatctcgttctttgtgtccttactttctgccctataccatcaataggggaagagtggtccttcccttctttaaagttcctcccttccgtcttttctcccattttacagtattactcaaataagggcacacagtgatcatattagcatttagcaaaaagcaaccctgcagcaaagtgaatttctgtccggctgcaatttaaaaatgaaaacttaggtagattgactcttctgcatgtttctcatagagcagaaaagtgctaatcatttagccacttagtgatgtaagcaagaagcataggagataaaacccccactgagatgcctctcatgcctcagctgggacccaccgtgtagacacacgacatgcaagagttgcagcggctgctccaactcactgctcaccctcttctgtgagcaggaaagaaccctactgacatgcatggtttaacttcctcatcagaactctgcccttccttctgttcttttgtgctttcaaataactaacacgaacttccagaaaattaacatttgaacttagctgtaattctaaactgacctttccccgtactaacgtttggtttccccgtgtggcatgttttctgagcgttcctactttaaagcatggaacatgcaggtgatttgggaagtgtagaaagacctgagaaaacgagcctgtttcagaggaacatcgtcacaacgaatacttctggaagcttaacaaaactaaccctgctgtcctttttattgtttttaattaatatttttgttttaattgatagcaaaatagtttatgggtttggaaacttgcatgaaaatattttagccccctcagatgttcctgcagtgctgaaattcatcctacggaagtaaccgcaaaactctagagggggagttgagcaggcgccagggctgtcatcaacatggatatgacatttcacaacagtgactagttgaatcccttgtaacgtagtagttgtctgctctttgtccatgtgttaatgaggactgcaaagtcccttctgttgtgattcccaggacttttcctcaagaggaaatctggatttccacctaccgcttacctgaaatgcaggatcacctacttactgtattctacattattatatgacatagtataatgagacaatatcaaaagtaaacatgtaatgacaatacatactaacattcttgtaggagtggttagagaagctgatgcctcatttctacattctgtcattagctattatcatctaacgtttcagtgtatccttacagaaataaagcagcatatgaat

SEQ ID NO: 789 - DNA, 2717 bp, Homo sapiens
cagggtaacgctgtcttgtggacccgcacttcccacccgagacctctcactgagcccgagccgcgcgcgacatgagccacgggaagggaaccgacatgctcccggagatcgccgccgccgtgggcttcctctccagcctcctgaggacccggggctgcgtgagcgagcagaggcttaaggtcttcagcggggcgctccaggaggcactcacagagcactacaaacaccactggtttcccgaaaagccgtccaagggctccggctaccgctgcattcgcatcaaccacaagatggaccccatcatcagcagggtggccagccagatcggactcagccagccccagctgcaccagctgctgcccagcgagctgaccctgtgggtggacccctatgaggtgtcctaccgcattggggaggacggctccatctgcgtcttgtacgaggaggccccactggccgcctcctgtgggctcctcacctgcaagaaccaagtgctgctgggccggagcagcccctccaagaactacgtgatggcagtctccagctaggcccttccgcccccgccctgggcgccgccgtgctcatgctgccgtgacaacaggccaccacatacctcaacctggggaactgtatttttaaatgaagagctatttatatatattatttttttttaagaaaggaggaaaagaaaccaaaagttttttttaagaaaaaaaatccttcaagggagctgcttggaagtggcctccccaggtgcctttggagagaactgttgcgtgcttgagtctgtgagccagtgtctgcctataggagggggagctgttagggggtagacctagccaaggagaagtgggagacgtttggctagcaccccaggaagatgtgagagggagcaagcaaggttagcaactgtgaacagagaggtcgggatttgccctgggggaggaagagaggccaagttcagagctctctgtctcccccagccagacacctgcatccctggctcctctattactcaggggcattcatgcctggacttaaacaatactatgttatcttttcttttatttttctaatgaggtcctgggcagagagtgaaaaggcctctcctgattcctactgtcctaagctgcttttcttgaaatcatgacttgtttctaattctaccctcaggggcctgtagatgttgctttccagccaggaatctaaagctttgggttttctgagggggggaggagggaactggaggttattggggttaggatggaagggaactctgcacaaaacctttgctttgctagtgctgctttgtgtgtatgtgtggcaaataatttgggggtgatttgcaatgaaattttgggacccaaagagtatccactggggatgttttttggccaaaactcttccttttggaaccacatgaaagtcttgatgctgctgccatgatccctttgagaggtggctcaaaagctacagggaactccaggtcctttattactgccttcttttcaaaagcacaactctcctctaaccctcccctcccccttcccttctggtcgggtcatagagctaccgtattttctaggacaagagttctcagtcactgtgcaatatgccccctgggtcccaggagggtctggaggaaaactggctatcagaacctcctgatgccctggtgggcttagggaaccatctctcctgctctccttgggatgatggctggctagtcagccttgcatgtattccttggctgaatgggagagtgccccatgttctgcaagactacttggtattcttgtagggccgacactaaataaaagccaaaccttgggcactgttttttctccctggtgctcagagcacctgtgggaaaggttgctgtctgtctcagtacaatccaaatttgtcgtagacttgtgcaatatatactgttgtgggttggagaaaagtggaaagctacactgggaagaaactcccttccttcaatttctcagtgacattgatgaggggtcctcaaaagacctcgagtttcccaaaccgaatcaccttaagaaggacagggctagggcatttggccaggatggccaccctcctgctgttgccccttagtgaggaatcttcaccccacttcctctacccccaggttctcctccccacagccagtcccctttcctggatttctaaactgctcaattttgactcaaaggtgctatttaccaaacactctccctacccattcctgccagctctgcctccttttcaactctccacattttgtattgccttcccagacctgcttccagtctttattgctttaaagttcactttgggcccacagacccaagagctaattttctggtttgtgggttgaaacaaagctgtgaatcactgcaggctgtgttcttgcatcttgtctgcaaacaggtccctgcctttttagaagcagcctcatggtctcatgcttaatcttgtctctcttctcttctttatgatgttcactttaaaaacaacaaaacccctgagctggactgttgagcaggcctgtctctcctattaagtaaaaataaatagtagtagtatgtttgtaagctattctgacagaaaagacaaaggttactaattgtatgatagtgtttttatatggaagaatgtacagcttatggacaaatgtacacctttttgttactttaataaaaatgtagtaggataaaaaaaaa

SEQ ID NO: 790 - DNA, 3327 bp, Homo sapiens
cacacctttccaaggacccccaaactctgctccgtgcacgtcaaatgctcctttcccttgtgtccaaccccctacccctctccctaacacccctcttctcaacaagactcagcctctccccgaggtgggtgagcatccttgaggtttcccacccttaactgctgtgtccccggatggagccagagaaatgtggtgggggggccggggcagagtttcaacattgccccccagaaggaggagccagagatggggtctgtccaggaaaacaggatgccggagcccaggagtcgtcagcctagcagttgcctggcctccagatgcctcccaggggagcagatcctagcatgggccccaggggtgaggaagggcctggaaccagaattgtctggaaccctgatctgtaccaactttagggtcaccttccagccctgtggatggcagtggaatcaggacactcccttgaacagtgaatacgattttgccctggtcaacattggacgattagaggctgtgagcggcttgtcccgagtccagctcctccgtccagggtccctgcataaatttatccctgaggagattctgattcatggccgagacttccggctgctcagagttggttttgaggctggaggcctagagcctcaggcttttcaggtgaccatggccattgtccaagccagagctcagagcaatcaagcccaacagtattcggggataaccctgagcaaggctggccagggttctggctccagaaaaccaccaattcctctcatggagacagcggaagactgggagactgagcggaagaagcaggcagccagaggctggagggtcagcacggtcaacgagaggttcgacgtagccaccagcctcccccgttacttctgggtccctaaccgaattctggacagtgaggtcaggagagcatttggccactttcatcagggccgtggaccggtcagtgtgatggttagggtaatggctgtggattagagggtcatgtgggccagggacatcgtggagggaggaacctctgtgaggtcagtgtgggggcaagggtagcgtggagctaggcatttctcccacaatgaccctcttctgccccatgtgaagcgcttgtcctggcatcaccctgggggcagtgatcttctccgctgtggaggcttctatacagccagtgaccctaacaaggaggatatcagagcagtggagttgatgcaccaggctgggcattcagatgttgtcctggtagacactatggatgagctgcccagccttgcagatgtccaacttgcccacctgaggctgagggccctctgcctgcctgattcatctgtagctgaggataaatgctttcagccctggaaggaacacgatggctggactatgtcagggcttgtcttcgaaaggccagtgacatttcagtattagtgacatccagggttcgttctgtaatacttcaaggctccggtgtttctcctcttccttgattgtgtctggcagctcctccagcagtttccagctgattttgaattctctgagtttttccttcttgctcttcatgacagtgtcagggttcctgacacccttaccttcctgagaaataccccctgggagcgcggaaagcagagcggacaggtcagtgacttctatttttgactcgtgtttttttttccattgagatgtactctctgaagtttggtcttgatttgttttatgagaagtgaggtctgtgagtggggagggggagatttattctcattttcaggacgagacttttgccctacatctttcctagaataagaggtgagaatctcatgatttgtctctagatgtgggaggattgtgtgtaaccatcctttttcttgcttcctctgtccagttaaactcctatacacaagtctacaccccaggatactccagcctccagctgggaactcttttaacctgcagctgtctgtctgggactgggatttacgttatagcaatgcacagatactacaattccagaatcctggctatgacccagaacactgtccagattcctggctccctagaccacagccaagcttcatggttcctggaccccccagttttgtgtggctcttctctagaggagcattgacccccctgaatcagctctgtccttggcgggacagtccttccctgctggcagtctcttctcgttggctccctcgacctgctatctcctctgaaagctggctgaccaggaatggggtctcccctcacattggggagcttgccctttacctccagggctgctgctgcctgggtatctgggaccccagatcaggctctggagacgctgctacctgaggggaaggcctgaggtccaggtaagaagggaaaatagactgggagtgggacaagggacttgactctgctgaaccagatgaacaggagctggaaaggcaaggagctgaagcctctgggagtctgggaagtgaagttctactcctcttggcatcaaacaaggtttgggagtgtaggaggtgcgggaaagtgcttgtggcttagattaagtggaatttagggcatagctgaaaggggaaacagaattaaagacaccagaagtagcagagaagcagggggccagagctacaacagtattcttctctgttcctctttgcctcctccccagatgggcctctcatctcccacaatctctggcctccaggatgagctatcccatcttcaggagttattacggaaaggacaccaagaatatctcctgaggatcactccaagaaaagagatccacataccattctcaatcccactgaaattgctggcattctcaaaggcagggcagagggggatctggggtagagggagggttctgtctaatcttttttttttcttttgtatctgcacttgcagcctcagctttcatacttcagcccttaagttcactaagaaggtctgagtttctgctgcagatagtggtgttaactgctccaactcttgtcttgcttagtttctacaaatatttttgcttcttgtcatttgaaggattaagaaacaaaaacaatccagaaattgatcggtttttttaggccaatcccatcccttctggataaccagatgttaaatcatgagatcagagatgctgttcatcagtcccaacaagatggcctagaaatcgcattctcacctcgccttgctgctgctttaattccaagttctatttcttcccttatagttttctatgggaatgaggcggatacaggaaacaccctatctcctctgtatttttgtagtggaatttctatttaaggggctcattaaagcatagtatttatacac

SEQ ID NO: 791 - DNA, 2793 bp, Homo sapiens
ctacccctttgtgagcagtctaggactttgtacacctgttaagtagggagaaggcaggggaggtggctggtttaaggggaacttgagggaagtagggaagactcctcttgggacctttggagtaggtgacacatgagcccagccccagctcacctgccaatccagctgaggagctcacctgccaatccagctgaggctgggcagaggtgggtgagaagagggaaaattgcagggacctccagttgggccaggccagaagctgctgtagctttaaccagacagctcagacctgtctggaggctgccagtgacaggttaggtttagggcagagaagaagcaagaccatggtggggaagatgtggcctgtgttgtggacactctgtgcagtcagggtgaccgtcgatgccatctctgtggaaactccgcaggacgttcttcgggcttcgcagggaaagagtgtcaccctgccctgcacctaccacacttccacctccagtcgagagggacttattcaatgggataagctcctcctcactcatacggaaagggtggtcatctggccgttttcaaacaaaaactacatccatggtgagctttataagaatcgcgtcagcatatccaacaatgctgagcagtccgatgcctccatcaccattgatcagctgaccatggctgacaacggcacctacgagtgttctgtctcgctgatgtcagacctggagggcaacaccaagtcacgtgtccgcctgttggtcctcgtgccaccctccaaaccagaatgcggcatcgagggagagaccataattgggaacaacatccagctgacctgccaatcaaaggagggctcaccaacccctcagtacagctggaagaggtacaacatcctgaatcaggagcagcccctggcccagccagcctcaggtcagcctgtctccctgaagaatatctccacagacacatcgggttactacatctgtacctccagcaatgaggaggggacgcagttctgcaacatcacggtggccgtcagatctccctccatgaacgtggccctgtatgtgggcatcgcggtgggcgtggttgcagccctcattatcattggcatcatcatctactgctgctgctgccgagggaaggacgacaacactgaagacaaggaggatgcaaggccgaaccgggaagcctatgaggagccaccagagcagctaagagaactttccagagagagggaggaggaggatgactacaggcaagaagagcagaggagcactgggcgtgaatccccggaccacctcgaccagtgacaggccagcagcagagggcggcggaggaagggttaggggttcattctcccgcttcctggcctcccttctcctttctaagccctgttctcctgtccctccatcccagacattgatggggacatttcttccccagtgtcagctgtggggaacatggctggcctggtaagggggtccctgtgctgatcctgctgacctcactgtcctgtgaagtaacccctcctggctgtgacacctggtgcgggcctggccctcactcaagaccaggctgcagcctccacttccctcgtagttggcaggagctcctggaagcacagcgctgagcatggggcgctcccactcagaactctccagggaggcgatgccagccttggggggtgggggctgtcctgctcacctgtgtgcccagcacctggaggggcaccaggtggagggtttgcactccacacatctttcttgaatgaatgaaagaataagtgagtatgcttgggccctgcattggcctggcctccagctcccactccctttccaacctcacttcccgtagctgccagtatgttccaaaccctcctgggaaggccacctcccactcctgctgcacaggccctggggagcttttgcccacacactttccatctctgcctgtcaatatcgtacctgtccctccaggcccatctcaaatcacaaggatttctctaaccctatcctaattgtccacatacgtggaaacaatcctgttactctgtcccacgtccaatcatgggccacaaggcacagtcttctgagcgagtgctctcactgtattagagcgccagctccttggggcagggcctgggcctcatggcttttgctttccctgaagccctagtagctggcgcccatcctagtgggcacttaagcttaattggggaaactgctttgattggttgtgccttcccttctctggtctccttgagatgatcgtagacacagggatgattcccacccaaacccacgtattcattcagtgagttaaacacgaattgatttaaagtgaacacacacaagggagcttgcttgcagatggtctgagttcttgtgtcctggtaattcctctccaggccagaataattggcatgtctcctcaacccacatggggttcctggttgttcctgcatcccgatacctcagccctggccctgcccagcccatttgggctctggttttctggtggggctgtcctgctgccctcccacagcctccttctgtttgtcgagcatttcttctactcttgagagctcaggcagcgttagggctgcttaggtctcatggaccagtggctggtctcacccaactgcagtttactattgctatcttttctggatgatcagaaaaataattccataaatctattgtctacttgcgattttttaaaaaatgtatatttttatatatattgttaaatcctttgcttcattccaaatgctttcagtaataataaaattgtgggtgg

SEQ ID NO: 792 - DNA, 372 bp, Homo sapiens
agtcccagcgaacccgcgtgcaacctgtcccgactctagccgcctcttcagcacgccatggatcccaactgctcctgcgccgccggtgactcctgcacctgcgccggttcctgcaaatgcaaagagtgcaaatgcacttcgtgcaagaaaagctgctgctcctgctgccctgtgggctgtgccaagtgtgcccaaggctgcatctgcaaaggggcgtcggacaagtgcagctgctgcgcctgatgctgggacagccccgctcccagatgtaaagaacgcgacttccacaaacctggattttttatgtacaaccctgaccgtgaccgtttgctatattcctttttctatgaaataatgtgaatgataataaaa

SEQ ID NO: 793 - DNA, 3565 bp, Homo sapiens
gcagccgggcggccgcagaagcgcccaggcccgcgcgccacccctctggcgccaccgtggttgagcccgtgacgtttacactcattcataaaacgcttgttataaaagcagtggctgcggcgcctcgtactccaaccgcatctgcagcgagcaactgagaagccaagactgagccggcggccgcggcgcagcgaacgagcagtgaccgtgctcctacccagctctgcttcacagcgcccacctgtctccgcccctcggcccctcgcccggctttgcctaaccgccacgatgatgttctcgggcttcaacgcagactacgaggcgtcatcctcccgctgcagcagcgcgtccccggccggggatagcctctcttactaccactcacccgcagactccttctccagcatgggctcgcctgtcaacgcgcaggtaaggctggcttcccgtcgccgcggggccgggggcttggggtcgcggaggaggagacaccgggcgggacgctccagtagatgagtagggggctcccttgtgcctggagggaggctgccgtggccggagcggtgccggctcgggggctcgggacttgctctgagcgcacgcacgcttgccatagtaagaattggttcccccttcgggaggcaggttcgttctgagcaacctctggtctgcactccaggacggatctctgacattagctggagcagacgtgtcccaagcacaaactcgctaactagagcctggcttcttcggggaggtggcagaaagcggcaatcccccctcccccggcagcctggagcacggaggagggatgagggaggagggtgcagcgggcgggtgtgtaaggcagtttcattgataaaaagcgagttcattctggagactccggagcggcgcctgcgtcagcgcagacgtcagggatatttataacaaaccccctttcaagcaagtgatgctgaagggataacgggaacgcagcggcaggatggaagagacaggcactgcgctgcggaatgcctgggaggaaaagggggagacctttcatccaggatgagggacatttaagatgaaatgtccgtggcaggatcgtttctcttcactgctgcatgcggcactgggaactcgccccacctgtgtccggaacctgctcgctcacgtcggctttccccttctgttttgttctaggacttctgcacggacctggccgtctccagtgccaacttcattcccacggtcactgccatctcgaccagtccggacctgcagtggctggtgcagcccgccctcgtctcctctgtggccccatcgcagaccagagcccctcaccctttcggagtccccgccccctccgctggggcttactccagggctggcgttgtgaagaccatgacaggaggccgagcgcagagcattggcaggaggggcaaggtggaacaggtgaggaactctagcgtactcttcctgggaatgtgggggctgggtgggaagcagccccggagatgcaggagcccagtacagaggatgaagccactgatggggctggctgcacatccgtaactgggagccctggctccaagcccattccatcccaactcagactctgagtctcaccctaagaagtactctcatagtttcttccctaagtttcttaccgcatgctttcagactgggctcttctttgttctcttgctgaggatcttattttaaatgcaagtcacacctattctgcaactgcaggtcagaaatggtttcacagtggggtgccaggaagcagggaagctgcaggagccagttctactggggtgggtgaatggaggtgatggcagacacttttactgaatgtcggtctttttttgtgattattctagttatctccagaagaagaagagaaaaggagaatccgaagggaaaggaataagatggctgcagccaaatgccgcaaccggaggagggagctgactgatacactccaagcggtaggtactctgtgggttgctcctttttaaaacttaagggaaagttggagattgagcataagggcccttgagtaagactgtgtcttatgctttcctttatccctctgtatacaggagacagaccaactagaagatgagaagtctgctttgcagaccgagattgccaacctgctgaaggagaaggaaaaactagagttcatcctggcagctcaccgacctgcctgcaagatccctgatgacctgggcttcccagaagagatgtctgtggcttcccttgatctgactgggggcctgccagaggttgccaccccggagtctgaggaggccttcaccctgcctctcctcaatgaccctgagcccaagccctcagtggaacctgtcaagagcatcagcagcatggagctgaagaccgagccctttgatgacttcctgttcccagcatcatccaggcccagtggctctgagacagcccgctccgtgccagacatggacctatctgggtccttctatgcagcagactgggagcctctgcacagtggctccctggggatggggcccatggccacagagctggagcccctgtgcactccggtggtcacctgtactcccagctgcactgcttacacgtcttccttcgtcttcacctaccccgaggctgactccttccccagctgtgcagctgcccaccgcaagggcagcagcagcaatgagccttcctctgactcgctcagctcacccacgctgctggccctgtgagggggcagggaaggggaggcagccggcacccacaagtgccactgcccgagctggtgcattacagagaggagaaacacatcttccctagagggttcctgtagacctagggaggaccttatctgtgcgtgaaacacaccaggctgtgggcctcaaggacttgaaagcatccatgtgtggactcaagtccttacctcttccggagatgtagcaaaacgcatggagtgtgtattgttcccagtgacacttcagagagctggtagttagtagcatgttgagccaggcctgggtctgtgtctcttttctctttctccttagtcttctcatagcattaactaatctattgggttcattattggaattaacctggtgctggatattttcaaattgtatctagtgcagctgattttaacaataactactgtgttcctggcaatagtgtgttctgattagaaatgaccaatattatactaagaaaagatacgactttattttctggtagatagaaataaatagctatatccatgtactgtagtttttcttcaacatcaatgttcattgtaatgttactgatcatgcattgttgaggtggtctgaatgttctgacattaacagttttccatgaaaacgttttattgtgtttttaatttatttattaagatggattctcagatatttatatttttattttatttttttctaccttgaggtcttttgacatgtggaaagtgaatttgaatgaaaaatttaagcattgtttgcttattgttccaagacattgtcaataaaagcatttaagttgaatgcgaccaaccttgtgctcttttcattctggaagt

SEQ ID NO: 794 - DNA, 421 bp, Homo sapiens
attattagagtaacaatttattagcagacaaaacaaatgaaacctctaaatctcaacacacatacaggatcttacataataaacagcataaaacataagcttctagaagaaaagtatctgctattaaccaactccccctcctttccagtaggctgcaatacattaataactcatcctcatcccataagagggttaagcaatgatttacatggaattacatcaaggcacttgctttaattaaaaaatacagtataaaacatgttcctaaaagtcatcaaccttgaataattaaagaaaaaacaggcagtatacttttttggtgaatagacaagactgagaatttaagttcattcacctgtcaccctgatattgtcttggtttgtgtacaaagttccaaagaagaccaaaaaaagggtaggcc

SEQ ID NO: 795 - DNA, 698 bp, Homo sapiens
  misc_feature (1)..(698): n=a,t,g or c
gctcttgaacccagaaggcgaaggttgcagtgagccgagatcatgccattgtactctagcctgggtgacgggagcaagactccgtctcaaaaaaaaaaaaaaaaaaaaaaagaagtagagacagggagacggggtctcactgtgttgcctaggccggtcttgaactcctgggctcaagtgattctcccaccttgacctcctaaattgttgggattacaggtgtgagacagtgcacctggccgaaatagctcaagtttctgaaaaacaaatctgaatctatttgttattcttagcgtcactggtctggctttcagaattaacatacaaggttgccacacctagttctggcccagctttatggtcttttattccagtattccaccaaagtttgtttttcctgcattccagttctcaagtcttaaggataaagatngtacttgacagtttagtatatccataaaactatttgaaggtggttaaggttccttgggttcaattttccttaaaactttgcctgaatatnggaagattgtagggcaatgaaaaggtctactaaattaggaaaaccttgaaataaattagggatccnaggtaagagcccctaaacatcaagcaatctgggagtctgtaagaaatnaatattttttggataatcctaacnaatccacccngttggaagnggatccttgtccttgcaa

SEQ ID NO: 796 - DNA, 472 bp, Homo sapiens
  misc_feature (1)..(472): n=a,t,g or c
nnnnggnnnnnttnnnntaactggataaaacaatggctggttctagccctgagtgacagtcttaaggctagatccttcccatagtatcatctgtcctctggaatgactctcctgtccctaaaggggttaagagagagatcacctagaaatccctctggacacttgtgggttctttagggtttgagtttcttcttccccttgagcttcagagaggagagttggcatggttaaatctgaatggttacctcactgctgaaaacccagaggggcgtggcacactcgcttgtgtggaaaagcctctaaatgcatcccttcctttctttcctgcttcctttggcttacaattgaagcaggccgtggtaccatcacagtatgcagagacttcctcanctttcatatctagggaccacccccgatgcattggtgagggtgggcacttattaatgtctgntattgttaagccatccagncg

SEQ ID NO: 797 - DNA, 398 bp, Homo sapiens
caaagtttacaataatttattattgttgcatgacatttgccagtaaaataaattatagaaactatagagtctttataaactattttgtatatcatattcacttcctaatgcttactgcagtaactgtatgaaatttaattagattacgttttagcattagtcagaagatttaaaaaatatgtaaaatgttttcacagtactttggatttataaaagaccccattattttaacttttgtgcaacctgtttgaaatgtataaaaaaccttttacaaaccaaaaggtggcgtaaggttttactgagttgctgaagacatcttactttcttgaatttctacttaaacatccatgtggtgcactttttcaggcagtgtaataagtggcaaataaataatcaat

SEQ ID NO: 798 - DNA, 384 bp, Homo sapiens
ccaaaataacttttattactatataaaagaagtcaagaaaaaatagatgcatatttttcctacaaaattataaaatattcaggatagttaatattttttccataaatgcgctaagataaaaagatagaaatctttttcacttaaggttttcgagtaccttgtaggaattaaagaacaataatgttctttcttctacattttcctaaagacatagcagttacagtttcctgctggagttatctaaaaaaggacataccaagataaattttctatcatattgaaataaaattagcataaagctttacttctgtctttgtgcttttagattggcaactgtggtcaatcagtgctgcactggaatttccaactcagcaggggaaagaa

SEQ ID NO: 799 - DNA, 465 bp, Homo sapiens
  misc_feature (1)..(465): n=a,t,g or c
tttttcaactgcaataaaatcagtgcagttcagaaaactcgacctttcagtatccgagaaggcagctttgtaagcactttctgttcgaggaactttgttaagcagctgaggggaatctgacccagctcctgtgttgtctggtgtagacagggcaccagactgggagtcaagtggcctgggtgcttcttcactgccaccagcacttcctaataatggcaaatttacattttgttacggtgctcacagcttacaaaacacatacatgtgcatcatcacagtttgttcacctgtaagatgaaagggttggattctttgttttctgtggtcttttccagttctagtgccttgctagtctgatagtgtgaattattttttattacagctggcgctgctgctgcatcagggccatcctttctgcaagacacaatgaccacagcaaagagcgggaaagataactttccacgn

SEQ ID NO: 800 - DNA, 412 bp, Homo sapiens
tttttttttttcaaggttaataaacagctttatttgccttgtacagcatcaattttcttacattctcagttaattggccattaaagtgctggaaattttcttaatcatgataacatttgttaaaaagaaatcagaactaatatcaggaacatggcggcatgaaggaaacagttcccttacaaaacacagaaaatggaagcccctcatgttgagggggtgggttggacaatttgcaaacagattctaatttcctctcaccgtcagcaccaaactggctgggaccaccacccctgggtgaaagaaacaacactaaagaaccctaaaaacacccacacaccctgactaccaccacctctgggccatctgtgggcgtttgctgtttgaacagatccagtctccaggaaagaggaag

SEQ ID NO: 801 - DNA, 413 bp, Homo sapiens
ttttttttaaatcttttatgtatttattatgtttgttgcatcgagtggcataattgtttgaatacaaaactaaagaaattcagggaatttctccctaacatgcactgtaatagttaaaacacatacagacaactgcagattatgttagaatacaagattgttatttgctatttaccacaattgcaaaatcaacttgtcaaggaaagacaattagagtccttcaaatatcttgatgtttatgtgtttgatggctgtaatatacatgtaaattgtggagtatgacatacaaaaaattattgctttaaatatcattattgctagccccaaaaagagttgcaaaacatagctaagtgtatgtttttttcacatagcaggcatttgcctcccattccttttcctcaataaacaatagg

SEQ ID NO: 802 - DNA, 393 bp, Homo sapiens
aaatcaaacctttgatcatgtctttatttagatatagcccatcttgttgcaaaacagatatctcagcaacttacaaaaataaagtacaatagcataaaaaaaaaaagattagggtaaaggtaaaagcagaaagctagaatgaagcgagtctagtaggagactcagcacaattggaaaaaaaagggtctcgaatttgactttgagcttcccagcggccaaaacaaggaagaaaacatgactggttacaagattcctaccaacagttagtctgggactctggtacaaaaacagacctggtttataccttgactctactgcctgttggagacgtgaccctgagcaggttgcttaagctctctgaatttgaggctcatcacctgtaatggggaggaa

SEQ ID NO: 803 - DNA, 409 bp, Homo sapiens
  misc_feature (1)..(409): n=a,t,g or c
atcatagaatagatttatttacctgaaaccatnncngtgcgacgctcattgttaccagcacagaaagaaacaaactgatctctatttacagtctaaagtcaaacatgcgcagtgataaattgacatttagcattttattaagatnnatngcatcncantatttgnattgcaccaacatctgtctactgcttctgatttcnttaaataagttnnatttaatacagtgcganatagctgtctgcacactcagaaaatnactgaaaatgaactggaggcctacattttaaccattcaacacctgtagtgtttttaatgnatttataaatnagcaaactngtacaggggccaattaaaaagtagcatgttccaatgtcactggagaggggatccgggctacttacanccgaag

SEQ ID NO: 804 - DNA, 632 bp, Homo sapiens
  misc_feature (1)..(632): n=a,t,g or c
taaagaaacagaataatttttattgctaggttaatttattacaaagataataatagtctgttgaacttagttacagttaaacacactgtaccgattcaaaatcattatactagtttgatagcttnnngggangnnngagtgggctggggttccaggaattggaagtatcagggtggaaataggaactttataccaagccccatgaccagctgtgcttcaagtgagttttaaaattaattggtcccttccctgaagagggtctggctcagaagaaacaggaactggtagagctgcaccctgtccacagtgatccactactaaaaatactcatacctaggaggaccttaaacttctgaatgctggttcagtaaggctccactgtaaaatcaaacatcttttgtggtattcatttttttattgcttgatgtctggaacagttaccgaaactagacctgtatcgcgcatctctactagtgcttgggcctcaaagcagtgctcgtcacctaactgcacaaagaaatgctattaggtccaattgtgagataagctgaattataaatncccattttcagaacgacaggcacttaaagcncattaagtaaatccaaaatagatatnttaataagaatatt

SEQ ID NO: 805 - DNA, 472 bp, Homo sapiens
ttatttttagaaaaacagagcaaagtttattgaaatttcaagctacatttggaaaatcaaaatccaaatcctggaaccatacatcaggataaggtgtcaaaaagtggaaagtgttcactctcacaaaacccgctacagacaagctttctgggcacacctcccaggctccattggatcaaagccatccccttgttcatccctcatccacagtaggacaccatccttctgttcacttgaaagttttccacaataattacaaaacaaaacaaaaaacgttttcaaatgacactgtgaagcccaaactgatcttctctcaaccccattctatgtagtcagcaccagtgaatggtgggtttgggcattcaaaacaggacttcacgtttcagtgggacagctgggggaaagggttgcagcagcaaggcatccgtggccgcattcagaggctgggcccccctccttggcccctcgtgcc

SEQ ID NO: 806 - DNA, 425 bp, Homo sapiens; identical to SEQ ID NO: 291

SEQ ID NO: 807 - DNA, 432 bp, Homo sapiens
tgcagttaagggacgtgttttatttcatagctttctgcaagcaaaattgctctgatacaaaatgagttcaatgatacaggtgctactgtccactcaagcaaaagaaaacctcacatgtatatgaacgcactttatacttatattcttacagtataataggtctaatatccaggatgcctctggctcattgaaagcaatggcagagaaatgctgcaaggtacttgaatatcatagtactggcaagtgcttgaagtaacttcctgtgagttctctgtcagatactgcaaagactgcgtgtgggtgtgtttgtctttttgtcttccatcttttggtttacatttaaatcatctcaaaaaatatcccctggcatgtatcattcagcttctcagagtttccataaaaacaggaaaatgtcatgaggtatccctaacg

SEQ ID NO: 808 - DNA, 468 bp, Homo sapiens
ttttttttttttttttttttttttttttttttcagaagtaaaagatttttattgttctatagacacttctgaaaagagatctaattgagaaaatatacaaagcatttaagagtttcatccccagagactgactgaaggcgttacagccctcctctccaaggctcagggctgagaacggttagcatatcgaatgatcagtaaaaacatgcaaaagtgagaaggaaagggaaaaaggtgcattcccctaagctgagggggatggaatttcagaacagaggaggcagggtggacaagtaccaggtggctctccctttccctctgtgttatctttcaaaacagttccaagcttggagaaagcaatgagctccacctactcagcagaacccacggctcgtcccccgtggacgtgactgagcagtgaccttgcctgccccgttcctcagccgctccccctcgtgccgaattctt

SEQ ID NO: 809 - DNA, 4087 bp, Homo sapiens
gaattcatgccgttgggtggagtcagcgcccccaggctctacttggaaaacctttaagctcttttctttcgtaagctctctgggcgagggtggtggtatgttttgtgaggtttagcttagccccaaatcctcaagccccgccgccgccgctagtgcggtgcaggaaccgggccagtactgcgcccagggacagagcgctggggaggaacaaaggcggcgctaggctgtgttatccgagagatctttcgggggccgcgggcagcccgtcctgccgcgaccgagggtctgggcgtcccggctgggccccgtgtctgtgcgcacggtttcgctgatgctgaggggccactttctgtctcgcgttgttctctggggaccgggagaggaggaggcacccaaaaagagcgggggcgttgggcgagctcgggggacgtgggagggggaacgggaacaaagcgcagcctagggttagcgtgggaagaccctccgcggtctttggcgttttggaaagatacccacacattcccgggaaaacatggtgagtttctgcccggagcccccggagcgggtgtcagggcggcgaggggcggggttgtttgtttctggcttctatggcgttggagccactgggcgcggttcgcctcactgaacctcttctgtcaggagctgactgaaaaaaaaacaaaaaaacctttcatcattgcggaactgtaggctccaaaagggttttcttcactattataagttagatgacttttttttttcttgagcaaaatcataattcacttcacaagctctttaatgtctggtctggggacgccctgccctgaccgactgaagtgtgtgtgtgtgtgtgtgtgtgtgtgtgtgtgtgtctgtgggacgcctgccctgaccgactgaagtgtgtgtgtgtgtgtgtgtgtgtctgtctgtctcgtctggactgcacagttcagcgagggagaaaggcccactttgtgagggtaccgatggtcaggacccagggaaacgcccttccccgccgcccccccgccccgcccccaccacattcagcgaatagacaattgaaagtggtagccctaaagaccacagagaagaaaacctctattggatgcaaagaatatgaatattatgtgatgggtagagaatctcaggatgaaaatactattttgttgttttaaataaatatttcattatccttccactgggcttttattctttggtaccttttcatgtgatgcttgtttctaacttaggaacttttgtgtgtgtgtgtgtaagatacggataatttttcagcttttacagtggagaagatctggaaaaaggtttttttttaaaaaaaaaagtaatgaaattgctacagacaaagaagaattatactccgcttcccgttgtcccccgttccagtgcatcttaattaattcatttcaattcaggcacatggtcccgggcggtcagaggaggaaaactggcaaaacagcacaatgagatcatgtaggcagctgctggaaatagagcttgctctgttaaataatgtagcagacagtacaggctagcaccaggcacacagcaaatacagcaatgcagcaatgcagaaggcagaccttgtctaaactcctagtattgatggattctgcagtacagatgtccggattataatatcaagtcctattcagaggaaactttcatctttatttaaaagggaagaaagcagtaaaattaatcccaattaagtcataattggatttacttcattttacaaatttgtgctttgaatactgaatagcttttaaatatgaaaatcttctattcaagactggtagtaggccaatggctggatacccgtgctgacagggccaaggcgacaatcattattcagaccacacccatatgcagcatttgtagcaggtgattttccttaaatctttgtatcgtgctggggatatgacctcaaataatttagaaaaatatctgtatattattagaaatattttgaaatttcctataatttaaatgctaatacaccttaattttacatttttcacttttcctccccacagcgtgagtgcatctccatccacgttggccaggctggtgtccagattggcaatgcctgctgggagctctactgcctggaacacggcatccagcccgatggccagatgccaagtgacaagaccattgggggaggagatgattccttcaacaccttcttcagtgagacgggggctggcaagcatgtgccccgggcagtgtttgtagacttggaacccacagtcattggtgagttgacctcagtaacccaagtgagatcccagggtgctggacaggaggtctgtcctggggggctccgctggtcactcacccactctcctcccgctcctcgtcccctcctcctcctccccctgctcctcccccatcatgtctccagatgaagttcgcactggcacctaccgccagctcttccaccctgagcaactcatcacaggcaaagaagatgctgccaataactatgcccgagggcactacaccattggcaaggagatcattgacctcgtgttggaccgaattcgcaagctggtatgtttcttttcaagaataaagtaaattaatgagcctaaagaacacttttgaaataatgctttttttttcaaacacagaattgaactgttattttaataaagagtggaatgagtcattctttggggtttttaaaattcagttaaaatgaactatttgatgtcattttgtaaatgttaatgagaattttttaaaagcatttgtcaaataagatctaagtcctggagatgtatgaaagtgaaatatattactatgatgtactacaagataaactaacctttcctctgtcctctcttttgtataggccgaccagtgcacgcgtctccagggcttcttggttttccacagctttggtgggggaactggttctgggttcacctcgctgctcatggaacgtctctcagttgattatggcaagaagtccaagctggagttctctatttacccggcgccccaggtttccacagctgtagttgagccctacaactccatcctcaccacccacaccaccctggagcactctgattgtgccttcatggtagacaatgaggccatctatgacatctgtcgtagaaacctcgatattgagcgtccaacctatactaacctgaataggttaataggtcaaattgtgtcctccatcactgcttccctgagatttgatggagccctgaatgttgacctgacagaattccagaccaacctggtgccctatccccgcatccacttccctctggccacatatgcccctgtcatctctgctgagaaagcctaccatgaacagctttctgtagcagagatcaccaatgcttgctttgagccagccaaccagatggtgaaatgtgaccctggccatggtaaatacatggcttgctgcctgttgtaccgtggtgacgtggttcccaaagatgtcaatgctgccattgccaccatcaagaccaagcgtaccatccagtttgtggattggtgccccactggcttcaaggttggcatcaactaccagcctcccactgtggtgcctggtggagacctggccaaggtacagagagctgtgtgcatgctgagcaacaccacagccattgctgaggcctgggctcgcctggaccacaagtttgacctgatgtatgccaaacgtgcctttgttcactggtacgttggggaggggatggaggaaggtgagttttcagaggcccgtgaggacatggctgcccttgagaaggattatgaggaggttggtgtgcattctgttgaaggagagggtgaggaagaaggagaggaatactaaagttaaaacgtcacaaaggtgctgcttttacagggaagcttattctgttttaaacattgaaaatgttgtggtctgatcagttaatttgtatgtagcagtgtatgctctcatatcaattactgacctatgctctaaaacatgaatgcctttgttacagacccaagctgtccatttctgtgatgggttttgaataaagtattccctgtcttaaatgaattc

SEQ ID NO: 810 - DNA, 2602 bp, Homo sapiens
gccgtgtcgccaccatggctccgcaccgccccgcgcccgcgctgctttgcgcgctgtccctggcgctgtgcgcgctgtcgctgcccgtccgcgcggccactgcgtcgcggggggcgtcccaggcgggggcgccccaggggcgggtgcccgaggcgcggcccaacagcatggtggtggaacaccccgagttcctcaaggcagggaaggagcctggcctgcagatctggcgtgtggagaagttcgatctggtgcccgtgcccaccaacctttatggagacttcttcacgggcgacgcctacgtcatcctgaagacagtgcagctgaggaacggaaatctgcagtatgacctccactactggctgggcaatgagtgcagccaggatgagagcggggcggccgccatctttaccgtgcagctggatgactacctgaacggccgggccgtgcagcaccgtgaggtccagggcttcgagtcggccaccttcctaggctacttcaagtctggcctgaagtacaagaaaggaggtgtggcatcaggattcaagcacgtggtacccaacgaggtggtggtgcagagactcttccaggtcaaagggcggcgtgtggtccgtgccaccgaggtacctgtgtcctgggagagcttcaacaatggcgactgcttcatcctggacctgggcaacaacatccaccagtggtgtggttccaacagcaatcggtatgaaagactgaaggccacacaggtgtccaagggcatccgggacaacgagcggagtggccgggcccgagtgcacgtgtctgaggagggcactgagcccgaggcgatgctccaggtgctgggccccaagccggctctgcctgcaggtaccgaggacaccgccaaggaggatgcggccaaccgcaagctggccaagctctacaaggtctccaatggtgcagggaccatgtccgtctccctcgtggctgatgagaaccccttcgcccagggggccctgaagtcagaggactgcttcatcctggaccacggcaaagatgggaaaatctttgtctggaaaggcaagcaggcaaacacggaggagaggaaggctgccctcaaaacagcctctgacttcatcaccaagatggactaccccaagcagactcaggtctcggtccttcctgagggcggtgagaccccactgttcaagcagttcttcaagaactggcgggacccagaccagacagatggcctgggcttgtcctacctttccagccatatcgccaacgtggagcgggtgcccttcgacgccgccaccctgcacacctccactgccatggccgcccagcacggcatggatgacgatggcacaggccagaaacagatctggagaatcgaaggttccaacaaggtgcccgtggaccctgccacatatggacagttctatggaggcgacagctacatcattctgtacaactaccgccatggtggccgccaggggcagataatctataactggcagggtgcccagtctacccaggatgaggtcgctgcatctgccatcctgactgctcagctggatgaggagctgggaggtacccctgtccagagccgtgtggtccaaggcaaggagcccgcccacctcatgagcctgtttggtgggaagcccatgatcatctacaagggcggcacctcccgcgagggcgggcagacagcccctgccagcacccgcctcttccaggtccgcgccaacagcgctggagccacccgggctgttgaggtattgcctaaggctggtgcactgaactccaacgatgcctttgttctgaaaaccccctcagccgcctacctgtgggtgggtacaggagccagcgaggcagagaagacgggggcccaggagctgctcagggtgctgcgggcccaacctgtgcaggtggcagaaggcagcgagccagatggcttctgggaggccctgggcgggaaggctgcctaccgcacatccccacggctgaaggacaagaagatggatgcccatcctcctcgcctctttgcctgctccaacaagattggacgttttgtgatcgaagaggttcctggtgagctcatgcaggaagacctggcaacggatgacgtcatgcttctggacacctgggaccaggtctttgtctgggttggaaaggattctcaagaagaagaaaagacagaagccttgacttctgctaagcggtacatcgagacggacccagccaatcgggatcggcggacgcccatcaccgtggtgaagcaaggctttgagcctccctcctttgtgggctggttccttggctgggatgatgattactggtctgtggaccccttggacagggccatggctgagctggctgcctgaggaggggcagggcccacccatgtcaccggtcagtgccttttggaactgtccttccctcaaagaggccttagagcgagcagagcagctctgctatgagtgtgtgtgtgtgtgtgtgttgtttcttttttttttttttacagtatccaaaaatagccctgcaaaaattcagagtccttgcaaaattgtctaaaatgtcagtgtttgggaaattaaatccaataaaaacattttgaagtgtg

SEQ ID NO: 811 - DNA, 1330 bp, Homo sapiens
gcagcccagccaagcactgtcaggaatcctgtgaagcagctccagctatgtgtgaagaagaggacagcactgccttggtgtgtgacaatggctctgggctctgtaaggccggctttgctggggacgatgctcccagggctgttttcccatccattgtgggacgtcccagacatcagggggtgatggtgggaatgggacaaaaagacagctacgtgggtgacgaagcacagagcaaaagaggaatcctgaccctgaagtacccgatagaacatggcatcatcaccaactgggacgacatggaaaagatctggcaccactctttctacaatgagcttcgtgttgcccctgaagagcatcccaccctgctcacggaggcacccctgaaccccaaggccaaccgggagaaaatgactcaaattatgtttgagactttcaatgtcccagccatgtatgtggctatccaggcggtgctgtctctctatgcctctggacgcacaactggcatcgtgctggactctggagatggtgtcacccacaatgtccccatctatgagggctatgccttgccccatgccatcatgcgtctggatctggctggccgagatctcactgactacctcatgaagatcctgactgagcgtggctattccttcgttactactgctgagcgtgagattgtccgggacatcaaggagaaactgtgttatgtagctctggactttgaaaatgagatggccactgccgcatcctcatcctcccttgagaagagttacgagttgcctgatgggcaagtgatcaccatcggaaatgaacgtttccgctgcccagagaccctgttccagccatccttcatcgggatggagtctgctggcatccatgaaaccacctacaacagcatcatgaagtgtgatattgacatcaggaaggacctctatgctaacaatgtcctatcagggggcaccactatgtaccctggcattgccgaccgaatgcagaaggagatcacggccctagcacccagcaccatgaagatcaagatcattgcccctccggagcgcaaatactctgtctggatcggtggctccatcctggcctctctgtccaccttccagcagatgtggatcagcaaacaggaatacgatgaagccgggccttccattgtccaccgcaaatgcttctaaaacactttcctgctcctctctgtctctagcacacaactgtgaatgtcctgtggaattatgccttcagttcttttccaaatcattcctagccaaagctctgactcgttacctatgtgttttttaataaatctgaaataggctactggtaa

SEQ ID NO: 812 - DNA, 3464 bp, Homo sapiens
cagccgtgctcgaagcgttcctggagcccaagctctcctccacaggtgaagacagggccagcaggagacaccatggggcacctctcagccccacttcacagagtgcgtgtaccctggcaggggcttctgctcacagcctcacttctaaccttctggaacccgcccaccactgcccagctcactactgaatccatgccattcaatgttgcagaggggaaggaggttcttctccttgtccacaatctgccccagcaactttttggctacagctggtacaaaggggaaagagtggatggcaaccgtcaaattgtaggatatgcaataggaactcaacaagctaccccagggcccgcaaacagcggtcgagagacaatataccccaatgcatccctgctgatccagaacgtcacccagaatgacacaggattctacaccctacaagtcataaagtcagatcttgtgaatgaagaagcaactggacagttccatgtatacccggagctgcccaagccctccatctccagcaacaactccaaccctgtggaggacaaggatgctgtggccttcacctgtgaacctgagactcaggacacaacctacctgtggtggataaacaatcagagcctcccggtcagtcccaggctgcagctgtccaatggcaacaggaccctcactctactcagtgtcacaaggaatgacacaggaccctatgagtgtgaaatacagaacccagtgagtgcgaaccgcagtgacccagtcaccttgaatgtcacctatggcccggacacccccaccatttccccttcagacacctattaccgtccaggggcaaacctcagcctctcctgctatgcagcctctaacccacctgcacagtactcctggcttatcaatggaacattccagcaaagcacacaagagctctttatccctaacatcactgtgaataatagtggatcctatacctgccacgccaataactcagtcactggctgcaacaggaccacagtcaagacgatcatagtcactgagctaagtccagtagtagcaaagccccaaatcaaagccagcaagaccacagtcacaggagataaggactctgtgaacctgacctgctccacaaatgacactggaatctccatccgttggttcttcaaaaaccagagtctcccgtcctcggagaggatgaagctgtcccagggcaacaccaccctcagcataaaccctgtcaagagggaggatgctgggacgtattggtgtgaggtcttcaacccaatcagtaagaaccaaagcgaccccatcatgctgaacgtaaactataatgctctaccacaagaaaatggcctctcacctggggccattgctggcattgtgattggagtagtggccctggttgctctgatagcagtagccctggcatgttttctgcatttcgggaagaccggcagggcaagcgaccagcgtgatctcacagagcacaaaccctcagtctccaaccacactcaggaccactccaatgacccacctaacaagatgaatgaagttacttattctaccctgaactttgaagcccagcaacccacacaaccaacttcagcctccccatccctaacagccacagaaataatttattcagaagtaaaaaagcagtaatgaaacctgtcctgctcactgcagtgctgatgtatttcaagtctctcaccctcatcactaggagattcctttcccctctagggtagaggggtggggacagaaacaactttctcctactcttccttcctaataggcatctccaggctgcctggtcactgcccctctctcagtgtcaatagatgaaagtacattgggagtctgtaggaaacccaaccttcttgtcattgaaatttggcaaagctgactttgggaaagagggaccagaacttcccctcccttccccttttcccaacctggacttgttttaaacttgcctgttcagagcactcattccttcccacccccagtcctgtcctatcactctaattcggatttgccatagccttgaggttatgtccttttccattaagtacatgtgccaggaaacagcgagagagagaaagtaaacggcagtaatgcttctcctatttctccaaagccttgtgtgaactagcaaagagaagaaaaccaaatatataaccaatagtgaaatgccacaggtttgtccactgtcagggttgtctacctgtaggatcagggtctaagcaccttggtgcttagctagaataccacctaatccttctggcaagcctgtcttcagagaacccactagaagcaactaggaaaaatcacttgccaaaatccaaggcaattcctgatggaaaatgcaaaagcacatatatgttttaatatctttatgggctctgttcaaggcagtgctgagagggaggggttatagcttcaggagggaaccagcttctgataaacacaatctgctaggaacttgggaaaggaatcagagagctgcccttcagcgattatttaaattattgttaaagaatacacaatttggggtattgggatttttctccttttctctgagacattccaccattttaatttttgtaactgcttatttatgtgaaaagggttatttttacttagcttagctatgtcagccaatccgattgccttaggtgaaagaaaccaccgaaatccctcaggtcccttggtcaggagcctctcaagattttttttgtcagaggctccaaatagaaaataagaaaaggttttcttcattcatggctagagctagatttaactcagtttctaggcacctcagaccaatcatcaactaccattctattccatgtttgcacctgtgcattttctgtttgcccccattcactttgtcaggaaaccttggcctctgctaaggtgtatttggtccttgagaagtgggagcaccctacagggacactatcactcatgctggtggcattgtttacagctagaaagctgcactggtgctaatgccccttgggaaatggggctgtgaggaggaggattataacttaggcctagcctcttttaacagcctctgaaatttatcttttcttctatggggcttataaatgtatcttataataaaaaggaaggacaggaggaagacaggcaaatgtacttctcacccagtcttctacacagatggaatctctttggggctaagagaaaggttttattctatattgcttacctgatctcatgttaggcctaagaggctttctccaggaggattagcttggagttctctatactcaggtacctctttcagggttttctaaccctgacacggactgtgcatactttccctcatccatgctgtgctgtgttatttaatttttcctggctaagatcatgtctgaattatgtatgaaaattattctatgtttttataataaaaataatatatcagacatcgaaaaaaaaaa

SEQ ID NO: 813 - DNA, 3132 bp, Homo sapiens
ccgcagaacttggggagccgccgccgccatccgccgccgcagccagcttccgccgccgcaggaccggcccctgccccagcctccgcagccgcggcgcgtccacgcccgcccgcgcccagggcgagtcggggtcgccgcctgcacgcttctcagtgttccccgcgccccgcatgtaacccggccaggcccccgcaacggtgtcccctgcagctccagccccgggctgcacccccccgccccgacaccagctctccagcctgctcgtccaggatggccgcggccaaggccgagatgcagctgatgtccccgctgcagatctctgacccgttcggatcctttcctcactcgcccaccatggacaactaccctaagctggaggagatgatgctgctgagcaacggggctccccagttcctcggcgccgccggggccccagagggcagcggcagcaacagcagcagcagcagcagcgggggcggtggaggcggcgggggcggcagcaacagcagcagcagcagcagcaccttcaaccctcaggcggacacgggcgagcagccctacgagcacctgaccgcagagtcttttcctgacatctctctgaacaacgagaaggtgctggtggagaccagttaccccagccaaaccactcgactgccccccatcacctatactggccgcttttccctggagcctgcacccaacagtggcaacaccttgtggcccgagcccctcttcagcttggtcagtggcctagtgagcatgaccaacccaccggcctcctcgtcctcagcaccatctccagcggcctcctccgcctccgcctcccagagcccacccctgagctgcgcagtgccatccaacgacagcagtcccatttactcagcggcacccaccttccccacgccgaacactgacattttccctgagccacaaagccaggccttcccgggctcggcagggacagcgctccagtacccgcctcctgcctaccctgccgccaagggtggcttccaggttcccatgatccccgactacctgtttccacagcagcagggggatctgggcctgggcaccccagaccagaagcccttccagggcctggagagccgcacccagcagccttcgctaacccctctgtctactattaaggcctttgccactcagtcgggctcccaggacctgaaggccctcaataccagctaccagtcccagctcatcaaacccagccgcatgcgcaagtatcccaaccggcccagcaagacgcccccccacgaacgcccttacgcttgcccagtggagtcctgtgatcgccgcttctcccgctccgacgagctcacccgccacatccgcatccacacaggccagaagcccttccagtgccgcatctgcatgcgcaacttcagccgcagcgaccacctcaccacccacatccgcacccacacaggcgaaaagcccttcgcctgcgacatctgtggaagaaagtttgccaggagcgatgaacgcaagaggcataccaagatccacttgcggcagaaggacaagaaagcagacaaaagtgttgtggcctcttcggccacctcctctctctcttcctacccgtccccggttgctacctcttacccgtccccggttactacctcttatccatccccggccaccacctcatacccatcccctgtgcccacctccttctcctctcccggctcctcgacctacccatcccctgtgcacagtggcttcccctccccgtcggtggccaccacgtactcctctgttccccctgctttcccggcccaggtcagcagcttcccttcctcagctgtcaccaactccttcagcgcctccacagggctttcggacatgacagcaaccttttctcccaggacaattgaaatttgctaaagggaaaggggaaagaaagggaaaagggagaaaaagaaacacaagagacttaaaggacaggaggaggagatggccataggagaggagggttcctcttaggtcagatggaggttctcagagccaagtcctccctctctactggagtggaaggtctattggccaacaatcctttctgcccacttccccttccccaattactattccctttgacttcagctgcctgaaacagccatgtccaagttcttcacctctatccaaagaacttgatttgcatggattttggataaatcatttcagtatcatctccatcatatgcctgaccccttgctcccttcaatgctagaaaatcgagttggcaaaatggggtttgggcccctcagagccctgccctgcacccttgtacagtgtctgtgccatggatttcgtttttcttggggtactcttgatgtgaagataatttgcatattctattgtattatttggagttaggtcctcacttgggggaaaaaaaaaaaaaaaagccaagcaaaccaatggtgatcctctattttgtgatgatgctgtgacaataagtttgaacctttttttttgaaacagcagtcccagtattctcagagcatgtgtcagagtgttgttccgttaacctttttgtaaatactgcttgaccgtactctcacatgtggcaaaatatggtttggtttttcttttttttttttgaaagtgttttttcttcgtccttttggtttaaaaagtttcacgtcttggtgccttttgtgtgatgccccttgctgatggcttgacatgtgcaattgtgagggacatgctcacctctagccttaaggggggcagggagtgatgatttgggggaggctttgggagcaaaataaggaagagggctgagctgagcttcggttctccagaatgtaagaaaacaaaatctaaaacaaaatctgaactctcaaaagtctatttttttaactgaaaatgtaaatttataaatatattcaggagttggaatgttgtagttacctactgagtaggcggcgatttttgtatgttatgaacatgcagttcattattttgtggttctattttactttgtacttgtgtttgcttaaacaaagtgactgtttggcttataaacacattgaatgcgctttattgcccatgggatatgtggtgtatatccttccaaaaaattaaaacgaaaataaagtagctgcgattggg

SEQ ID NO: 814 - DNA, 603 bp, Homo sapiens
cgtgctgctacacaagaaccctgagactgacctgcaggacgaaaccatgaagagcctgatccttcttgccatcctggccgccttagcggtagtaactttgtgttatgaatcacatgaaagcatggaatcttatgaacttaatcccttcattaacaggagaaatgcaaataccttcatatcccctcagcagagatggagagctaaagtccaagagaggatccgagaacgctctaagcctgtccacgagctcaatagggaagcctgtgatgactacagactttgcgaacgctacgccatggtttatggatacaatgctgcctataatcgctacttcaggaagcgccgaggggccaaatgagactgagggaagaaaaaaaatctctttttttctggaggctggcacctgattttgtatccccctgtagcagcattactgaaatacataggcttatatacaatgcttctttcctgtatattctcttgtctggctgcacccctttttcccgcccccagattgataagtaatgaaagtgcactgcagtgagggtcaaaggagagtcaacatatgtgattgttccataataaacttctggtgtgatactt

SEQ ID NO: 815 - DNA, 8368 bp, Homo sapiens
gcgatccgggcgccaccccgcggtcatcggtcaccggtcgctctcaggaacagcagcgcaacctctgctccctgcctcgcctcccgcgcgcctaggtgcctgcgactttaattaaagggccgtcccctcgccgaggctgcagcaccgcccccccggcttctcgcgcctcaaaatgagtagctcccactctcgggcgggccagagcgcagcaggcgcggctccgggcggcggcgtcgacacgcgggacgccgagatgccggccaccgagaaggacctggcggaggacgcgccgtggaagaagatccagcagaacactttcacgcgctggtgcaacgagcacctgaagtgcgtgagcaagcgcatcgccaacctgcagacggacctgagcgacgggctgcggcttatcgcgctgttggaggtgctcagccagaagaagatgcaccgcaagcacaaccagcggcccactttccgccaaatgcagcttgagaacgtgtcggtggcgctcgagttcctggaccgcgagagcatcaaactggtgtccatcgacagcaaggccatcgtggacgggaacctgaagctgatcctgggcctcatctggaccctgatcctgcactactccatctccatgcccatgtgggacgaggaggaggatgaggaggccaagaagcagacccccaagcagaggctcctgggctggatccagaacaagctgccgcagctgcccatcaccaacttcagccgggactggcagagcggccgggccctgggcgccctggtggacagctgtgccccgggcctgtgtcctgactgggactcttgggacgccagcaagcccgttaccaatgcgcgagaggccatgcagcaggcggatgactggctgggcatcccccaggtgatcacccccgaggagattgtggaccccaacgtggacgagcactctgtcatgacctacctgtcccagttccccaaggccaagctgaagccaggggctcccttgcgccccaaactgaacccgaagaaagcccgtgcctacgggccaggcatcgagcccacaggcaacatggtgaagaagcgggcagagttcactgtggagaccagaagtgctggccagggagaggtgctggtgtacgtggaggacccggccggacaccaggaggaggcaaaagtgaccgccaataacgacaagaaccgcaccttctccgtctggtacgtccccgaggtgacggggactcataaggttactgtgctctttgctggccagcacatcgccaagagccccttcgaggtgtacgtggataagtcacagggtgacgccagcaaagtgacagcccaaggtcccggcctggagcccagtggcaacatcgccaacaagaccacctactttgagatctttacggcaggagctggcacgggcgaggtcgaggttgtgatccaggaccccatgggacagaagggcacggtagagcctcagctggaggcccggggcgacagcacataccgctgcagctaccagcccaccatggagggcgtccacaccgtgcacgtcacgtttgccggcgtgcccatccctcgcagcccctacactgtcactgttggccaagcctgtaacccgagtgcctgccgggcggttggccggggcctccagcccaagggtgtgcgggtgaaggagacagctgacttcaaggtgtacacaaagggcgctggcagtggggagctgaaggtcaccgtgaagggccccaagggagaggagcgcgtgaagcagaaggacctgggggatggcgtgtatggcttcgagtattaccccatggtccctggaacctatatcgtcaccatcacgtggggtggtcagaacatcgggcgcagtcccttcgaagtgaaggtgggcaccgagtgtggcaatcagaaggtacgggcctggggccctgggctggagggcggcgtcgttggcaagtcagcagactttgtggtggaggctatcggggacgacgtgggcacgctgggcttctcggtggaagggccatcgcaggctaagatcgaatgtgacgacaagggcgacggctcctgtgatgtgcgctactggccgcaggaggctggcgagtatgccgttcacgtgctgtgcaacagcgaagacatccgcctcagccccttcatggctgacatccgtgacgcgccccaggacttccacccagacagggtgaaggcacgtgggcctggattggagaagacaggtgtggccgtcaacaagccagcagagttcacagtggatgccaagcacggtggcaaggccccacttcgggtccaagtccaggacaatgaaggctgccctgtggaggcgttggtcaaggacaacggcaatggcacttacagctgctcctacgtgcccaggaagccggtgaagcacacagccatggtgtcctggggaggcgtcagcatccccaacagccccttcagggtgaatgtgggagctggcagccaccccaacaaggtcaaagtatacggccccggagtagccaagacagggctcaaggcccacgagcccacctacttcactgtggactgcgccgaggctggccagggggacgtcagcatcggcatcaagtgtgcccctggagtggtaggccccgccgaagctgacatcgacttcgacatcatccgcaatgacaatgacaccttcacggtcaagtacacgccccggggggctggcagctacaccattatggtcctctttgctgaccaggccacgcccaccagccccatccgagtcaaggtggagccctctcatgacgccagtaaggtgaaggccgagggccctggcctcagtcgcactggtgtcgagcttggcaagcccacccacttcacagtaaatgccaaagctgctggcaaaggcaagctggacgtccagttctcaggactcaccaagggggatgcagtgcgagatgtggacatcatcgaccaccatgacaacacctacacagtcaagtacacgcctgtccagcagggtccagtaggcgtcaatgtcacttatggaggggatcccatccctaagagccctttctcagtggcagtatctccaagcctggacctcagcaagatcaaggtgtctggcctgggagagaaggtggacgttggcaaagaccaggagttcacagtcaaatcaaagggtgctggtggtcaaggcaaagtggcatccaagattgtgggcccctcgggtgcagcggtgccctgcaaggtggagccaggcctgggggctgacaacagtgtggtgcgcttcctgccccgtgaggaagggccctatgaggtggaggtgacctatgacggcgtgcccgtgcctggcagcccctttcctctggaagctgtggcccccaccaagcctagcaaggtgaaggcgtttgggccggggctgcagggaggcagtgcgggctcccccgcccgcttcaccatcgacaccaagggcgccggcacaggtggcctgggcctgacggtggagggcccctgtgaggcgcagctcgagtgcttggacaatggggatggcacatgttccgtgtcctacgtgcccaccgagcccggggactacaacatcaacatcctcttcgctgacacccacatccctggctccccattcaaggcccacgtggttccctgctttgacgcatccaaagtcaagtgctcaggccccgggctggagcgggccaccgctggggaggtgggccaattccaagtggactgctcgagcgcgggcagcgcggagctgaccattgagatctgctcggaggcggggcttccggccgaggtgtacatccaggaccacggtgatggcacgcacaccattacctacattcccctctgccccggggcctacaccgtcaccatcaagtacggcggccagcccgtgcccaacttccccagcaagctgcaggtggaacctgcggtggacacttccggtgtccagtgctatgggcctggtattgagggccagggtgtcttccgtgaggccaccactgagttcagtgtggacgcccgggctctgacacagaccggagggccgcacgtcaaggcccgtgtggccaacccctcaggcaacctgacggagacctacgttcaggaccgtggcgatggcatgtacaaagtggagtacacgccttacgaggagggactgcactccgtggacgtgacctatgacggcagtcccgtgcccagcagccccttccaggtgcccgtgaccgagggctgcgacccctcccgggtgcgtgtccacgggccaggcatccaaagtggcaccaccaacaagcccaacaagttcactgtggagaccaggggagctggcacgggcggcctgggcctggctgtagagggcccctccgaggccaagatgtcctgcatggataacaaggacggcagctgctcggtcgagtacatcccttatgaggctggcacctacagcctcaacgtcacctatggtggccatcaagtgccaggcagtcctttcaaggtccctgtgcatgatgtgacagatgcgtccaaggtcaagtgctctgggcccggcctgagcccaggcatggttcgtgccaacctccctcagtccttccaggtggacacaagcaaggctggtgtggccccattgcaggtcaaagtgcaagggcccaaaggcctggtggagccagtggacgtggtagacaacgctgatggcacccagaccgtcaattatgtgcccagccgagaagggccctacagcatctcagtactgtatggagatgaagaggtaccccggagccccttcaaggtcaaggtgctgcctactcatgatgccagcaaggtgaaggccagtggccccgggctcaacaccactggcgtgcctgccagcctgcccgtggagttcaccatcgatgcaaaggacgccggggagggcctgctggctgtccagatcacggatcccgaaggcaagccgaagaagacacacatccaagacaaccatgacggcacgtatacagtggcctacgtgccagacgtgacaggtcgctacaccatcctcatcaagtacggtggtgacgagatccccttctccccgtaccgcgtgcgtgccgtgcccaccggggacgccagcaagtgcactgtcacagtgtcaatcggaggtcacgggctaggtgctggcatcggccccaccattcagattggggaggagacggtgatcactgtggacactaaggcggcaggcaaaggcaaagtgacgtgcaccgtgtgcacgcctgatggctcagaggtggatgtggacgtggtggagaatgaggacggcactttcgacatcttctacacggccccccagccgggcaaatacgtcatctgtgtgcgctttggtggcgagcacgtgcccaacagccccttccaagtgacggctctggctggggaccagccctcggtgcagccccctctacggtctcagcagctggccccacagtacacctacgcccagggcggccagcagacttgggccccggagaggcccctggtgggtgtcaatgggctggatgtgaccagcctgaggccctttgaccttgtcatccccttcaccatcaagaagggcgagatcacaggggaggttcggatgccctcaggcaaggtggcgcagcccaccatcactgacaacaaagacggcaccgtgaccgtgcggtatgcacccagcgaggctggcctgcacgagatggacatccgctatgacaacatgcacatcccaggaagccccttgcagttctatgtggattacgtcaactgtggccatgtcactgcctatgggcctggcctcacccatggagtagtgaacaagcctgccaccttcaccgtcaacaccaaggatgcaggagaggggggcctgtctctggccattgagggcccgtccaaagcagaaatcagctgcactgacaaccaggatgggacatgcagcgtgtcctacctgcctgtgctgccgggggactacagcattctagtcaagtacaatgaacagcacgtcccaggcagccccttcactgctcgggtcacaggtgacgactccatgcgtatgtcccacctaaaggtcggctctgctgccgacatccccatcaacatctcagagacggatctcagcctgctgacggccactgtggtcccgccctcgggccgggaggagccctgtttgctgaagcggctgcgtaatggccacgtggggatttcattcgtgcccaaggagacgggggagcacctggtgcatgtgaagaaaaatggccagcacgtggccagcagccccatcccggtggtgatcagccagtcggaaattggggatgccagtcgtgttcgggtctctggtcagggccttcacgaaggccacacctttgagcctgcagagtttatcattgatacccgcgatgcaggctatggtgggctcagcctgtccattgagggccccagcaaggtggacatcaacacagaggacctggaggacgggacgtgcagggtcacctactgccccacagagccaggcaactacatcatcaacatcaagtttgccgaccagcacgtgcctggcagccccttctctgtgaaggtgacaggcgagggccgggtgaaagagagcatcacccgcaggcgtcgggctccttcagtggccaacgttggtagtcattgtgacctcagcctgaaaatccctgaaattagcatccaggatatgacagcccaggtgaccagcccatcgggcaagacccatgaggccgagatcgtggaaggggagaaccacacctactgcatccgctttgttcccgctgagatgggcacacacacagtcagcgtcaagtacaagggccagcacgtgcctgggagccccttccagttcaccgtggggcccctaggggaagggggagcccacaaggtccgagctgggggccctggcctggagagagctgaagctggagtgccagccgaattcagtatctggacccgggaagctggtgctggaggcctggccattgctgtcgagggccccagcaaggctgagatctcttttgaggaccgcaaggacggctcctgtggtgtggcttatgtggtccaggagccaggtgactacgaagtctcagtcaagttcaacgaggaacacattcccgacagccccttcgtggtgcctgtggcttctccgtctggcgacgcccgccgcctcactgtttctagccttcaggagtcagggctaaaggtcaaccagccagcctcttttgcagtcagcctgaacggggccaagggggcgatcgatgccaaggtgcacagcccctcaggagccctggaggagtgctatgtcacagaaattgaccaagataagtatgctgtgcgcttcatccctcgggagaatggcgtttacctgattgacgtcaagttcaacggtacccacatccctggaagccccttcaagatccgagttggggagcctgggcatggaggggacccaggcttggtgtctgcttacggagcaggtctggaaggcggtgtcacagggaacccagctgagttcgtcgtgaacacgagcaatgcgggagctggtgccctgtcggtgaccattgacggcccctccaaggtgaagatggattgccaggagtgccctgagggctaccgcgtcacctatacccccatggcacctggcagctacctcatctccatcaagtacggcggcccctaccacattgggggcagccccttcaaggccaaagtcacaggcccccgtctcgtcagcaaccacagcctccacgagacatcatcagtgtttgtagactctctgaccaaggccacctgtgccccccagcatggggccccgggtcctgggcctgctgacgccagcaaggtggtggccaagggcctggggctgagcaaggcctacgtaggccagaagagcagcttcacagtagactgcagcaaagcaggcaacaacatgctgctggtgggggttcatggcccaaggaccccctgcgaggagatcctggtgaagcacgtgggcagccggctctacagcgtgtcctacctgctcaaggacaagggggagtacacactggtggtcaaatgggggcacgagcacatcccaggcagcccctaccgcgttgtggtgccctgagtctggggcccgtgccagccggcagcccccaagcctgccccgctacccaagcagccccgccctcttcccctcaaccccggcccaggccgccctggccgcccgcctgtcactgcagctgcccctgccctgtgccgtgctgcgctcacctgcctccccagccagccgctgacctctcggctttcacttgggcagagggagccatttggtggcgctgcttgtcttctttggttctgggaggggtgagggatgggg

SEQ ID NO: 816 - DNA, 2919 bp, Homo sapiens; identical to SEQ ID NO: 309

SEQ ID NO: 817 - DNA, 18061 bp, Homo sapiens; identical to SEQ ID NO: 310

SEQ ID NO: 818 - DNA, 18061 bp, Homo sapiens; identical to SEQ ID NO: 310

SEQ ID NO: 819 - DNA, 415 bp, Homo sapiens
ccgctgcgtgttttcctcttgatcgggaactcctgcttctccttgcctcgaaatggaccccaactgctcctgctcgcctgttggctcctgtgcctgtgccggctcctgcaaatgcaaagagtgcaaatgcacctcctgcaagaagagctgctgctcctgctgccctgtgggctgtgcmaagtgtgcccagggctgcatctgcaaagggacgtcagacaagtgcagctgctgtgcctgatgccaggacagctgtgctctcagatgtaaatagagcaacctatataaacctggatttttttttttttttttttgtacaaccctgacccgtttgctacatctttttttctatgaaatatgtgaatggcaataaattcatctagactaaaaaaaaaaaaaaaaaaaaaaaaaaaaaaaa

SEQ ID NO: 820 - DNA, 7560 bp, Homo sapiens
accggccacagcctgcctactgtcacccgcctctcccgcgcgcagatacacgcccccgcctccgtgggcacaaaggcagcgctgctggggaactcgggggaacgcgcacgtgggaaccgccgcagctccacactccaggtacttcttccaaggacctaggtctctcgcccatcggaaagaaaataattctttcaagaagatcagggacaactgatttgaagtctactctgtgcttctaaatccccaattctgctgaaagtgaatccctagagccctagagccccagcagcacccagccaaacccacctccaccatgggggccatgactcagctgttggcaggtgtctttcttgctttccttgccctcgctaccgaaggtggggtcctcaagaaagtcatccggcacaagcgacagagtggggtgaacgccaccctgccagaagagaaccagccagtggtgtttaaccacgtttacaacatcaagctgccagtgggatcccagtgttcggtggatctggagtcagccagtggggagaaagacctggcaccgccttcagagcccagcgaaagctttcaggagcacacagtagatggggaaaaccagattgtcttcacacatcgcatcaacatcccccgccgggcctgtggctgtgccgcagcccctgatgttaaggagctgctgagcagactggaggagctggagaacctggtgtcttccctgagggagcaatgtactgcaggagcaggctgctgtctccagcctgccacaggccgcttggacaccaggcccttctgtagcggtcggggcaacttcagcactgaaggatgtggctgtgtctgcgaacctggctggaaaggccccaactgctctgagcccgaatgtccaggcaactgtcaccttcgaggccggtgcattgatgggcagtgcatctgtgacgacggcttcacgggcgaggactgcagccagctggcttgccccagcgactgcaatgaccagggcaagtgcgtgaatggagtctgcatctgtttcgaaggctacgccggggctgactgcagccgtgaaatctgcccagtgccctgcagtgaggagcacggcacatgtgtagatggcttgtgtgtgtgccacgatggctttgcaggcgatgactgcaacaagcctctgtgtctcaacaattgctacaaccgtggacgatgcgtggagaatgagtgcgtgtgtgatgagggtttcacgggcgaagactgcagtgagctcatctgccccaatgactgcttcgaccggggccgctgcatcaatggcacctgctactgcgaagaaggcttcacaggtgaagactgcgggaaacccacctgcccacatgcctgccacacccagggccggtgtgaggaggggcagtgtgtatgtgatgagggctttgccggtttggactgcagcgagaagaggtgtcctgctgactgtcacaatcgtggccgctgtgtagacgggcggtgtgagtgtgatgatggtttcactggagctgactgtggggagctcaagtgtcccaatggctgcagtggccatggccgctgtgtcaatgggcagtgtgtgtgtgatgagggctatactggggaggactgcagccagctacggtgccccaatgactgtcacagtcggggccgctgtgtcgagggcaaatgtgtatgtgagcaaggcttcaagggctatgactgcagtgacatgagctgccctaatgactgtcaccagcacggccgctgtgtgaatggcatgtgtgtttgtgatgacggctacacaggggaagactgccgggatcgccaatgccccagggactgcagcaacaggggcctctgtgtggacggacagtgcgtctgtgaggacggcttcaccggccctgactgtgcagaactctcctgtccaaatgactgccatggccagggtcgctgtgtgaatgggcagtgcgtgtgccatgaaggatttatgggcaaagactgcaaggagcaaagatgtcccagtgactgtcatggccagggccgctgcgtggacggccagtgcatctgccacgagggcttcacaggcctggactgtggccagcactcctgccccagtgactgcaacaacttaggacaatgcgtctcgggccgctgcatctgcaacgagggctacagcggagaagactgctcagaggtgtctcctcccaaagacctcgttgtgacagaagtgacggaagagacggtcaacctggcctgggacaatgagatgcgggtcacagagtaccttgtcgtgtacacgcccacccacgagggtggtctggaaatgcagttccgtgtgcctggggaccagacgtccaccatcatccaggagctggagcctggtgtggagtactttatccgtgtatttgccatcctggagaacaagaagagcattcctgtcagcgccagggtggccacgtacttacctgcacctgaaggcctgaaattcaagtccatcaaggagacatctgtggaagtggagtgggatcctctagacattgcttttgaaacctgggagatcatcttccggaatatgaataaagaagatgagggagagatcaccaaaagcctgaggaggccagagacctcttaccggcaaactggtctagctcctgggcaagagtatgagatatctctgcacatagtgaaaaacaatacccggggccctggcctgaagagggtgaccaccacacgcttggatgcccccagccagatcgaggtgaaagatgtcacagacaccactgccttgatcacctggttcaagcccctggctgagatcgatggcattgagctgacctacggcatcaaagacgtgccaggagaccgtaccaccatcgatctcacagaggacgagaaccagtactccatcgggaacctgaagcctgacactgagtacgaggtgtccctcatctcccgcagaggtgacatgtcaagcaacccagccaaagagaccttcacaacaggcctcgatgctcccaggaatcttcgacgtgtttcccagacagataacagcatcaccctggaatggaggaatggcaaggcagctattgacagttacagaattaagtatgcccccatctctggaggggaccacgctgaggttgatgttccaaagagccaacaagccacaaccaaaaccacactcacaggtctgaggccgggaactgaatatgggattggagtttctgctgtgaaggaagacaaggagagcaatccagcgaccatcaacgcagccacagagttggacacgcccaaggaccttcaggtttctgaaactgcagagaccagcctgaccctgctctggaagacaccgttggccaaatttgaccgctaccgcctcaattacagtctccccacaggccagtgggtgggagtgcagcttccaagaaacaccacttcctatgtcctgagaggcctggaaccaggacaggagtacaatgtcctcctgacagccgagaaaggcagacacaagagcaagcccgcacgtgtgaaggcatccactgaacaagcccctgagctggaaaacctcaccgtgactgaggttggctgggatggcctcagactcaactggaccgcggctgaccaggcctatgagcactttatcattcaggtgcaggaggccaacaaggtggaggcagctcggaacctcaccgtgcctggcagccttcgggctgtggacataccgggcctcaaggctgctacgccttatacagtctccatctatggggtgatccagggctatagaacaccagtgctctctgctgaggcctccacaggggaaactcccaatttgggagaggtcgtggtggccgaggtgggctgggatgccctcaaactcaactggactgctccagaaggggcctatgagtactttttcattcaggtgcaggaggctgacacagtagaggcagcccagaacctcaccgtcccaggaggactgaggtccacagacctgcctgggctcaaagcagccactcattataccatcaccatccgcggggtcactcaggacttcagcacaacccctctctctgttgaagtcttgacagaggaggttccagatatgggaaacctcacagtgaccgaggttagctgggatgctctcagactgaactggaccacgccagatggaacctatgaccagtttactattcaggtccaggaggctgaccaggtggaagaggctcacaatctcacggttcctggcagcctgcgttccatggaaatcccaggcctcagggctggcactccttacacagtcaccctgcacggcgaggtcaggggccacagcactcgaccccttgctgtagaggtcgtcacagaggatctcccacagctgggagatttagccgtgtctgaggttggctgggatggcctcagactcaactggaccgcagctgacaatgcctatgagcactttgtcattcaggtgcaggaggtcaacaaagtggaggcagcccagaacctcacgttgcctggcagcctcagggctgtggacatcccgggcctcgaggctgccacgccttatagagtctccatctatggggtgatccggggctatagaacaccagtactctctgctgaggcctccacagccaaagaacctgaaattggaaacttaaatgtttctgacataactcccgagagcttcaatctctcctggatggctaccgatgggatcttcgagacctttaccattgaaattattgattccaataggttgctggagactgtggaatataatatctctggtgctgaacgaactgcccatatctcagggctaccccctagtactgattttattgtctacctctctggacttgctcccagcatccggaccaaaaccatcagtgccacagccacgacagaggccctgccccttctggaaaacctaaccatttccgacattaatccctacgggttcacagtttcctggatggcatcggagaatgcctttgacagctttctagtaacggtggtggattctgggaagctgctggacccccaggaattcacactttcaggaacccagaggaagctggagcttagaggcctcataactggcattggctatgaggttatggtctctggcttcacccaagggcatcaaaccaagcccttgagggctgagattgttacagaagccgaaccggaagttgacaaccttctggtttcagatgccaccccagacggtttccgtctgtcctggacagctgatgaaggggtcttcgacaattttgttctcaaaatcagagataccaaaaagcagtctgagccactggaaataaccctacttgcccccgaacgtaccagggacttaacaggtctcagagaggctactgaatacgaaattgaactctatggaataagcaaaggaaggcgatcccagacagtcagtgctatagcaacaacagccatgggctccccaaaggaagtcattttctcagacatcactgaaaattcggctactgtcagctggagggcacccacggcccaagtggagagcttccggattacctatgtgcccattacaggaggtacaccctccatggtaactgtggacggaaccaagactcagaccaggctggtgaaactcatacctggcgtggagtaccttgtcagcatcatcgccatgaagggctttgaggaaagtgaacctgtctcagggtcattcaccacagctctggatggcccatctggcctggtgacagccaacatcactgactcagaagccttggccaggtggcagccagccattgccactgtggacagttatgtcatctcctacacaggcgagaaagtgccagaaattacacgcacggtgtccgggaacacagtggagtatgctctgaccgacctcgagcctgccacggaatacacactgagaatctttgcagagaaagggccccagaagagctcaaccatcactgccaagttcacaacagacctcgattctccaagagacttgactgctactgaggttcagtcggaaactgccctccttacctggcgacccccccgggcatcagtcaccggttacctgctggtctatgaatcagtggatggcacagtcaaggaagtcattgtgggtccagataccacctcctacagcctggcagacctgagcccatccacccactacacagccaagatccaggcactcaatgggcccctgaggagcaatatgatccagaccatcttcaccacaattggactcctgtaccccttccccaaggactgctcccaagcaatgctgaatggagacacgacctctggcctctacaccatttatctgaatggtgataaggctcaggcgctggaagtcttctgtgacatgacctctgatgggggtggatggattgtgttcctgagacgcaaaaacggacgcgagaacttctaccaaaactggaaggcatatgctgctggatttggggaccgcagagaagaattctggcttgggctggacaacctgaacaaaatcacagcccaggggcagtacgagctccgggtggacctgcgggaccatggggagacagcctttgctgtctatgacaagttcagcgtgggagatgccaagactcgctacaagctgaaggtggaggggtacagtgggacagcaggtgactccatggcctaccacaatggcagatccttctccacctttgacaaggacacagattcagccatcaccaactgtgctctgtcctacaaaggggctttctggtacaggaactgtcaccgtgtcaacctgatggggagatatggggacaataaccacagtcagggcgttaactggttccactggaagggccacgaacactcaatccagtttgctgagatgaagctgagaccaagcaacttcagaaatcttgaaggcaggcgcaaacgggcataaattggagggaccactgggtgagagaggaataaggcggcccagagcgaggaaaggattttaccaaagcatcaatacaaccagcccaaccatcggtccacacctgggcatttggtgagaatcaaagctgaccatggatccctggggccaacggcaacagcatgggcctcacctcctctgtgatttctttctttgcaccaaagacatcagtctccaacatgtttctgttttgttgtttgattcagcaaaaatctcccagtgacaacatcgcaatagttttttacttctcttaggtggctctgggatgggagaggggtaggatgtacaggggtagtttgttttagaaccagccgtattttacatgaagctgtataattaattgtcattatttttgttagcaaagattaaatgtgtcattggaagccatccctttttttacatttcatacaacagaaaccagaaaagcaatactgtttccattttaaggatatgattaatattattaatataataatgatgatgatgatgatgaaaactaaggatttttcaagagatctttctttccaaaacatttctggacagtacctgattgtattttttttttaaataaaagcacaagtacttttgaaaaaaaaccggaattc

SEQ ID NO: 821 - DNA, 3654 bp, Homo sapiens
gtcgtagcaagagtctcgaccactgaatggaagaaaaggacttttaaccaccattttgtgacttacagaaaggaatttgaataaagaaaactatgatacttcaggcccatcttcactccctgtgtcttcttatgctttatttggcaactggatatggccaagaggggaagtttagtggacccctgaaacccatgacattttctatttatgaaggccaagaaccgagtcaaattatattccagtttaaggccaatcctcctgctgtgacttttgaactaactggggagacagacaacatatttgtgatagaacgggagggacttctgtattacaacagagccttggacagggaaacaagatctactcacaatctccaggttgcagccctggacgctaatggaattatagtggagggtccagtccctatcaccataaaagtgaaggacatcaacgacaatcgacccacgtttctccagtcaaagtacgaaggctcagtaaggcagaactctcgcccaggaaagcccttcttgtatgtcaatgccacagacctggatgatccggccactcccaatggccagctttattaccagattgtcatccagcttcccatgatcaacaatgtcatgtactttcagatcaacaacaaaacgggagccatctctcttacccgagagggatctcaggaattgaatcctgctaagaatccttcctataatctggtgatctcagtgaaggacatgggaggccagagtgagaattccttcagtgataccacatctgtggatatcatagtgacagagaatatttggaaagcaccaaaacctgtggagatggtggaaaactcaactgatcctcaccccatcaaaatcactcaggtgcggtggaatgatcccggtgcacaatattccttagttgacaaagagaagctgccaagattcccattttcaattgaccaggaaggagatatttacgtgactcagcccttggaccgagaagaaaaggatgcatatgttttttatgcagttgcaaaggatgagtacggaaaaccactttcatatccgctggaaattcatgtaaaagttaaagatattaatgataatccacctacatgtccgtcaccagtaaccgtatttgaggtccaggagaatgaacgactgggtaacagtatcgggacccttactgcacatgacagggatgaagaaaatactgccaacagttttctaaactacaggattgtggagcaaactcccaaacttcccatggatggactcttcctaatccaaacctatgctggaatgttacagttagctaaacagtccttgaagaagcaagatactcctcagtacaacttaacgatagaggtgtctgacaaagatttcaagaccctttgttttgtgcaaatcaacgttattgatatcaatgatcagacccccatctttgaaaaatcagattatggaaacctgactcttgctgaagacacaaacattgggtccaccatcttaaccatccaggccactgatgctgatgagccatttactgggagttctaaaattctgtatcatatcataaagggagacagtgagggacgcctgggggttgacacagatccccataccaacaccggatatgtcataattaaaaagcctcttgattttgaaacagcagctgtttccaacattgtgttcaaagcagaaaatcctgagcctctagtgtttggtgtgaagtacaatgcaagttcttttgccaagttcacgcttattgtgacagatgtgaatgaagcacctcaattttcccaacacgtattccaagcgaaagtcagtgaggatgtagctataggcactaaagtgggcaatgtgactgccaaggatccagaaggtctggacataagctattcactgaggggagacacaagaggttggcttaaaattgaccacgtgactggtgagatctttagtgtggctccattggacagagaagccggaagtccatatcgggtacaagtggtggccacagaagtaggggggtcttccttgagctctgtgtcagagttccacctgatccttatggatgtgaatgacaaccctcccaggctagccaaggactacacgggcttgttcttctgccatcccctcagtgcacctggaagtctcattttcgaggctactgatgatgatcagcacttatttcggggtccccattttacattttccctcggcagtggaagcttacaaaacgactgggaagtttccaaaatcaatggtactcatgcccgactgtctaccaggcacacagagtttgaggagagggagtatgtcgtcttgatccgcatcaatgatgggggtcggccacccttggaaggcattgtttctttaccagttacattctgcagttgtgtggaaggaagttgtttccggccagcaggtcaccagactgggatacccactgtgggcatggcagttggtatactgctgaccacccttctggtgattggtataattttagcagttgtgtttatccgcataaagaaggataaaggcaaagataatgttgaaagtgctcaagcatctgaagtcaaacctctgagaagctgaatttgaaaaggaatgtttgaatttatatagcaagtgctatttcagcaacaaccatctcatcctattacttttcatctaacgtgcattataattttttaaacagatattccctcttgtcctttaatatttgctaaatatttcttttttgaggtggagtcttgctctgtcgcccaggctggagtacagtggtgtgatcccagctcactgcaacctccgcctcctgggttcacatgattctcctgcctcagcttcctaagtagctgggtttacaggcacccaccaccatgcccagctaatttttgtatttttaatagagacggggtttcgccatttggccaggctggtcttgaactcctgacgtcaagtgatctgcctgccttggtctcccaatacaggcatgaaccactgcacccacctacttagatatttcatgtgctatagacattagagagatttttcatttttccatgacatttttcctctctgcaaatggcttagctacttgtgtttttcccttttggggcaagacagactcattaaatattctgtacattttttctttatcaaggagatatatcagtgttgtctcatagaactgcctggattccatttatgttttttctgattccatcctgtgtccccttcatccttgactcctttggtatttcactgaatttcaaacatttgtcagagaagaaaaacgtgaggactcaggaaaaataaataaataaaagaacagccttttcccttagtattaacagaaatgtttctgtgtcattaaccatctttaatcaatgtgacatgttgctctttggctgaaattcttcaacttggaaatgacacagacccacagaaggtgttcaaacacaacctactctgcaaaccttggtaaaggaaccagtcagctggccagatttcctcactacctgccatgcatacatgctgcgcatgttttcttcattcgtatgttagtaaagttttggttattatatatttaacatgtggaagaaaacaagacatgaaaagagtggtgacaaatcaagaataaacactggttgtagtc

SEQ ID NO: 822 - DNA, 2808 bp, Homo sapiens
cggcatgagaggccagcctgccagggaaatccaggaatctgcaacaaaaacgatgacagtctgaaatactctctggtgccaacctccaaattctcgtctgtcacttcagacccccactagttgacagagcagcagaatatcaactccagtagacttgaatgtgcctctgggcaaagaagcagagctaacgaggaaagggatttaaagagtttttcttgggtgtttgtcaaacttttattccctgtctgtgtgcagaggggattcaacttcaattttctgcagtggctctgggtccagccccttacttaaagatctggaaagcatgaagactgggccttttttcctatgtctcttgggaactgcagctgcaatcccgacaaatgcaagattattatctgatcattccaaaccaactgctgaaacggtagcacctgacaacactgcaatccccagtttatgggctgaagctgaagaaaatgaaaaagaaacagcagtatccacagaagacgattcccaccataaggctgaaaaatcatcagtactaaagtcaaaagaggaaagccatgaacagtcagcagaacagggcaagagttctagccaagagctgggattgaaggatcaagaggacagtgatggtcacttaagtgtgaatttggagtatgcaccaactgaaggtacattggacataaaagaagatatgattgagcctcaggagaaaaaactctcagagaacactgattttttggctcctggtgttagttccttcacagattctaaccaacaagaaagtatcacaaagagagaggaaaaccaagaacaacctagaaattattcacatcatcagttgaacaggagcagtaaacatagccaaggcctaagggatcaaggaaaccaagagcaggatccaaatatttccaatggagaagaggaagaagaaaaagagccaggtgaagttggtacccacaatgataaccaagaaagaaagacagaattgcccagggagcatgctaacagcaagcaggaggaagacaatacccaatctgatgatattttggaagagtctgatcaaccaactcaagtaagcaagatgcaggaggatgaatttgatcagggtaaccaagaacaagaagataactccaatgcagaaatggaagaggaaaatgcatcgaacgtcaataagcacattcaagaaactgaatggcagagtcaagagggtaaaactggcctagaagctatcagcaaccacaaagagacagaagaaaagactgtttctgaggctctgctcatggaacctactgatgatggtaataccacgcccagaaatcatggagttgatgatgatggcgatgatgatggcgatgatggcggcactgatggccccaggcacagtgcaagtgatgactacttcatcccaagccaggcctttctggaggccgagagagctcaatccattgcctatcacctcaaaattgaggagcaaagagaaaaagtacatgaaaatgaaaatataggtaccactgagcctggagagcaccaagaggccaagaaagcagagaactcatcaaatgaggaggaaacgtcaagtgaaggcaacatgagggtgcatgctgtggattcttgcatgagcttccagtgtaaaagaggccacatctgtaaggcagaccaacagggaaaacctcactgtgtctgccaggatccagtgacttgtcctccaacaaaaccccttgatcaagtttgtggcactgacaatcagacctatgctagttcctgtcatctattcgctactaaatgcagactggaggggaccaaaaaggggcatcaactccagctggattattttggagcctgcaaatctattcctacttgtacggactttgaagtgattcagtttcctctacggatgagagactggctcaagaatatcctcatgcagctttatgaagccaactctgaacatgctggttatctaaatgagaagcagagaaataaagtcaagaaaatttacctggatgaaaagaggcttttggctggggaccatcccattgatcttctcttaagggactttaagaaaaactaccacatgtatgtgtatcctgtgcactggcagtttagtgaacttgaccaacaccctatggatagagtcttgacacattctgaacttgctcctctgcgagcatctctggtgcccatggaacactgcataacccgtttctttgaggagtgtgaccccaacaaggataagcacatcaccctgaaggagtggggccactgctttggaattaaagaagaggacatagatgaaaatctcttgttttgaacgaagattttaaagaactcaactttccagcatcctcctctgttctaaccacttcagaaatatatgcagctgtgatacttgtagatttatatttagcaaaatgttagcatgtatgacaagacaatgagagtaattgcttgacaacaacctatgcaccaggtatttaacattaactttggaaacaaaaatgtacaattaagtaaagtcaacatatgcaaaatactgtacattgtgaacagaagtttaattcatagtaatttcactctctgcattgacttatgagataattaatgattaaactattaatgataaaaataatgcatttgtattgttcataatatcatgtgcacttcaagaaaatggaatgctactcttttgtggtttacgtgtattattttcaatatcttaataccctaataaagagtccataaaaatccaaaaaaaaaaaaaaaaaaaaaaaaaaaaaaaaaaaaaaaaaaaaaaaaaaaaaa

SEQ ID NO: 823 - DNA, 511 bp, Homo sapiens
  misc_feature (1)..(511): n=a,t,g or c
cccgatttctcccggaacctctgctcagcctggtgaaccacacaggccagcgctctgacatgcagaaggtgaccctgggcctgcttgtgttcctggcaggctttcctgtcctggacgccaatgacctagaagataaaaacagtcctttctactatgactggcacagcctccaggttggcgggctcatctgcgctggggttctgtgcgccatgggcatcatcatcgtcatgagtgcaaaatgcaaatgcaagtttggccagaagtccggtcaccatccaggggagactccacctctcatcaccccaggctcagcccaaagctgatgaggacagaccagctgaaattgggtggaggaccgttctctgtccccaggtcctgtctctgcacagaaacttgaactccaggatggaattcttcctcctctgctgggactcctttgcatggcagggcctcatctcacctctcgcaagagggtctctttgttcaattttttttaatctaaaatgattan

SEQ ID NO: 824 - DNA, 2292 bp, Homo sapiens
ccatgggttccccttcagcctgtccatacagagtgtgcattccctggcaggggctcctgctcacagcctcgcttttaaccttctggaacctgccaaacagtgcccagaccaatattgatgtcgtgccgttcaatgtcgcagaagggaaggaggtccttctagtagtccataatgagtcccagaatctttatggctacaactggtacaaaggggaaagggtgcatgccaactatcgaattataggatatgtaaaaaatataagtcaagaaaatgccccagggcccgcacacaacggtcgagagacaatataccccaatggaaccctgctgatccagaacgttacccacaatgacgcaggattctataccctacacgttataaaagaaaatcttgtgaatgaagaagtaaccagacaattctacgtattctcggagccacccaagccctccatcaccagcaacaacttcaatccggtggagaacaaagatattgtggttttaacctgtcaacctgagactcagaacacaacctacctgtggtgggtaaacaatcagagcctcctggtcagtcccaggctgctgctctccactgacaacaggaccctcgttctactcagcgccacaaagaatgacataggaccctatgaatgtgaaatacagaacccagtgggtgccagccgcagtgacccagtcaccctgaatgtccgctatgagtcagtacaagcaagttcacctgacctctcagctgggaccgctgtcagcatcatgattggagtactggctgggatggctctgatatagcagccttggtgtagtttctgcatttcgggaagagtgtttttattatccacctgcagactggactggattcttctagctccttcaatcccattttctcctgtggcatcactaagtataagacctgctctcttcctgaagacctataagctggaggtggacaactcaatgtaaatttcaaggaaaaaccctcatgcctgagatgtgggccactcagagctaaccaaaatgttcaacaccataactagagacactcaaattgccaaccaggacaagaagttgatgacttcatgctgtggacagtttttcccaagatgtcccaagcctcatcgtgacgaggctcttatcccactccatttttccctgctcatgcctgcctctttaatttggtaagataatgctgtaactagaatttcacaatcagcgccttgtgcaggcaatttgacagagtgttggatgtgtcatgtcatcatgtcaaacccaaatatttgacctaagggatcctttattctgcccagtggctaactttaacaacatccctaatacaactgtttattcaaatgcacggtggtccctgttagagttagacctctagactcacctgttctcacgccctgttttaatttaacccagctatgggatgccagataacagaattgctgcctacgagctgaacagggaggagtttgtgcagttgctgacacttcttgttgcacataaataaatacagtgggtactatagagactcagttgcaaaaattaacaaatatgctgcttgattaaaatgggtaggcttctcatgtggctcattctttaatctattctcttttatttggtttggttcatggggtctctgcctatggatcatacttcaaactcttggtgtgatcctcctgattgtcacaatattagttaccctggtgtgctgtattctctaaaacctttaaatgtttgcatgcagccattcgtcaaatgtcaaatattctctctttggctggaatgacaaaaactcaaataaatgtatgattaggaggacatcataacctatgaatgatggaagtccaaaatgatggtaactgacagtagtgttaatgccttatgtttagtcaaactctcatttaggtgacagcctggtgactccagaatggagccagtcatgctaaatgccatatactcacactgaaacatgaggaagcaggtagatcccagaacagacaaaactttcctaaaaacatgagagtccaggctgtctgagtcagcacagtaagaaagtcctttctgctttaactcttagaaaaaagtaatatgaagtattctgaaattaaccaatcagtttatttaaatcaatttatttatattcttctgttcctggattcccattttacaaaacccactgttctactgttgtattgcccagtaggagctatcactatattttgcagaatggaaactgccctgactcttgaatcacaaataaaagccaattgtatctgtt

SEQ ID NO: 825 - DNA, 1523 bp, Homo sapiens
gtgccgattcctgccctgccccgaccgccagcgcgaccatgtcccatcactgggggtacggcaaacacaacggacctgagcactggcataaggacttccccattgccaagggagagcgccagtcccctgttgacatcgacactcatacagccaagtatgacccttccctgaagcccctgtctgtttcctatgatcaagcaacttccctgaggatcctcaacaatggtcatgctttcaacgtggagtttgatgactctcaggacaaagcagtgctcaagggaggacccctggatggcacttacagattgattcagtttcactttcactggggttcacttgatggacaaggttcagagcatactgtggataaaaagaaatatgctgcagaacttcacttggttcactggaacaccaaatatggggattttgggaaagctgtgcagcaacctgatggactggccgttctaggtatttttttgaaggttggcagcgctaaaccgggccttcagaaagttgttgatgtgctggattccattaaaacaaagggcaagagtgctgacttcactaacttcgatcctcgtggcctccttcctgaatccctggattactggacctacccaggctcactgaccacccctcctcttctggaatgtgtgacctggattgtgctcaaggaacccatcagcgtcagcagcgagcaggtgttgaaattccgtaaacttaacttcaatggggagggtgaacccgaagaactgatggtggacaactggcgcccagctcagccactgaagaacaggcaaatcaaagcttccttcaaataagatggtcccatagtctgtatccaaataatgaatcttcgggtgtttccctttagctaagcacagatctaccttggtgatttggaccctggttgctttgtgtctagttttctagacccttcatctcttacttgatagacttactaataaaatgtgaagactagaccaattgtcatgcttgacacaactgctgtggctggttggtgctttgtttatggtagtagtttttctgtaacacagaatataggataagaaataagaataaagtaccttgactttgttcacagcatgtaggtgatgagcactcacaattgttgactaaaatgctgcttttaaaacataggaaagtagaatggttgagtgcaaatccatagcacaagataaattgagctagttaaggcaaatcaggtaaaatagtcatgattctatgtaatgtaaaccagaaaaaataaatgttcatgatttcaagatgttatattaaagaaaaactttaaaaattattatatatttatagcaaagttatcttaaatatgaattctgttgtaatttaatgacttttgaattacagagatataaatgaagtattatctgtaaaaattgttataattagagttgtgatacagagtatatttccattcagacaatatatcataacttaataaatattgtattttagatatattctctaataaaattcagaattct

SEQ ID NO: 826 - DNA, 2786 bp, Homo sapiens
agcactctccagcctctcaccgcaaaattacacaccccagtacaccagcagaggaaacttataacctcgggaggcgggtccttcccctcagtgcggtcacatacttccagaagagcggaccagggctgctgccagcacctgccactcagagcgcctctgtcgctgggacccttcagaactctctttgctcacaagttaccaaaaaaaaaagagccaacatgttggtattgctggctggtatctttgtggtccacatcgctactgttattatgctatttgttagcaccattgccaatgtctggttggtttccaatacggtagatgcatcagtaggtctttggaaaaactgtaccaacattagctgcagtgacagcctgtcatatgccagtgaagatgccctcaagacagtgcaggccttcatgattctctctatcatcttctgtgtcattgccctcctggtcttcgtgttccagctcttcaccatggagaagggaaaccggttcttcctctcaggggccaccacactggtgtgctggctgtgcattcttgtgggggtgtccatctacactagtcattatgcgaatcgtgatggaacgcagtatcaccacggctattcctacatcctgggctggatctgcttctgcttcagcttcatcatcggcgttctctatctggtcctgagaaagaaataaggccggacgagttcatggggatctggggggtggggaggaggaagccgttgaatctgggagggaagtggaggttgctgtacaggaaaaaccgagataggggaggggggagggggaagcaaaggggggaggtcaaatcccaaaccattactgaggggattctctactgccaagcccctgccctggggagaaagtagttggctagtactttgatgctcccttgatggggtccagagagcctccctgcagccaccagacttggcctccagctgttcttagtgacacacactgtctggggccccatcagctgccacaacaccagccccacttctgggtcatgcactgaggtccacagacctactgcactgagttaaaatagcggtacaagttctggcaagagcagatactgtctttgtgctgaatacgctaagcctggaagccatcctgcccttctgacccaaagcaaaacatcacattccagtctgaagtgcctactggggggctttggcctgtgagccattgtccctctttggaacagatatttagctctgtggaattcagtgacaaaatgggaggaggaaagagagtttgtaaggtcatgctggtgggttagctaaaccaagaaggagaccttttcacaatggaaaacctgggggatggtcagagcccagtcgagacctcacacacggctgtccctcatggagacctcatgccatggtctttgctaggcctcttgctgaaagccaaggcagctcttctggagtttctctaaagtcactagtgaacaattcggtggtaaaagtaccacacaaactatgggatccaaggggcagtcttgcaacagtgccatgttagggttatgtttttaggattcccctcaatgcagtcagtgtttcttttaagtatacaacaggagagagatggacatggctcattgtagcacaatcctattactcttcctctaacatttttgaggaagttttgtctaattatcaatattgaggatcagggctcctaggctcagtggtagctctggcttagacaccacctggagtgatcacctcttggggaccctgcctatcccacttcacaggtgaggcatggcaattctggaagctgattaaaacacacataaaccaaaaccaaacaacaggcccttgggtgaaaggtgctatataattgtgaagtattaagcctaccgtatttcagccatgataagaacagagtgcctgcattcccaggaaaatacgaaaatcccatgagataaataaaaatataggtgatgggcagatcttttctttaaaataaaaaagcaaaaactcttgtggtacctagtcagatggtagacgagctgtctgctgccgcaggagcacctctatacaggacttagaagtagtatgttattcctggttaagcaggcattgctttgccctggagcagctattttaagccatctcagattctgtctaaaggggttttttgggaagacgttttctttatcgccctgagaagatctaccccagggagaatctgagacatcttgcctacttttctttattagctttctcctcatccatttcttttatacctttcctttttggggagttgttatgccatgatttttggtatttatgtaaaaggattattactaattctatttctctatgtttattctagttaaggaaatgttgagggcaagccaccaaattacctaggctgaggttagagagattggccagcaaaaactgtgggaagatgaactttgtcattatgatttcattatcacatgattatagaaggctgtcttagtgcaaaaaacatacttacatttcagacatatccaaagggaatactcacattttgttaagaagttgaactatgactggagtaaaccatgtattcccttatcttttactttttttctgtgacatttatgtctcatgtaatttgcattactctggtggattgttctagtactgtattgggcttcttcgttaatagattatttcatatactataattgtaaatattttgatacaaatgtttataactctagggatataaaaacagattctgattcccttcaaaaaaaaaaaa

SEQ ID NO: 827 - DNA, 863 bp, Homo sapiens; identical to SEQ ID NO: 322

SEQ ID NO: 828 - DNA, 2191 bp, Homo sapiens
tcgagcggccacccgggcaggtctctgggtgaatagcagcgtgtccgccggcagcgaaccgagaccagcgagccgaccatgcggctgcacagacttcgtgcgcggctgagcgcggtggcctgtgggcttctgctgcttcttgtccggggccagggccaggactcagccagtcccatccggaccacacacacggggcaggtgctggggagtcttgtccatgtgaagggcgccaatgccggggtccaaaccttcctgggaattccatttgccaagccacctctaggtccgctgcgatttgcaccccctgagccccctgaatcttggagtggtgtgagggatggaaccacccatccggccatgtgtctacaggacctcaccgcagtggagtcagagtttcttagccagttcaacatgaccttcccttccgactccatgtctgaggactgcctgtacctcagcatctacacgccggcccatagccatgaaggctctaacctgccggtgatggtgtggatccacggtggtgcgcttgtttttggcatggcttccttgtatgatggttccatgctggctgccttggagaacgtggtggtggtcatcatccagtaccgcctgggtgtcctgggcttcttcagcactggagacaagcacgcaaccggcaactggggctacctggaccaagtggctgcactacgctgggtccagcagaatatcgcccactttggaggcaaccctgaccgtgtcaccatttttggcgagtctgcgggtggcacgagtgtgtcttcgcttgttgtgtcccccatatcccaaggactcttccacggagccatcatggagagtggcgtggccctcctgcccggcctcattgccagctcagctgatgtcatctccacggtggtggccaacctgtctgcctgtgaccaagttgactctgaggccctggtgggctgcctgcggggcaagagtaaagaggagattcttgcaattaacaagcctttcaagatgatccccggagtggtggatggggtcttcctgcccaggcacccccaggagctgctggcctctgccgactttcagcctgtccctagcattgttggtgtcaacaacaatgaattcggctggctcatccccaaggtcatgaggatctatgatacccagaaggaaatggacagagaggcctcccaggctgctctgcagaaaatgttaacgctgctgatgttgcctcctacatttggtgacctgctgagggaggagtacattggggacaatggggatccccagaccctccaagcgcagttccaggagatgatggcggactccatgtttgtgatccctgcactccaagtagcacattttcagtgttcccgggcccctgtgtacttctacgagttccagcatcagcccagctggctcaagaacatcaggccaccgcacatgaaggcagaccatggtgatgagcttccttttgttttcagaagtttctttgggggcaactacattaaattcactgaggaagaggagcagctaagcaggaagatgatgaagtactgggccaactttgcgagaaatgggaaccccaatggcgagggtctgccacactggccgctgttcgaccaggaggagcaatacctgcagctgaacctacagcctgcggtgggccgggctctgaaggcccacaggctccagttctggaagaaggcgctgccccaaaagatccaggagctcgaggagcctgaagagagacacacagagctgtagctccctgtgccggggaggagggggtgggttcgctgacaggcgagggtcagcctgctgtgcccacacacacccactaaggagaaagaagttgattccttcattcacttcgccattcattcatacttccgtccagaagttgattccttcattcacttcgccattcattcatacttccgtccatccattcagaaaccggyatttattaagaatttactcaggcatgatggcccatacttgtaatcccagctattgggaaggatgagatgggaggatggcttgaggccagaggtttgagaccgaccagccagggcaacacagtgagaccccttctcaaaaaaaaaaaaaaaaaaagagagagtgtgtgattagaagctaaataggaaagttttgagcttcaagtcagtgaggagtaaaaaagatttttaaaaagcaa

SEQ ID NO: 829 - DNA, 2191 bp, Homo sapiens; identical to SEQ ID NO: 828

SEQ ID NO: 830 - DNA, 2038 bp, Homo sapiens
gcaggcccgttggaagtggttgtgacaaccccagcaatgtggagaagcctggggcttgccctggctctctgtctcctcccatcgggaggaacagagagccaggaccaaagctccttatgtaagcaacccccagcctggagcataagagatcaagatccaatgctaaactccaatggttcagtgactgtggttgctcttcttcaagccagctgatacctgtgcatcatcgaggcatctaaattagaagacctgcgagtaaaactgaagaaagaaggatattctaatatttcttatattgttgttaatcatcaaggaatctcttctcgattaaaatacacacatcttaagaataaggtttcagagcatattcctgtttatcaacaagaagaaaaccaaacagatgtctggactcttttaaatggaagcaaagatgacttcctcatatatgatagatgtggccgtcttgtatatcatcttggtttgcctttttccttcctaactttcccatatgtagaagaagccattaagattgcttactgtgaaaagaaatgtggaaactgctctctcacgactctcaaagatgaagacttttgtaaacgtgtatctttggctactgtggataaaacagttgaaactccatcgcctcattaccatcatgagcatcatcacaatcatggacatcagcaccttggcagcagtgagctttcagagaatcagcaaccaggagcaccaaatgctcctactcatcctgctcctccaggccttcatcaccaccataagcacaagggtcagcataggcagggtcacccagagaaccgagatatgccagcaagtgaagatttacaagatttacaaaagaagctctgtcgaaagagatgtataaatcaattactctgtaaattgcccacagattcagagttggctcctaggagctgatgctgccattgtcgacatctgatatttgaaaaaacagggtctgcaatcacctgacagtgtaaagaaaacctcccatctttatgtagctgacagggacttcgggcagaggagaacataactgaatcttgtcagtgacgtttgcctccagctgcctgacaaataagtcagcagcttatacccacagaagccagtgccagttgacgctgaaagaatcaggcaaaaaagtgagaatgaccttcaaactaaatatttaaaataggacatactccccaatttagtctagacacaatttcatttccagcatttttataaactaccaaattagtgaaccaaaaatagaaattagatttgtgcaaacatggagaaatctactgaattggcttccagattttaaattttatgtcatagaaatattgactcaaaccatattttttatgatggagcaactgaaaggtgattgcagcttttggttaatatgtctttttttttctttttccagtgttctatttgctttaatgagaatagaaacgtaaactatgacctaggggttttctgttggataattagcagtttagaatggaggaagaacaacaaagacatgctttccattttttcctttacttatctctcaaaacaatattactttgtcttttcaatcttctacttttaactaataaaataagtggattttgtattttaagatccagaaatacttaacacgtgaatattttgctaaaaaagcatatataactattttaaatatccatttatcttttgtatatctaagactcatcctgatttttactatcacacatgaataaaggcctttgtatctttctttctctaatgttgtatcatactcttctaaaacttgagtggctgtcttaaaagatataaggggaaagataatattgtctgtctctatattgcttagtaagtatttccatagtcaatgatggtttaataggtaaaccaaaccctataaacctgacctcctttatggttaatactattaagcaagaatgcagtacagaattggatacagtacggatttgtccaaataaattcaataaaaaccttaaaaaaaaaaaaaaaaaaaaaa

SEQ ID NO: 831 - DNA, 3270 bp, Homo sapiens
  misc_feature (1)..(3270): n=a,t,g or c
caaaaagtgtgtggaaaggtggattgagggagcgggacccccgcgggacccgagggggcggcaggcggggaacggggagtcagcccgcgctgtgtctcggggccggccggcaggaaggagccatggctctggacgggataaggatgccagatggctgctacgcggacgggacgtgggaactgagtgtccatgtgacggacctgaaccgcgatatcaccctgagagtgaccggcgaggtgcacattggaggcgtgatgcttaagctggtggagaaactcgatgtaaaaaaagattggtctgaccatgctctctggtgggaaaagaagagaacttggcttctgaagacacattggaccttagataagtatggtattcaggcagatgctaagcttcagttcacccctcagcacaaactgctccgcctgcagcttcccaacatgaagtatgtgaaggtgaaagtgaatttctctgatagagtcttcaaagctgtttctgacatctgtaagacttttaatatcagacaccccgaagaactttctctcttaaagaaacccagagatccaacaaagaaaaaaaagaagaagctagatgaccagtctgaagatgaggcacttgaattagaggggcctcttatcactcctggatcaggaagtatatattcaagcccaggactgtatagtaaaacaatgacccccacttatgatgctcatgatggaagccccttgtcaccaacttctgcttggtttggtgacagtgctttgtcagaaggcaatcctggtatacttgctgtcagtcaaccaatcacgtcaccagaaatcttggcaaaaatgttcaagcctcaagctcttcttgataaagcaaaaatcaaccaaggatggcttgattcctcaagatctctcatggaacaagatgtgaaggaaaatgaggccttgctgctccgattcaagtattacagcttttttgatttgaatccaaagtatgatgcaatcagaatcaatcagctttatgagcaggccaaatgggccattctcctggaagagattgaatgcacagaagaagaaatgatgatgtttgcagccctgcagtatcatatcaataagctgtcaatcatgacatcagagaatcatttgaacaacagtgacaaagaagttgatgaagttgatgctgccctttcagacctggagattactctggaagggggtaaaacgtcaacaattttgggtgacattacttccattcctgaacttgctgactacattaaagttttcaagccaaaaaagctgactctgaaaggttacaaacaatattggtgcaccttcaaagacacatccatttcttgttataagagcaaagaagaatccagtggcacaccagctcatcagatgaacctcaggggatgtgaagttaccccagatgtaaacatttcaggccaaaaatttaacattaaactcctgattccagttgcagaaggcatgaatgaaatctggcttcgttgtgacaatgaaaaacagtatgcacactggatggcagcctgcagattagcctccaaaggcaagaccatggcggacagttcttacaacttagaagttcagaatattctttcctttctgaagatgcagcatttaaacccagatcctcagttaataccagagcagatcacgactgatataactcctgaatgtttggtgtctccccgctatctaaaaaagtataagaacaagcagataacagcgagaatcttggaggcccatcagaatgtagctcagatgagtctaattgaagccaagatgagatttattcaagcttggcagtcactacctgaatttggcatcactcacttcattgcaaggttccaagggggcaaaaaagaagaacttattggaattgcatacaacagactgattcggatggatgccagcactggagatgcaattaaaacatggcgtttcagcaacatgaaacagtggaatgtcaactgggaaatcaaaatggtcaccgtagagtttgcagatgaagtacgattgtccttcatttgtactgaagtagattgcaaagtggttcatgaattcattggtggctacatatttctctcaacacgtgcaaaagaccaaaacgagagtttagatgaagagatgttctacaaacttaccagtggttgggtgtgaatagaaatactgtttaatgaaactccacggccataacaatatttaactttaaaagctgtttgttatatgctgcttaataaagtaagcttgaaatttatcattttatcatgaaaacttctttgccttaccagaccagttaatatgtgcactaaacaagcacgactattaatctatcatgttatgatataataaacttgaatttggcacacattccttagggccatgaattgaaaactgaaatagtgggcaaatcaggaacaaaccatcactgatttactgatttaagctagccaaactgtaagaaacaagccatctattttaaagctatccagggcttaacctatatgaactctatttatcatgtctaatgcatgtgatttaatgtatgtttaatttgatatcatgttttaaaatatcctacttctggtagccatttaattcctccccctacccccaaataaatcaggcatgcaggaggcctgatatttagtaatgtcattgtgtttgaccttgaaggaaaatgctattagtccgtcgtgcttnatttgtttttgtccttgaataagcatgttatgtatatngtctcgtgtttttatttttacaccatattgtattacacttttagtattcaccagcataancactgtctgcctaaaatatgcaactctttgcattacaatatgaagtaaagttctatgaagtatgcattttgtgtaactaatgtaaaaacacaaattttataaaattgtacagttttttaaaaactactcacaactagcagatggcttaaatgtagcaatctctgcgttaattaaatgcctttaagagatataattaacgtgcagttttaatatctactaaattaagaatgacttcattatgatcatgatttgccacaatgtccttaactctaatgcctggactggccatgttctagtctgttgcgctgttacaatctgtattggtgctagtcagaaaattcctagctcacatagcccaaaagggtgcgagggagaggtggattaccagtattgttcaataatccatggttcaaagactgtataaatgcattttattttaaataaaagcaaaacttttatttaaa

SEQ ID NO: 832 - DNA, 1569 bp, Homo sapiens
caaaatctcaaccatgatcttgagatggcaaaggttttaaatacgttttggaaatatactcattggtatatttcttttgagaaggctgaaatgtagctggggacagcaggttgatcacaagggacgatgatatgaggtaagcacacaagagctatggacaagacaaggtctaaaggattttgaatacaaagcagaaatatttcgaccttctcatttctggggtgggagtggggagtgttcattaagtacatatgacaagagggagtgtggggagaaggtgaaacagtagactacatttatggattaagtagggaatgtgaacaaagatgttaaagtcatggcgatccggtagacagattacacagaaggggaccgaagatgaactggacaaatactctgaggctctcaaagatgcccaggagaagctggagctggcagagaaaaaggccaccgatgctgaagccgacgtagcttctctgaacagacgcatccagctggttgaggaagagttggatcgtgcccaggagcgtctggcaacagctttgcagaagctggaggaagctgagaaggcagcagatgagagtgagagaggcatgaaagtcattgagagtcgagcccaaaaagatgaagaaaaaatggaaattcaggagatccaactgaaagaggccaagcacattgctgaagatgccgaccgcaaatatgaagaggtggcccgtaagctggtcatcattgagagcgacctggaacgtgcagaggagcgggctgagctctcagaaggccaagtccgacagctggaagaacaattaagaataatggatcagaccttgaaagcattaatggctgcagaggataagtactcgcagaaggaagacagatatgaggaagagatcaaggtcctttccgacaagctgaaggaggctgagactcgggctgagtttgcggagaggtcagtaactaaattggagaaaagcattgatgacttagaagagaaagtgctcatgccaaagaagaaaaccttagtatgcatcagatgctggatcagactttactggagttaaacaacatgtgaaaacctccttagctgcgaccacattctttcattttgttttgttttgttttgtttttaaacacctgcttaccccttaaatgcaatttatttacttttaccactgtcacagaaacatccacaagataccagctaggtcagggggtggggaaaacacatacaaaaagcaagcccatgtcagggcgatcctggttcaaatgtgccatttcccgggttgatgctgccacactttgtagagagtttagcaacacagtgtgcttagtcagtgtaggaatcctcactaaagcagaagaagttccattcctttctgattggcacacgtgcagctcatgacaatctgtaggataacaatcagtgtggatttccactcttttcagtccttcatgttaaagatttagacaccacatacaactggtaaaggacgttttcttgagagttttaactatatgtaaacattgtataatgatatggaataaaatgcacattttaggacattttctaaa

SEQ ID NO: 833 - DNA, 268 bp, Homo sapiens
aaaattaaatttctctttattcaattgcctctgagtagtgctgtgatttccaagtgccaggtagttaggtgtacaaatatacataccacagaaacatacagtttttaaaaaaattaagaaactggctgcatctgacgacatcaagaaaaaagataattctgattcaagggcttctccagaagatggggtttcattggcatgacgctcataggatgacctgtcatttttgtactattttttctagaaccatagagggatgacagtaact

SEQ ID NO: 834 - DNA, 265 bp, Homo sapiens
aatttgttcaattatttatttattgtggagtattttacatgcaagaacccaattagagagagggtatctggaaggagggccagtggggtggatggatgctctgagcctcgggtgcactgacccaccctccagaaccagctctgcccacagaaacacatgacagtgacaaaaacactaaacttctaggacgagtggacagcaaacgcgacattcaacacattcctcttttcagtagcccccaacaatcctgagaatcctcacaatt

SEQ ID NO: 835 - DNA, 254 bp, Homo sapiens
  misc_feature (1)..(254): n=a,t,g or c
aatgagtaatgaattattttaacttttatttgattattttcatttacagttctggcactgacactttttttaaaaaaagattttaattttatgtaaagattgancttcaataaaataacttaaaaaacatttacatgtatatcactaaatctccataaaatatacaatacttttgatacagcataggctaggatgactttgaaggaaatggtacatattcataatttttaagagatatcccatatatcgcttgt

SEQ ID NO: 836 - DNA, 307 bp, Homo sapiens; identical to SEQ ID NO: 327

SEQ ID NO: 837 - DNA, 4553 bp, Homo sapiens; identical to SEQ ID NO: 330

SEQ ID NO: 838 - DNA, 295 bp, Homo sapiens
tttggaagccatagaatttattcgaatttgcagaagcatgagataatgtaccacaaaagagtttgattttacaacataaagtatggtaggaagtggtcaatgtacacagtgttgtcagcaaaaaggggaggcagggcagtttcacattttttgaaaggtggtggacgacaactacacttgtccttaaagtaaaataaaagcaggagagacccagcagagaccaacctgatttgcagttagcatcagaatctaaatctagtatcacaactttaagaaactaaaagaaaactattag

SEQ ID NO: 839 - DNA, 484 bp, Homo sapiens
ttttttttttttttttaaatgcaacatacaaactttattgaacaaaagtaaactgtttcagtaaactcaaacaggcacttaagagaaaaactgactggaagaacttttatcttaaacatcttacagtaacctacttgcagttgcatttaactgagctctgttgctgtgaagaatacagctcatgcacaggtatggatgaaagatttgtacatttctcaagtattcactgaatactaccttatatacacatatacattaaatttgaaaaagatttgacgatccccagataaacttcatttttgttgatcttttggaagaggtcgtctaaagagaagaatatgtggttctggctcatgaatcatggtaatgaacccagcctagactctgttggacaccaagtctcctccactcctcttcagacatcagatgagttttaggtacttgtttggaaagttctctggggtaacataacatgccggtacta

SEQ ID NO: 840 - DNA, 439 bp, Homo sapiens
tttttttttggtttagaatgaagtttttttttttaattatttttcttggaagtagggaggatttgaaagcttgaaaatcaagaatcaaaagacagtgaatctagaaggcatctgggagcagaacagagattgaagacgggtgggcacaggagaaagcgccaccatcgatcccggctgctgccctggaaatgtgattttcttaatagctgagttcatggttgcttgaggtcaggcctggctattcatttccagcgatgtctgaccagagaggactcatcattgacgacctcagggtcacgggggcgacgctgacaccggaacggcagcagcagcaggacgattaagacaaggaggatggctccacagacgctcatgagcgccataggacacaatccacaaaatggggctcgctcaaagactgagcggggacacagtttct

SEQ ID NO: 841 - DNA, 322 bp, Homo sapiens
  misc_feature (1)..(322): n=a,t,g or c
tttttttttgtgggagacccatttaatgtggacactcaaggcctgggcagagtggggagcgcccaggagttgggtgggcaggcaagtgggtgggttgcaggcccactcttggccccaggangnatgccaggtggtgggggctggcccaggtaggcaagggganncccaggcaggaagggtggcccangcaggcagacccaccaggggtccctgaaggccagcccttgagaaggtgtctaaagccaagggggtgagtgcccaaggccangagcctaacccagnggaggcaanggtttgggtcccgntttgggggctcttngag

SEQ ID NO: 842 - DNA, 506 bp, Homo sapiens
  misc_feature (1)..(506): n=a,t,g or c
ctcangatcatgtttaattatntataaaagctctgnagtcaggtaatgtttttcatgtgcttctcttgngcagtctgaggagagaacaganacagaatccccttgggccttgagtagacgcagctggccatgtacaggcagtggctctgggtcagtgcaggaagcagagtcacagccagcgccttggggtggggatgaaaggagatgacctggtggttgcgtgacagccactgtaggactttgatctcagggggacaagctgacacaggcagctgggaattctgggcangggacaaagcaggcatcacatgaaagagtgataacccagtcttagttaaaacagtctcaggagtcaattgcangaaanccctttcccgactccctttgaccggattgataaggncaagcccaaggaaagtcagccccagcangaagccctccaacggccaattcnagcatcttgctctgggcnagtttaaanttgagncccgcaattcacggtgaat

SEQ ID NO: 843 - DNA, 547 bp, Homo sapiens
  misc_feature (1)..(547): n=a,t,g or c
aaaggaagagcttgatgatgtcatagcattagattgaacagaaatgcctctaaacagaaccctcttactatttagtttatctgggcagaaccagattgttatgtcctttgttccaaagggaaaaaattgacagcagtgacttgaaaatgattctgctccctttgaaagcattcattttgctagaactgttagacacattgcagtatgctgtattgaaagtaggaatatagttttaaaaaccctttgaacaaagtgtgtgcataaccagtcatgagataaaacaacacaatgcatgttgcctttttaatgtaaatacccttaggtatcattaatagtttcaaaatattgtggtttagtaaagttgatacctggttataaatattatgcctttatttttggctagaagaagaattatttttagcctagatctaaccattttcatactcttanctgattgaaacagatttcaaagaagtatcgagtgctatgcattganacttgttttnaaatggttagatggcactatgtatattaatgtaaancaatt

SEQ ID NO: 844 - DNA, 245 bp, Homo sapiens
  misc_feature (1)..(245): n=a,t,g or c
gaaagccctgtctactgtctggagttcaacagccagcagactcagctcttggctgcgggcgatgccagnggcacagtgaaggtgtggcagctgagcacagagttcacggaacaagggccccgggaagctgaggacctggactgcctggcagcagaggtggcggcctgaggggtcccgggaggcgggtgcaagccttcgctgtgccgagccttgtgtttctgacgcaagccaaatgaagaaaagca

SEQ ID NO: 845 - DNA, 272 bp, Homo sapiens
tttttgcaaatataagaagtaattttattgcaatatactgtggctagagtggtctggggagaacgggacacattttgaagttcagtacaaattataacaactttgaagggaccacagaggaagaaaatgacaggagaaaaggacaaattggatgggatgagaaatgaaaacagaatcacatgacctagacgcagccacgggggtcgcgggacagtcctcggctatggcttttcttttgaagagatgaaggtgacagtcattggcacatgcta

SEQ ID NO: 846 - DNA, 446 bp, Homo sapiens
  misc_feature (1)..(446): n=a,t,g or c
cagagagcaaatcccatttattggaatttcactgacaacaaattgagaggaaggcttccccctcccctgaaacatgccatcctctctgccctcaggntcnagcacagggataagaaccccactccgcatgtccccagaggcagcactccannngggtngggggnaggggaggggtgctctacgccaggctggggagctgggacaggagggaagacgtgcaccctcacctcttggctcaatccctctccccgggacctggtgctgcccccagtccctggggtgngctggnananngggctcatgcaacaattgagtagacaggaggtggcacggaaacgtggccttggtgccccttggcgggggcgggaggactaaaggggccatgctgtggccacagcgggtccaaatggaagtatctgcagtgtacatacaggagggttggagat

SEQ ID NO: 847 - DNA, 330 bp, Homo sapiens
  misc_feature (1)..(330): n=a,t,g or c
gtgtttactacaaactgtttaattgtttcttatcccaataactttacaaatatagaaccacatgctagtctgggggtgctgtgcagtgagtcactacaaactcgctcaggcacagcttaatgccgctgagatccatctaggagcagtcccagcggtggcctcagccagtngaggaagagggctttggaggagggctgccaagtgtggccaggggacccggcctcaggtctgtggaggtgcttcaacagcacgatgctcattctctgtccgtagtgtctccatatactttctcatcttctccaccatccaggagggtaggacaaaggattt

SEQ ID NO: 848 - DNA, 514 bp, Homo sapiens
ggcacgagcatagccccagcttgggtccaatccatctgtccctggcatgtgcttcatgtagtaggtgctttcctgatcccctttgcgagatgctgtgggtgctaacacctcagagctgtcctcttctctagagtggaggttttcaaagtgcatcatcagcattacctgtgaacttgctggaaatacaaatcctcaggccccacctcagacctactgaatcagaatctctgggggttggcacagcattctgatttaccaaaccctccaagtgattttgatgtattctaattttgagaccatctctaagaaaagaattgctacctcttgtatggaggtacaaaagactgacctcttacatcaaggaacttcctttcccagagctcctcatggaatcaagctgaagtcagtcttcttctgagagcacattcttactcagtttttttcctctgtcctacgctgcttccctcactccccttctcctaagagcactccatcaataaaccacttgcacgag

SEQ ID NO: 849 - DNA, 374 bp, Homo sapiens
gagaggtctgctactttattttgataatgcagggatattatttatctttgcagaatcaggtgactcccaacgttcccggaatcttctagtggtctgtgtcaggggtctgggctggctggggttcagtgatgtctactggaggcagcttccatgccttctggggtcctgagtctccatggcttgtggggtctgggtcccccctggattagtggatggccagagtggcatagacactgggctcagctggagaggccccttcctgggatggaggaggctcagttgccttctgtctgaagggtaaaagctgtgcagctgggcgtaggtcacatcctggggggcttcagatgcagcagcctcagtgtccatctgtctgt

SEQ ID NO: 850 - DNA, 482 bp, Homo sapiens
  misc_feature (1)..(482): n=a,t,g or c
gacgctgcaggtgctagcgctgctgggggccgcccatgaaagcgcngcantggcgcantcatgcaaacatagagaattctgggcttccacacaactccagtgctaactcaacagagactctccaacatgtgccttctgaccatacaaatgaaacttccaacagtactgtgaaaccaccaacttcagttgcctcagactccagtaatacaacggtcaccaccatgaaacctacagcggcatctaatacaacaacaccagggatggtctcaacaaatatgacttctaccaccttaaagtctacacccaaaacaacaagtgtttcacagaacacatctcagatatcaacatccacaatgaccgtaacccacaatagttcagtgacatctgctgcttcatcagtaacaatcacaacaactatgcattctgaagcaaagaaaggatcaaaatttgatactgggagctttgttggtggtattgtattt

SEQ ID NO: 851 - DNA, 415 bp, Homo sapiens
ttcttgctttctttaaatctttatttaaaagtccatgctaataatgtgtttacatttttacagttacattatgatagaaactgttggattttttaaatatctaaaacaatggcccactgaagaaaggaacaattaactctttaattaattccttaggataaatacccagaaatttaacagctagggcagacttctaatacaataccgaaagtccttccaaaaaccaagtggttgccaacttatgtcccttagcattataacattcttgagccaatagtgtaaaaatacgctgacaattttataggcaaacattactcaaggtatcttactttccacttattactaaaggtaattaacccctaaatagatgctcctcaacagtgggactacatcctggtaaacctatcataagttg

SEQ ID NO: 852 - DNA, 370 bp, Homo sapiens
gaaggctaaggcagtatctcgctcacagagagctggcctacaaggtgctggagctggcaggtaatgcttctaaggatctcaaagtaaagcgtatcactccgcgtcacttgcagcttgcaatccgtggtgatgaagagttggattctcttatcaaggctaccatagctgggggtggtgtgatccctcacatccacaaatctctgattggaaagagggacaccagaaaactgcttagagggatgctttaaccaccctcttctcccgtcaattgtactgtaactggggcaaagaaataatggggatatgtggattttacacagttaatggaagcatagcaatactgtgggatgttaaagaacattgtatgttc

SEQ ID NO: 853 - DNA, 316 bp, Homo sapiens
tctcacgctgcctctgtggttccctccctcatttttcctggacgtgatagctctgcctattgcaggacaatgatggctattctaaacgctaaggaaaaaaaacaaacacagaactgtttcaagtactcaagactgacttacagaccaaccaaccaccttgctggaacccttgctagcaggcattcttataaaagaaactttcgagcctccttatattgctggaactcagctgtgctccagactagagcctccttacctatctatatgtttaattaatttttctctatatcatgtactctgctttttttggtacagt

SEQ ID NO: 854 - DNA, 313 bp, Homo sapiens
ctggtgccggcgtttgggctacggttgttgttggcgactgtgcttcaagcgttgtctgcttttggggcagagttttcatcggaggcatgcagagagttaggcttttctagcaacttgctttgcagctcttgtgatcttctcggacagttcaacctgcttcagctggatcctgattgcagaggatgctgtcaggaggaggcacaatttgaaaccaaaagctgtatgcaggagctattcttgagtttgtggataaattgggaaggttcctcagtccagctttgttagggtgataaccaactgttcagaggctcaa

SEQ ID NO: 855 - DNA, 357 bp, Homo sapiens
gataattttaaagtgtctataattgcagtggtttatttgcaaaattcctaaaaggaaaaattttatcactgccatcacagcaggtttcctcatccagatgaggaaactagacaaatgctagtgtgttttaactagctaaacaaaactaagttaaatgaacatttaagagtttccctagcgggccattccttagcaaaatgttggaatccctgttgctacattgactaacaggtcatgatgaatggatatgtagacttggctcatagaacctaatcagatggttagaggtgttggcagtttaggacctcctgtcataaatgtgtgacaaccttttgtacctacctattgacctgcatg

SEQ ID NO: 856 - DNA, 264 bp, Homo sapiens
gcggtaacggggcagagaggctgttcgcagagctgcggaagatgaatgccagaggacttggatctgagctaaaggacagtattccagttactgaactttcagcaagtggaccttttgaaagtcatgatcttcttcggaaaggtttttcttgtgtgaaaaatgaacttttgcctagtcatccccttgaattatcagaaaaaaatttccagctcaaccaagataaatgatttttcacactgagaacattcagggtctatttgctcg

SEQ ID NO: 857 - DNA, 264 bp, Homo sapiens
agattattgtggatgatgatgacagtaagatatggtcgctctatgacgcgggcccccgaagtatcaggtgtcctctcatattcctgccccctgtcagtggactgcagatgtctttttccggcagattttggctctgactggatggggttaccgggttatcgctttgcagtatccagtttattgggaccatctcgagttctgtgatggattcagaaaacttttagaccatttacaattggataaagttcactttttggccttctt

SEQ ID NO: 858 - DNA, 444 bp, Homo sapiens
ttttctagtaagactagatttattcaataccctagtaaaagttttgattataagtatccaacagtataaaaagtacaaaacagatctgtagatttctaatatattaatacaaagtgcatgactacatacagtacatcctacaggcaaagagaggtggaaggggaaaaagaagactgtggttgaggtctagtaataaataaataaatacagaagtagagatgatccatattatagtatattctaccaccaatactgcagccaaaatgtacaaaaaaaatcatttcaaataactcaggaggatgataatggctggacttttgtaattcacctcaaagactgtgggagagccaactcaactcactgtatagtctgtgcatatggtggcttgtagcatgtaggttttttccaaaagaaggaaatataaaatgtttagattaagaacta

SEQ ID NO: 859 - DNA, 345 bp, Homo sapiens; identical to SEQ ID NO: 345

SEQ ID NO: 860 - DNA, 261 bp, Homo sapiens
gagggaaagacaaaacgtatttattccaggccaggtcttaaaatgcacactgcacggttccctgttgttatcagcaccagtaaggaaagaacgtgccttaacggcagccccacccagagcctgctgcgtggctgctgtgaggctccccatgaatccacgcagtcttcttcctcactggtgcagttggtgaggttttctaccctcacagcaaagggatccttaactataaattcacggtatgcagagaagaggacagaatct

SEQ ID NO: 861 - DNA, 445 bp, Homo sapiens
ttttttttttgtttacttatttatttattttcaccaccaacattattagccatgcctttctgctaatcgattttagcaagtcgaggtaaaacacatgcaacattttctggcaaaagcttaatgtcaaacaatatgtgatccatactgtgtgtcgtccttgggggtttatttgactttgtcacaatgacagccaacagtgagactgataagcctgtaaaaataaaaaaataagactaatcaaatagacatggcattttaatctcaaagtgcaaaatcatctaactgaaaatgacggcattgaaaaattccagtggttaaaaatgaatcaaaacttcattacgcaggcagtggaagtgtgttgaaagatttaccaggggtgtcaagttttagacactcagaaaggcaccattctagccatcttgattggataacatggtatatactt

SEQ ID NO: 862 - DNA, 446 bp, Homo sapiens
ggccctagagagtttattacaaaataagaaagagaagtctggggaaggttcactcatcatagaattttggcagttcattgcccaagatgactcgatggtccacaccggcagctgtaatagtgaccaggtagatgacacccccgcttgagccatcccggctcatggccagagcaatagcgtcatgtggtgaagcgcctgcactcctcgggagacatgcctggcttatatgctgcatccacataaccatagataaaggtgctgccggagccaccaatggcaaaaggctgtcgagtcagcattcctcccagggttccatatacctgacctccttcacgttggtcccagccagctaccatgagatgtgcagacaagtcctctcgattatttatagctgatatttctcaccacatttgcagcagccaaaacaagtggaggttcctccagtt

SEQ ID NO: 863 - DNA, 318 bp, Homo sapiens
tttgacaaaagcgtgcatttaatttgatgctttgcagagatacatgaccaaagttgtatgcatggcttgtcttttgggatggtcccagctgtttattttaaaagaaaaaaattaaaatagagccaacaaatgcaattaagaaaaaaaaagtattgagacacaaggggacctacatgttctggtctaagaagcatgcaagtattacaaagcattccagatacagtatgacagaggaacagtgaacaagcattggaacgatgctctttctttcagaaacgggaagtctaacagttatgttttcacaatggtagtgattaa

SEQ ID NO: 864 - DNA, 232 bp, Homo sapiens
ttttttttttttttttttttttttttttctcaatagataactttatttgaaatgaaatgcattttgaaaatatgaaaaataaatcacatctccccaaaatcatctaagagacatatttacacaagttctgaccatgctaaaaaattcatgaattgtgatggtgtataaagcatttggtacatgatgatacttgctttccagaagctggcatttgcatattataaaacgttaa

SEQ ID NO: 865 - DNA, 422 bp, Homo sapiens
  misc_feature (1)..(422): n=a,t,g or c
tgttttttttngtatttctcatgtatacttcatttattttattaatnancnaanccctgtaagggantnctttgcctagtcntccgactntgnttnatcttcatcttgactaatcnggaagtaacnaagtcgtaggtctccttgtcagatgcaancantcgaagccaatcacgaagattgttcttcttaaggtatttcttggtaaggtatttcaaataccttttagagaactgtttctcagaaacaactgtgattttattcttgaagcgttcaatgtgaacaacattcccgagatttccagttttgccattgactttaaccttctcccgtagaaattgctcaaaatttccagaatcaaaaattccatcttctactggatgagtaaggtccaaattaaacctccaggttgacctcttgggctt

SEQ ID NO: 866 - DNA, 607 bp, Homo sapiens
  misc_feature (1)..(607): n=a,t,g or c
ctaagtcagagccgcgatgttccggattgagggcctcgcgccgaagctggacccggagacgatgaaacggaagatgcgcgaggatgtgatctcctccatacggaactttctcatctacgtggccctcctgcgagtcactccatttatcttaaagaaattggacagcatatgaagacaggacatcacatatgaatgcacgatatgaagagcctggttacagtttcgactcctctctgcaagtgaataggcccagaaaggtgtaagagactctttgaatggacataaaattctgcttgttaagaacaagtttggctctggtaactgaccttcaaagctaaaatataaaactatttgggaagtatgaaacgatgtctcgtgatctggtgtacccttatccctgtgacgtttggcctctgacaatactggtataattgtaaataatgtcaaactccgttttctagcaagtattaagggagctgtgtctgaaatggcactgtcttgtcagtcatttctgtttaccttntcttctgccagagtgtatttgtgaagagtctcttatatgatgttttgtggaaatcagcacacancacatgacattaagcacagg

SEQ ID NO: 867 - DNA, 237 bp, Homo sapiens
ttttttttttctagtcccagcacttttatttgtagagttctcaaatcaaaagtaacaaataattatacatcaggattgttaggaataccaattattttacaactgccactacgtgtttcttcttctctgacacaagtggcacagatccaggcttgctgtgtttaatacgattcacttcctttcgtcgacgagcttctttcatgatgcgctgttcctgaatctggctatagatagatt

SEQ ID NO: 868 - DNA, 462 bp, Homo sapiens
ttttttttttttttggttttctagatccatgtttattttcagttcaaagacaaagtagaaaacttgagagtggaaaatgttaccttttagttcacactcctaatcccttagtccccataaaataaacattctaaagtgtaagcagtagaaataatggaaactccacagaaacagaaataaattagtttctttcagtcttggtggaggtccttttgccgaacaccatactccactgtgaacagaattcatcttgaacgaagaagaaatctttggcctatttcaccacgtctccagcattgcataacagacatttttcaaattcagtttcttctccaactgcagcaaaaaggcaaagagtagtctgtttcaggagtctgcatcgggtcctgtgagagccttggtccacttagaacaagcctttaacttggttctggtttcggtatccagatctatggtcataaa

SEQ ID NO: 869 - DNA, 624 bp, Homo sapiens
  misc_feature (1)..(624): n=a,t,g or c
ggacacccaaagaatgatgcagtattaaaggggtggtagaagctgctgtttatgataaaagtcatcggtcagaaaatcagcttggattggtgccaagtgtttttttattgggtaacaccctgggagttttagtagcttgaggcaaggtggaggggcaagaagtccttggggaagctgctggtctgggtgctgctggcctccaagctggcagtgggaagggctagtgagaccacacaggggtagccccagcagcagcaccctgcaagccagcctggccagctgctcagaccagcttgcagagccgcagccgctgtgggcagggggtgtggcaggagctcccagcactggagacccacggactcaacccagttacctcacatggggccttttctgagcaaggtctcgaaagcgcaggccgccctggctgagcagcaccgccctttcccagctgcactcgccctgtggacagccccgacacaccactttcctgaggctgtcgctcactcagattgtccgtttgctatgccgaatgcagccaaaattcctttttacaatttgtgatgccttaccgatttgatcttaatcctgtattaagtttctaacactgaganaaaaaaaaaaagg

SEQ ID NO: 870 - DNA, 425 bp, Homo sapiens
  misc_feature (1)..(425): n=a,t,g or c
ttttacgtgtaaatggacattttcattcaagtatattaatgtagatattttaaagtgggttataagtttaacattgtctttaaaatagaagtcacagctatcttccagcctgtcttctctaggaacgctgttgacatgccagggctccgtctacactggaagcagctatacagctgtgaccacatcgagctttancagtcacacttctggaactgtccgttcagtccatcccatttctggctaagctcctcacgtaggtgcgtaggttctggttaataaagttcactgttgtgtgaaagacatcacggagcaaggacggcgtgtgactggccaccttcttggccagcagcagggccagcaccagcatggtcttctccttctccatggtctctagggtaggnctgcagcagctgctccagggcagt

SEQ ID NO: 871 - DNA, 452 bp, Homo sapiens
  misc_feature (1)..(452): n=a,t,g or c
ttttttccttccatcatttatttaggaaaaagttttatgtattagggtaaagtggtagaagttaacctagaatctaataatctccaatcacccattcctgatctaatagtagccatgagaaaaaatctctagaaagaatcatacctctcaaaaaataaaaaataaaacaaaggctgggtgcagtggctcacacctgtaatctcagcacttccggaagttgaggtgggcagatcgcttgagcccaggcatatcgcttgcagcctgggcaacgtggcgaacgtcctctaccaaaaaatacaaaaagtagccgggcatagtgacatacacctgagcccaggaggttaagcctacattgagccgtgattgtaccagtgtactctagccagggtgacagagtaagaccctatctcaaanaaagaagtgccataaaaaagaaaaggctctagccttta

SEQ ID NO: 872 - DNA, 491 bp, Homo sapiens
  misc_feature (1)..(491): n=a,t,g or c
ccaggccctgcgaggggtatcgagaggagctcactgtgggatggggttgacctctgccgcctgcctgggtatctgggcctggccatggctgtgttcttcatgtgttgattttatttgacccctggagtggtgggtctcatctttcccatctcgcctgagagcggctgagggctgcctcactgcaaatcctccccacagcgtcagtgaaagtcgtccttgtctcagaatgaccaggggccagccagtgtctgaccaaggtcaaggggcaggtgcagaggtggcagggatggctccgaagccagaaatgccttaaactgcaacgtcccgtcccttcnccacncccatcccatccccacccccagccccagcccagtcctcctaggagcaggacccgatgaagcgggcggcggtggggctgggtgccgtgttactaactctagtatgtttctgtgtcaatcgctgtgaaataagtctgaaaactttaaaaaaaa

SEQ ID NO: 873 - DNA, 428 bp, Homo sapiens
cagacatggaaatataattttaaaaaatttctctccaacctccttcaaattcagtcaccactgttatattaccttctccaggaaccctccagtggggaaggctgcgatattagatttccttgtatgcaaagtttttgttgaaagctgtgctcagaggaggtgagaggagaggaaggagaaaactgcatcataactttacagaattgaatctagagtcttccccgaaaagcccagaaacttctctgcagtatctggcttgtccatctggtctaaggtggctgcttcttccccagccatgagtcagtttgtgcccatgaataatacacgacctgttatttccatgactgctttactgtatttttaaggtcaatatactgtacatttgataataaaataatattctcccaaaaaaaaaaaaaaaaaaaaag

SEQ ID NO: 874 - DNA, 391 bp, Homo sapiens
  misc_feature (1)..(391): n=a,t,g or c
taatcaaatacaatacagggctgacactgacacacagctatgcataaaaattatataaatctccttgctagattttccagaagaggcccagtcataaaaaataaagagaaaccaggagagtgcctaaatgactgcagtgtttcaagcgtacatnttccacactcccttgtactgaaggcagccccaggtgaaggtggtcccactagcaggaagattaggaggcagcagctatgcagaagccatgtctcctggccctgcgangctcaacggtagaccttgctgaactcctggagggcccaccgcttgttctctgttgcctgcttgagtacggtgtactctttcaccagcctgtcaaactcctccccaaggacctcataggagttcaggacct

SEQ ID NO: 875 - DNA, 418 bp, Homo sapiens
tttttacaattccataccaccaccacatctgttctgtgcttttattttacgaaaaagctaatggcaaatctacattaaactaagttgaatacaaagtcttagtgaagaaggcctggtggtctcgtttacaaaaatggccagtgtcatatttgggcttaaaatttcaagaagggcacttcaaatggctttgcatttgcatgtttcagtgctagagcgtaggaatagaccctggcgtccactgtgagatgttcttcagctaccagagcatcaagtctctgcagcaggtcattcttgggtaaagaaatgacttccacaaactctccatcccctggctttggcttcggccttgcgttttcggcatcatctccgttaatggtgactgtcacgatgtgtatagtacagtttgacaagcctgggt

SEQ ID NO: 876 - DNA, 432 bp, Homo sapiens
tttaacgatagacactaatgtttattattgagtgcataacacgccaggcattgtgcaaagtgtttcagcattgagtttaagtctcctggagcacagaccgacagtatccattctcttcccttcccttaccaagcgaacccctgaattctagctgaatatcttggctatacagtctcccctcaagctgaactgtagctgtgggaatcagttctggtccacaggaattaacggaagaagtgtatacaatttttgagctatgctctttagaagagtgtggaggggtgtctttcttcccttcctcctgtgatgtgatggctggatggagctggaatggccattttgcaccatgaggaatctgatgtcctgcgttggggagacctcaggcttcagttgcacactcaggggcacccgttgctctgccagccagatgga

SEQ ID NO: 877 - DNA, 347 bp, Homo sapiens
  misc_feature (1)..(347): n=a,t,g or c
ccagatcttgnagaaaattttgatgaggcatcaaagaatgaagctaactaaaagtttggtttttggaagctggcatggactagatttaacaaatcagctatgtggttccaaagttttacagacatggagaacatcacctgttactagttcagtaatataaatattttgtatattaataatgctgtttgttcagcatttttcggtcatttgattttgcattttgcacnttcctcccaggatatttttttggtcaaaatatgaagtattggtgcagtttgagggtgttttggtttttgattccctggtttttttgttttttgtttggggtatttttggtgtatgtatgt

SEQ ID NO: 878 - DNA, 444 bp, Homo sapiens
  misc_feature (1)..(444): n=a,t,g or c
tgaacaataatatctttaatataactgtttttgtgtgcatagaaatcatataagtaaataaaaaaaaacaacaacatgagattacataggtggttataatacaaaagtgagaaaaaagctagtgtctgagtattgcatcctggatataattccctgatatatggtaaagcataaaagagacctatttcttcaggagagtagctgacccacctcagggccatgactgctcttctctttccccacagccttagtactttttgccaaaaggcccagatttgagtaaaggggaacgccgtgagcgtaaggatccgggcataagggctgcagtctgttgagctttggcaggttggtgttcggggaagtaaatttcngaaggaatgggttcctnccctgntgggttgttggtttggttgctgattttccnggttgggtaccaaggcgcta

SEQ ID NO: 879 - DNA, 454 bp, Homo sapiens
  misc_feature (1)..(454): n=a,t,g or c
tttatccttagggggatcctttatttcattcacttcctccttacaaggtgaaatttcaatctgtacaggatgtgncngccagttcagtccacagctcagagtatcaccttgtcctcattccanggtnataagctcctgcgaggggacaggtctgcgggtcgtggattcactggactggatgggacatgatccagaactccgctccgtttggcttcccaaggatcccaccaactcattctaatcagtgatcactgaggaaatgcattgtattcctattcactatttcaaagatcaggcctacctcattggcatattaagaaagttttctcaagtatatttagtgtttatcattttactatagttcttcaaatgtctggacattcatcttttccntacctctaaattccnttccttttnacattaatcttttcntgattgncttttnaatagaaaa

SEQ ID NO: 880 - DNA, 463 bp, Homo sapiens
tttttcaagtttagaatacctggtttattgggaaaacttcataatgaaaactacaattagctttttccacaacttacaaaataataatctgatatttaaaatgaattggttttcattatgtaagtcgaaatggtaaaaaatcataatgacctatccgatgcatcatatatatgctattcagagaaactcaaatccccgaattctcctgtggcatgttttatatcagacatttaaaatctgtttaccaagaaagaccaggattttaactatatgtaggtttctgcttacagttgcaaactatcagaagcctgtctatatgatagagcccagataaacctgagatttagaaaagcaagtcatttattctcctgaggctgttttagtggcacttttgtgacaagaatgaccctcctaatgctttactacacaacttaaccagatctatcagtcatgataaattaga

SEQ ID NO: 881 - DNA, 549 bp, Homo sapiens
  misc_feature (1)..(549): n=a,t,g or c
ggccttcctcgtgtgaggggatctgccggacccctgcaaattcaatttctttcccattccgggcccttccctatcgtcgcccccttcaccttggatcatgttcaagaaatttgatgaaaaagaaaatgtgtccaactgcatccagttgaaaacttcagttattaagggtattaagaatcaattgatagagcaatttccaggtattgaaccatggcttaatcaaatcatgcctaagaaagatcctgtcaaaatagtccgatgccatgaacatatagaaatccttacagtaaatggagaattactcttttttaagacaaagagaagggcctttttatccaaccctaagattacttcacaaatatccttttatcctgccacaccagcaggttgataaaggagccatcaaatttgtactcagtggagcaaatatcatgtgtccaggcttaacttctcctggagctaagctttaccctgctgcagtagataccattgttgctatcatggcagaaggaaacagcatgctcnatgtgttggagtcatgaagatgtg

SEQ ID NO: 882 - DNA, 596 bp, Homo sapiens
  misc_feature (1)..(596): n=a,t,g or c
ncntggtgcccgggcctgcaccaatgagcgtcccggccttcatcgacatcagtgaagaagatcaggctgctgagcttcgtgcttatctgaaatctaaaggagctgagatttcagaagagaactcggaaggtggacttcatgttgatttagctcaaattattgaagcctgtgatgtgtgtctgaaggaggatgataaagatgttgaaagtgtgatgaacagtgtggtatccctactcttgatcctggaaccagacaagcaagaagctttgattgaaagcctatgtgaaaagctggtcaaatttccgcgaaggtgaacgcccgtctctgagactgcagttgttaagcaaccttttccacgggatggataagaatactcctggtaagatacacagtgtattgcagccttattaaagtggcagcatcttgtggggccatccagtacatcccaactgagctggatcaagttagaaaatggatttctgactggaatctcaccactgaaaaaaagcacacccctttaagactactttatgangcacttgtggattgtaagaagagtgatgctgcttccaaagtcatggtggaattgctccgaa

SEQ ID NO: 883 - DNA, 282 bp, Homo sapiens; identical to SEQ ID NO: 351
  misc_feature (1)..(282): n=a,t,g or c

SEQ ID NO: 884 - DNA, 282 bp, Homo sapiens; identical to SEQ ID NO: 351
  misc_feature (1)..(282): n=a,t,g or c

SEQ ID NO: 885 - DNA, 512 bp, Homo sapiens
  misc_feature (1)..(512): n=a,t,g or c
ttttctctgagcacgtgattgctaagtttaattcaactgttacaccccattctgccttgtaaaaataacaaaacgctcctatcaaaatgacattgtgatgtgagtacaggctttttgttttggtacagctctaaaaaatgttggcaccgaatgcacttaagaaaagtgttaaggcttaatacaaatacagagacgagtcatttctcaatgcagcttagagggtgagaacaggatgctaggtttttaaatcttccaaatacaggcagtccccaacgtacagacatacaggacacctcccaaatgtaaacgacagccacacagcagggcttgcatgcgcaggaactcttcttctcccagtgagcagactaagcactctgaatcccaccccactgcctcgcagagggaaaagaaggcaggacagatgctagaagagtaatgtcaggggctccatcacagctgcccaggggcttctgctgtagttcatattttcctcattcccatctctgggttcn

SEQ ID NO: 886 - DNA, 391 bp, Homo sapiens
gattgtataaataatttatttctgttcacagcatcatatatgcattataaaaggctatggaaacaaaagagaaggatgatgagacagagaattacagcagtagaaaggaaaacagaaaccagggcacacagttccaacaccagaacagagaatttgggaagataattgctctgaaacagaactggcctccctgtgtctattagaaaacatttccaaagctcacggagggaggccaacttcccctatggaaacccattcactcgccaaagggcagaaggcatcataaatcacccattgatacattggtggggggctccctgtccccctgggtgaccactccaaggtgatttgatctgtgcttcctctgttgggtcagagacgaaacgggcta

SEQ ID NO: 887 - DNA, 260 bp, Homo sapiens
cttaccttgggtgaactaaccaaataatgaccatcgatggctcaaagagtggcttgaatatatcccatgggttatctgtatggactgactaggttattgaaaggactagccacatactagcatcttagtgcctttatctgtctttatgtcttggggttggggtaggtagataccaaatgaaacactttcaggaccttcctacctcttgcagttgttctttaatctcctttactagaggagataaatatttgcatataatg

SEQ ID NO: 888 - DNA, 380 bp, Homo sapiens
gaacacttgagtgtcagaccacagactgcgttggaagaaaacgagactcagaaagaagttccacaggaccagcatttggaggcacctgcagaccagtcgaaaggtctcttgcctccctgaaggacctgtatactgtgtatgctggcattcacactctactcactggctgaatgttgagctatttttaaacagttgaactgtgtaaatgtttcttgatctctaaggtattatgtttgccttctcttagttatttctggggttgtcacaaagctcagtatcatggtttgacagaagcagttatgtgaacttttatgttaggacattactaaataaagaattccctagctgcttataaagtaaatttactttgaattgtaaat

SEQ ID NO: 889 - DNA, 423 bp, Homo sapiens
ttttcattttccagttaagtcctatgtcttttgtgaaattccaatacttaaactgcaagtctgcaatcgtctctgaagtcagtgaaattaagaaaaaagtcctaattctcttgaaggtcattttttcctcttaggatatgcagatgcaaccgttgctgcagtctgtgtagaactgccttttatttcccacgaccttgacgttcctttttaacactttcttcttcctcttggcgtttctcatagtgtgagaagtcatcaaaaatggaagtggtgtgcttgtagctggctataattttcaacacctgcttagccttttccagaggcacttcctgagtgtccctagagttggtcactggtttattctcgttgttctctaggcgaatgtgtcgcagttggctattgggaacgtccttcacaaaaatc

SEQ ID NO: 890 - DNA, 247 bp, Homo sapiens
tttttttttttttttaagaagcaacatgtgtattattaaattatttgtcagaatttccagaatcagagtctctactgggcaagtagaaaaatagaaaagtttactactttgaaaaggaaactatgacaaacaagtatatattcaggaaagggactcctagaacttgagcaacaaaaaagagttcaacctcggcacagtggagtctgcagtgtctccgcaacaacagaaatgaacttgtgttcctcac

SEQ ID NO: 891 - DNA, 460 bp, Homo sapiens
  misc_feature (1)..(460): n=a,t,g or c
cgacaagacggccagcgtcttcttgctggagaaggaccggttggncaaagaaaacaattatcggggacatggggatagtgtggaccagctttgttggcatccaagtaatcctgacctatttgttacggcgtctggagataaaaccattcgcatctgggatgtgaggactacaaaatgcattgccactgtgaacactaaaggggagaacattaatatctgctggagtcctgatgggcagaccattgctgtaggcaacaaggatgatgtggtgacctttattgatgccaagacacaccgttccaaagcagaagagcagttcaagttccgaggtcaacgaaatctccttggaaccatgaccataatatgttcctcctgaccaaatggcaatggttgtatcacatcctcagctaccagaactgaagcctgtgcagtccatcaacgcccatccttccaactgcan

SEQ ID NO: 892 - DNA, 414 bp, Homo sapiens
ttaccaccaaaatggttttatttttgtcattgacaacaagcacaacactgcaattgtatcattattttgtttagtttcttaaatattacttaagtatgcattaaaaatatgtttacattttaaaaatgtgacactttaaagaagtcctctgtaaacacgatcccttctcaatatattttcctgctttgtttcatacataaataacttaatctacaaagtcataaataataccatcaactcttatggcctggaagtatatacaaattttggagtctgacaaaagtgttctttatgattttataaataacacatagtatttgtagtgttgattataaatcaaatgactttttacaaattcctactgtctcctcaacctgttctaccagtaacagatcttccagtttacttggttgg

SEQ ID NO: 893 - DNA, 401 bp, Homo sapiens
gattaagaaaagctaaatttatattaaattatcataaagtcctaaaatactgaacatagtggttaaataactccagaaagtccaatctctccagtgagtaacgttaaaaccattacacatgagcatgggagaatcgcttccattagtttaggacagagagattttgctttttacagagtaaatcagtgctcaaatagatacttcctcaaatatgtcctttctacattctgaacagcccaagtgcaataagatccttccccctttccaatcaagaaaatgccacttttctacttgctcttcctccccagacatgagtctaaggacccaaagtgctcactcctttactgcttgttaagtgtaatgtggggaggctcagaactggggctgacgctactgagagc

SEQ ID NO: 894 - DNA, 243 bp, Homo sapiens
tttttttataaaaatgtgttttattgttttaaaacaagtctataaaagtagaaatcacatacaaaaatacagattactctgacatgttggcaaaatagcttatggctggacttgagtttggaagttctgtatgtttgagggcatccgatgtcagagtccaaccggatcctaaccccagctcttgtcactaatctgtaaacaataatttcaagtagtatttagcactttttaactattaagaaa

SEQ ID NO: 895 - DNA, 230 bp, Homo sapiens
ccagagtgcaagtcatgatttgcgggagggctcttgaaccacttctggctgcaccacaattctgtacttgagtatcacagtcattgtttttgagacaaacatttttataattctaatttgggttaataaagattttaaatatttcttggtttacttttgtaattatatacacaacaaatgtattaataactaccttgttaaacaccttttaatagcacaagggttttata

SEQ ID NO: 896 - DNA, 259 bp, Homo sapiens
gatcatacacaagccggtgatactttattatataagagagttgtcaaaaggacagtttcatttctgtttcagaatccccacattccagtgatccatctgttgacacaattaacataaactatttgctgatatttactgagtgcttgcaatgtatcagagtcattaaataagatgcaacttctactgtgaaaactggaatcttcattaggacacagacttagaaaaggcccagtttcaaggattctgacttgcacagact

SEQ ID NO: 897 - DNA, 308 bp, Homo sapiens
aatttccagagattatttctgtactgagaatcctggaactactatgctaggaaatttaaagctgcatggtctgtcttgttttcatttaattattgtgaatacctagaatctttcttggtcctgatttctcttgcttaatccagtctttatctctaactgcccctatttgatcaccatgtactaggagctctgatagccagctcagctcctaatccttgaggcaccattctttttctatttgaacttcagttctgtcctcgattcccgactagatatttctggccctctggtctaagaattctctggct

SEQ ID NO: 898 - DNA, 466 bp, Homo sapiens
gcgactgtggtcgtttttataccttcccgcgcggacgccggcgctgccaacggaagggcggagacggagtttcgtcatgttggccaggcccatttgagatctttgaagatatcctcaacgtgaggctcttctgccatgaaggtgaagattaagtgctggaacggcgtggccacttggctcttggtggccaacgatgagaactgtggcatctgcaggatggcatttaacggatgctgccctgactgcaaggtgcccggcgacgactgcccgctggtgtggggccagtgctcccactgcttccacatgcattgcatcctcaagtggctgcacgcacagcaggtgcagcagcacttccccatgtgccgccaggaatggaagttcaaggagtgaggcccgacctggctctcgctggaggggcatcctgagactccttcctcatgctggcgccgatggctgctggggacag

SEQ ID NO: 899 - DNA, 364 bp, Homo sapiens
ttttttttttttttttttttttttttttttttttgctgccacacgactttatttgtgaagcccccgggcacagccacgacacacacagagcacaaaggggaaagcatggggcagtcacgggtgctcagggaggtcatacagcatctgcccagtccagaccctaccgctcccctgccccaggaggtcctttaagagcagcgtccagatgcagctcggacattggggaccctgcctctccctccccagactggagaacagctttgggttgtcaacactccccctccagccaggccagtcacagacgacatctcagcagccaggagaaggcccactaggtccggggccagcgcagtcccagcagctc

SEQ ID NO: 900 - DNA, 376 bp, Homo sapiens
tttttttttttttttttttttttttttaacagatactattttattatttacaaaatacatggtgatcataagagaacattttacaaattacaaatgggaaaagtacagggaaaagtagagacaaatgggttaaataacaaggtaaccatttgtaatgagtctgtttagaataaaatagttcttcacaaaagttagacaaggccatgagtaagtatatcactgtataaaaaatatcagtgacgtcaaaatatacctgtaccaaaaagtagaacagcaatggtagtgcatctaaatgtgtcctaaattaaattacagcacatacagtttcagtgttccacaatacaaccattgctctgaggcagcaatctgtgagact

SEQ ID NO: 901 - DNA, 397 bp, Homo sapiens
ttttttttttttttactgatatctctttaatactttcatcattcaagtttgttcagaacattacaagaggcatgaaagaaaaaataattccatttttaaaactctgtccaaagtataacatatgaaaccatgccattatctcttaggaaacaaaagcattcaaaattaatttggtattaaagttcaagattcagactaacctcaaagtacggcatgtgcagtgtttaagtgcaagaagtattttcattccaattattttacagagatgctggagtgacgtgtgcaatttgaaatattcaaatcctttaaggtttctgaactaagtgtttaaatgaaaactgaaatgctgcatagtttcagtggctttcaatttcctgtttgatctcagaaatatatg

SEQ ID NO: 902 - DNA, 366 bp, Homo sapiens
ttttttcataatgatttatttagataacaaacattaatgtgaaacatacaggctattggcaaccactattctaaaattatgtaagtacaaataaacatactgaaatgtgtgcaattctaagtttttaaaccagaagatttctacactaacacacatttatattaatgacacataaaaaaaataaaaactttattacaaaaataagttacactcgcctccagcttacagtataaaacaattttatttgcaggaatgcaaaatgattgtttgccatgagcattttgaacatatgacatgtccgattttcttgttaaatttgcatttactggggaactggtgtgtataaaaccttaattaagtataagc

SEQ ID NO: 903 - DNA, 373 bp, Homo sapiens
gtcgactcctgtgaggtatggtgctgggtgcagatgcagtgtggctctggatagcaccttatggacagttgtgtccccaaggatggatgagaatagctactgaagtcctaaagagcaagcctaacttaagccatttgcacaaaggcattagacaaaaagctggaagttgaaatggtggagtccacttgcctggaccagcttaatggttcttctcctggtaacggttttatccatggatgactttcttgggtaaggcaataaggcagttcctgtcataccttttaaaggtatggagagtcggctttactacactgtgtggagcaagttttaaagaagcaaaggcttagaattcatgattgaggaatgcaggcag

SEQ ID NO: 904 - DNA, 146 bp, Homo sapiens
tttttttttttttttttgtatttcaaccaggtattttattggtctggcaactgcaaaatatacaaatttctgaaaggcatctcctgtttgaaagctagcatagctttatatcccaggtcattaattcagacaaatacacagaacac

SEQ ID NO: 905 - DNA, 504 bp, Homo sapiens
ttgaattagaaaatccattttattgcttgggtttaaaatagttgtgggatacaagtatttacaatgctattggagtcaattattgacaacactttgcaacagtaataccatttctagcttttcaattggcaatacttagaaccttactgtagtgacctgattttaaataccatattatatttactaagttaagagctagtttttactctcttccataatttcattacatgaatgtaagatgatggctcaaaaatgacgacttatagtttgaatttatgtgtatgcaatatacatatgagaaccaaattcaacaagtgacatgaatgttactacatgaacattgaattgtattgcccttgtcagttatttcctctgttcaataaatactgaaggtcacaaacacctttttacttttcaagagtttgccttctcttctcgattttagtaattaatttggatatttttcctcccatgcctcttcatctgatttagtggggatgtttc

SEQ ID NO: 906 - DNA, 499 bp, Homo sapiens
ggaaggagcccggccgccgcccgccggcatgagctacgaccgcgccatcaccgtcttctcgcccgacggccacctcttccaagtggagtacgcgcaggaggccgtcaagaagggctcgaccgcggttggtgttcgaggaagagacattgttgttcttggtgtggagaagaagtcagtggccaaactgcaggatgaaagaacagtgcggaagatctgtgctttggatgacaacgtctgcatggcctttgcaggcctcaccgccgatgcaaggatagtcatcaacagggcccgggtggagtgccagagccaccggtgactgtggaggacccggtcactgtggagtacatcacccgctacatcgccagtctgaagcagcgttatacgcagagcaatgggcgcaggccgtttggcatctctgccctcatcgtgggtttcgactttgatggcactcctaggctctatcagactgacccctcgggcacataccatgcctggaagg

SEQ ID NO: 907 - DNA, 551 bp, Homo sapiens
  misc_feature (1)..(551): n=a,t,g or c
ttagagtcttggttgccaaacagatttgcagatcaaggagaacccaggagtttcaaagaagcgctagtaaggtctctgagatccttgcactagctacatcctcagggtaggaggaagatggcttccagaagcatgcggctgctcctattgctgagctgcctggccaaaacaggagtcctgggtgatatcatcatgagacccagctgtgctcctggatggttttaccacaagtccaattgctatggttacttcaggaagctgaggaactggtctgatgccgagctcgagtgtcagtcttacggaaacggagcccacctggcatctatcctgagtttaaaggaagccagcaccatagcagagtacataagtggctatcagagaagccagccgatatggattggcctgcacgacccacagaagaggcagcagtggcagtggattgatggggccatgtatctgtacagatcctggtctngcaagtccatgggtgggaacaagcactgtgctgagatgagctccaataacaactttttaacttggagcagcaacga

SEQ ID NO: 908 - DNA, 344 bp, Homo sapiens
  misc_feature (1)..(344): n=a,t,g or c
ctgtccagaggctttaaaactggtgcaattacagcaaaaagggattctntagctttaacttgtaaaccacatcttttttgcactttttttataagcaaaaacgtgccgtttaaaccactggttctatctaaatgccgatttgagttcgcgacactatgtactgcgtttttcattcttgtatttgactatttaatcctttctacttgtcgctaaatataatngttttagtcttatggcatgatgatagcatatgtgttcaggtttatagctgttgtgtttaaaaattgaaaaaagtgggaaaacatctttgtaccatttaaagtctgtattataataaggcaaaa

SEQ ID NO: 909 - DNA, 454 bp, Homo sapiens
tttttttttgtagtaaaagaaggattttaggtttctttggtgaaacaaaagcagatataaaaagttacaaagattttagattttcattcacaaaaaaagtcattcacattttacactatacacgttatgatataaatacaggaaagtattatgtgcattgtaaagagaaaggaaaaatagaaacctactagatcaacacagtgttgttctgtgctctaaaatacctaaaggtggattacatttaatgcaacaaccaagggaacctgcttaaacatactgtgtattattgtagctagagtcattccttctaagccaaaggaggttttataaaaaaagaatcaatattgggccaatccctttgtgccctttttctctttttctatgtgcattttattttttgtctactcttcttcaagttgctctaaactgaaattagggaaggagtcttactttc

SEQ ID NO: 910 - DNA, 476 bp, Homo sapiens
tttttttttttttttcaaattttcagtagttttattgaaaaatgcctcttttgtttcagaaataaataatataaggcagtgaaattcacaatctgcagttaaaatataaaagcagcaattctatgttcatagtcttgcaaatgttttccaactacttttgataactaagaaatattatattctgaaaaaagttcatactaaatatacaacacaaacatgcaattccctctctgcagaataatctgcaatttggtataaatgttagtgtgtctaaaacaaggaggtttaaggcaatatggaactgtatcccgttgatgcactaacttcatctacatggcttaaggtttgtggttgttaaagagatgtatacgagcattctatgccccggcgtataacagagatagaagaggaagataagtaattgcaatggagttgacgtttccctcctttttggttttaggaggggaattatttga

SEQ ID NO: 911 - DNA, 498 bp, Homo sapiens
tttttttttttttgaacaggggaagtttaatataaagatgaactctactcggagcatagagtttaaaaagagttctacacaacaccctagggatgaggaagaatgcctcagggaagaaagcacagaaaaggaggtgccctcccgaggctgggactgagacctcctcgctggagaaggtgtgggaggcccctgagggtgaagttccccgggttgctcgagccagagtctgcacagtcacagggcaagcagaaaattctttcgagagggtgggcgctcacagggaatcgggaagcagagcccacctgcctacacctgaaaggccacagccagtgctgggacctctctgaggtctgcagactccaggcagacactcctggcagctgtgcagcaggagcaggaaggaaacgacatgaaagcccctttctccccagtgtcccagttcaacaccgtgcacgctaccaaggagaaacggcgcacgggccccacccacgactgcag

SEQ ID NO: 912 - DNA, 411 bp, Homo sapiens
tttatgtaatcaatcattttattattttcatcaacaaccaacacagcaacacaaattgacagccagtcctcaagggaaccttttttgaagtgaagagcaaggccctgaatgagctacctacatggaacatagtatttgcaatatgcaaatggagacctaaaggctcatgacgggaacagaaggtggctgtatacagaggaacagacacgaagtggagttatgggaagttcaatcaacaattggcaacaagctaggtcagtagtttacgaaagtggtcatctatacagtgcctgagtttgggttctgggcctggatcatgtaagaaaggcagcaaagtctgggtgccatgaatcacacctgcaatcccagcactttggaaatctgtggtgagaggatctcttaaagctatgg

SEQ ID NO: 913 - DNA, 269 bp, Homo sapiens
cccagggcagtggtgggtgctttatttccatgctgggtgcctgggaagtatgtagacggggtacgtgccaagcatcctcgtgcaaccggagagcccggggaggggctctgcggccgtcgcactcatttacccggggacaggagaggctcttctcgtgtagtggttgtgcagaccttatgcatcacgggcatgagaagacgttcccctgctgccacctgctcttgtccacggtgagcttgctatagaggaagaaggagccgtcggagtcc

SEQ ID NO: 914 - DNA, 318 bp, Homo sapiens
tttttttttttttttttttttttttcaacttaattttacaagtttattatagctcatacctgggaccgattaaggtgtcaacattttaaaattactcaagatattaaccagaaaagatgattatggcctttaaaactattggacaaactgatgctatttaacattgttcacagccatttaatttgaataacaaattttagattctaagtaggccataacttctttgcaaaacaattgatttataaaggtacagtttcagaaggtaacagcatgagactagtcttcctataggcacattttagtagactgctcttctca

SEQ ID NO: 915 - DNA, 455 bp, Homo sapiens
tttttactgtatcttatttgatgatatttattttctctgccaagctgtatagtaaaaggaaaataagtcacatctggtcattggcatttgtatcgtcattctgtaaagacaaaagagtacctatataagaagctccacgtagtgcaaatcgacatctggtaggctgctcgcccccaggcagcagctagagtctgtaattctctgcgtcatcctcttctttttcttcatttttgctttttcttcgcttgagttcttctctgaaattatatgcaaagagttgtgggtcttcatcacacatttttctgtatacatcacagaggctcttaaagtgtgagatggagagctggcggggccgaagagtagggtctatgtctgccaactctaacagcctgcccgtgctttccaagcgctgcgcttcagggaataacattctgagccctcgatggcagtatttc

SEQ ID NO: 916 - DNA, 489 bp, Homo sapiens
tttcattaaagaatttaatagggagttgattatgttgtagaatcatatcgtcctattctgtgacacattagaaacataaactttagggctttttcatctccacagcatagaggtctgatcgcttctgtctaaaaacggggatttgctggcgtatttcagccagcttcttcaggtctatgtctgaatacacgattgcttcttctgtgccagctttggctagaacctccccccaagggttcaccacggtgctgtgtccccaggcaacataggaggctttgtcatcccgggcaggagaggctgtggcacatacacctgattatcaacagcccggcttcgctgaagtaactcccaatgggctggtccagtggtcagattaaaagctcctggatataccaacagctggcagcctctctgtgcgtagatttgtgcaagctctgcaaaccgcatgtcgtagcagatgcccagacccactctgcagtaagctgtttc

SEQ ID NO: 917 - DNA, 340 bp, Homo sapiens
tttttttttagggttcagttccagctgattttatttccttctcaaaaaaagttatttacagaaggtatatatcaacaatctgacaggcagtgaacttgacatgattagctggcatgattttttcttttttttcccccaaacattgtttttgtggccttgaattttaagacaaatattctacacggcatattgcacaggatggatggcaaaaaaaagtttaaaaacaaaaacccttaacggaactgccttaaaaaggcagacgtcctagtgcctgtcatgttatattaaacatacatacacacaatctttttgcttattataatacagacttaaatgtaca

SEQ ID NO: 918 - DNA, 418 bp, Homo sapiens; identical to SEQ ID NO: 381

SEQ ID NO: 919 - DNA, 487 bp, Homo sapiens
agagaatgtctttgtgtgtccgaagttgagatggcctgccctactgccaaagaggtgacaggaaggctgggagcagctttgttaaattgtgttcagttctgttacacagtgcattgccctttgttgggggtatgcatgtatgaacacacatgcttgtcggaacgctttctcggcgtttgtcccttggctctcatctcccccattcctgtgcctactttgcctgagttcttctacccccgcagttgccagccacattgggagtctgtttgttccagtgggttgagctgtctttgtcgtggagatctggaactttgcacatgtcactactggggaggtgttcctgctctagcttccacgatgaggcgccctctttacctatcctctcaatcactactcttcttgaagcactattatttattcttccgctgtctgcctgcagcagtactactgtcaacatagtgtaaatggttctcagaagcttaccagt

SEQ ID NO: 920 - DNA, 439 bp, Homo sapiens
gtttactatataatgggaagtgaaaagccttcctctaaaattaaagtaggtttaggaaaacagaccctcaaattctgacattcattttcctaagcaactggatcaatttgctgacttgggcataatctaatctaagcatatctgaatacagtattcagagatagatacagtagagattccccagactttttcgctctttgtaaaacctgtttgtttaggttttgcgaggtaaactcaacagaggttgggagtggaagagggtgggaagcttatatgcaaattaacagacgagaaatgctccagaaggtttattattttaaagcacattaaaaacaaaaaactatttttaaaatcctgctagattttataatggatttgtgaataaaaaatacccagggttctcagaatggaataaatatcccttttaatagttatatat

SEQ ID NO: 921 - DNA, 383 bp, Homo sapiens
ttttgttttttttaacttttatcaatccttcattgatttgaagtaaaagtgctaaagcaatggttgtgggtggcaacccattagcagatcacaaaatcactgtagtgggtaactaaacaagaggaaacacaagacggcatcctgtgtaactggggttaagcattactctctgaaactcatggcatcagtttcctcttaggctcttccaacagagtatactcatgttcatttcagtttacaatccttgcagtcccatcgatttgtgagattatacccaggtcatccacagtggaggtctgaaaatgttcttagttgtactctaatttcactaactgccaaaaggttttccagaataatctcagttgcttcattcctttaaagat

SEQ ID NO: 922 - DNA, 411 bp, Homo sapiens
tttttttttattctctaaaatttatttacagttaataagttaaaaagcaaagtacaagcagattataaatctcaaccataagcacatcaaactgtccagggaaacactttgattccattacaaacaattgttttctaatgcgcttaagacataacactctatcaaaaaatattttaaacacaccaataaatattaggcatgtatgtccattaaaaaccattaaagagtcctgtggcaatccttaaaacaatgaaaaacttttgagttcaaaattgctcagatattttgtattcaaatatttttaaaatttacttaagagttttctaaaaaatagtactatcatttgcacacagcagatcaataggtgtcagtcaccagcttaagttacacttgtcaatattcaaacttgaa

SEQ ID NO: 923 - DNA, 362 bp, Homo sapiens
tttttttttacaagatgttgcatcactttattttaattgcatgatttatcagaacaactattaacatacgaagtaccattcagttcagctgcaggtataggcagtgacaagtatctaattcttagaagaatcacttactcccacaatctgtccagacacattagtctaaggacaagtttataaatagcaaacgtgattttcacattgcagtgttctcaagaatgtatatacaagtgtgtagtcctgttgatgggatgtttccccgagttctttctattgatgcgttcatgctcttgaccctggtagagacagttctttctttccacagagcagattttcttttgtcatccaccatttacaat

SEQ ID NO: 924 - DNA, 336 bp, Homo sapiens
gaagtagttttttcatgtttaatttgtatttgtaaaaaaacaaaaagcaaaaaaattcccaaaacccagataacaaccagagcaaaactgttgtgccttctatttatctttgatttcagtcttggcaattgtttaaaaaaaaaatctagatttgttttattaggttcagagtatgtggggaattatagaatccctctttcatcactttgtgtatgtcttttgttaacatatttgttatgccttattctaaaattgagtctcaaactggaatgcctttgaagacagatgcttctatagaggttctttgacctaaatagttcagcatttgtattttta

SEQ ID NO: 925 - DNA, 427 bp, Homo sapiens
ttttttttttttttttttttttttttttttttttatgactggcttccacggctggtgagaggggcaaagcacggcataaagaaatggagacgtgggaaggggaccatgttgactgccaacttgcggaggtcagcattgagctggccagggaaacggaggcaggtggtgacacacttcatggtggctgagacaaggtggttcagatccccgtaggttggtgtggtcagctggaaccgctgcaggcagtcacagctctctgcctccttccgtaccacatccaggacagaatcaaccagctcggcgccctctgtgtagtggcctttgccaagttgttacctgccccagactgaccaaatacaaagttgtctggtctaaagatctggccaaaaggacctgagcgaacagagtccatggtcccaggttctag

SEQ ID NO: 926 - DNA, 187 bp, Homo sapiens
ctgagtggtactttctcttcctggtaatccctggcccagccttatgcagaatagaggtatttttaggctatttttgtaatatggcttctggtcaaaatccctgtgtagctgaattcccaagccctgcattgtacagccccccactcccctcaccacctaataaaggaatagttaacactcaaaaaaa

SEQ ID NO: 927 - DNA, 366 bp, Homo sapiens; identical to SEQ ID NO: 386

SEQ ID NO: 928 - DNA, 434 bp, Homo sapiens
tttgttaaagaatgctttattaatacaaatacacacaaactctgaagcactaagaaatttaaatatctatgtcacagcaaacaggtggcaattcaacatccagggtcgacagaatgcttgaaggagactgcaacagattggattcccatggtggagagggcatcttcacaggtgaaggggggcccagctgaaacagcttttcaagctctctctcctcgtcaaggatcatgagaggcactccactcaaggggaggtgcgcaatctggtgctcttcaggcaggtcaaaactctcaaagtctagaggattgaagggaaagaatttttctatttctggataggcatcatctgaggcaggaacagagctttttgctttaacagtcttctcagtcatctttttggcagaaaagcttggctgtttttgtttgaggggtccc

SEQ ID NO: 929 - DNA, 323 bp, Homo sapiens
tttctttagttttgcttttaatgaaggacaagggattaagacacacagagactggccagacaaatgggaaaccgaccagaccagcccatgaccaaaatatcacaggcagaccacccgcaaatgcagaggcctcagagtccacagtgggcagttggaaccaggccccagggaatctttcagctgcattccggctgtgatcggcgggcaacaggtagaggtgctggagggggatgagtcgtgattttcagtgtctgtcatattcgatcaagtgtgtcatagagcttcctgtttcatctcccagttattcagggagaggctggtgg

SEQ ID NO: 930 - DNA, 337 bp, Homo sapiens
ttttaaaaatgtaatactgtttatttaacttcaaaaacatttcagcattctaaacatacaaaaaaataacagaacgttgcgaatcgtgtttaagtacaggaggttcttgaactttcattgatgcagtgactctttgctttgctgacaatgaagagttctatagtttgtttaaaaacaaacagtttaaaaactaccgcacttaaaaaaaaaaaatattctcatgccagctgacccccctttgtccacagctaagatggcagcagaatgctatgtcactatatacagaaacaagacaacctgaagctaaatggatgccccctgcagagtcaacaggtcc

SEQ ID NO: 931 - DNA, 445 bp, Homo sapiens
ttttttttttttaaggctttttaaaaatttacttattacttgttcttagcaaattaagacaattacaataaaacatcagctaactgggttcttgtgagaaaactgaggtcagcttggaaaggagttccccgagtggagttcccagcggcccgcggctgacggccagatctgtcctgaggggtcgtgggagcccagcgcctgccttgagggaaatgaacactgaaaacaggatttgggagcagtattggattgacagcagagaagggactgtttgtaagggcagtttctcactgaagctgctaccattttcctttgtaaagaagtcatccacctcctcccagcggtgcccattttcaagacgctgccagagcctcttaaaacagcttcttgaaagggtttttccacaacgggttctggaatgttctgcttcagctctggaggatgc

SEQ ID NO: 932 - DNA, 510 bp, Homo sapiens
ctgggttgccgcgggaccctgtcagatgagcatgctggagtgatatctgttctagcccagcaagcagctaagctaacctctgaccccactgatattcctgtggtgtgtctagaatcagataatgggaacattatgatccagaaacacgatggcatcacggtggcagtgcacaaaatggcctcttgatgctcatatctgttcttcagcagcctgtcataggaactggatcctacctatgttaattaccttatagaactactaaagttccagtagttaggccattcatttaatgtgcattaggcacttttctgtttatttaagagtcaattgctttctaatgctctatggaccgactatcaagatattagtaagaaaggatcatgttttgaagcagcaggtccaggtcactttgtatatagaattttgctgtattcaataaatctgtttggaggaaaatggatcttttctagattctttaaacttaaccaaatgttccttttgttcagttat

SEQ ID NO: 933 - DNA, 289 bp, Homo sapiens
tttttttttttttttttttttttttttttttttacagaagtatttattttaaaagtagacttaaaaaagaaaagtaatttagattaaaagatccaaggtgtattgtttcatgtaggtgttactgctacctatactttcaccccatttattaagcccaaaacacttcaagcaacttcaggttcataaattaataaggaggtacagaagcccaaccaggatgggaaagaatgtgtttcaggttagaaggggacagcatggctccccaatgatgtcttgtatggaacatttg

SEQ ID NO: 934 - DNA, 345 bp, Homo sapiens
tagtagtgtaaatagtttattatttgctcatatgccatgaaaagaccagaaaagtaacatgaattgcttttataaaacattctaatattgctaagaagcaggcccattaatagacaaacagaaaagaacatgccaacgttgtctatttgtagattaataaataggcaattattttaatatacatatatgtcagcattgaactttggaaaacagctgctttgtagtggaagtccaacttggtcaaattgctatttttaatcgaagtgaatgttgagtccacagaaagacaaaatcgtggcatgttctttttaaagtaaagtacacatttatgggaatgtgcccgca

SEQ ID NO: 935 - DNA, 438 bp, Homo sapiens
tttttttttcagaagaatgtagtttgatatttatttagtataaaacgtttgtgcacagtgttaacaaatacaatttttacaaatctgttttgaaaatgtggtggctgtttatttgggtttcatactcttaattacttcatccatcagttttttaacttctttgtgtcttgtaactgctcggctcatacagtcctgaagtttagctccagttagcccacttccacctggtttgtgaagacaacagagtttgccttcctcatccattactattgttaaggttcctgttgccagatgttcctcctctccagtagggtcaactataagcaaagtgtcatcaaacacagcaaaggaagttgcaactggatgagttctaatattcaaataacttttcttctttaaattaacttctgctaaagcagtttcttcatttatagtaac

SEQ ID NO: 936 - DNA, 446 bp, Homo sapiens
cttcatgctgccccagctctttgtgaactacaagttgaagtcagtggcacatctgccctggaaggccttcacctacaaggctttcaacaccttcattgatgacgtctttgccttcatcatcaccatgcccacgtctcaccggctggcctgcttccgggacgacgtggtgtttctggtctacctgtaccagcggtggctttatcctgtggataaacgcagagtgaacgagtttggggagtcctacgaggagaaggccacgcgggcgccccacacggactgaaggccgcccggctgccgcagccaagtgcaacttgaattgtcaatgagtatttttggaagcatttggaggaattcctagacattgcgttttctgtgttgccaaaatcccttcggacatttctcagacatctcccaagttcccatcacgtcagatttggagctggtag

SEQ ID NO: 937 - DNA, 427 bp, Homo sapiens
tttgaagagaaaatctctaataatttattgaccttcagtttcacattgtgaaaaaaaaaaaaataacagttttacaaaacctcaaaatgtagtcatagcaaacaagtacatatgaacatgaacattttccttcaacttatacagagttttgtacgtgaaccacatggtcaatagccaagagagggacattatgcagctctaatcactcttattcaagacaggtgtcaagcccaaagaaaaggggctacacaattataccagaagtggagggctgccctttgttatgtgtttctacagcaaccagcccacaaaataagaagaaccttctctgtcttatgccaaggtttttgtgtgtactgtgctgtgaattgtatttgcttcaaagtgtgggacgtttcacagggtgagaatggtcaagtagtgagac

SEQ ID NO: 938 - DNA, 352 bp, Homo sapiens
ctcataaaaatattatatttttcaaaagaaatataatacattgaaaatcactgattgctgcttcttcgtctttttttccgtgaatgtgtaggtgtttgagtctcttgtatttcttcttttacacaggatatgggctgtttgaaaactatttcatcatctttatcatcatcattcagttcagccacttgagattttcgcctctccaaaaatgttggtgtacaaactggtgtggggccctggctatccacagtcttctcaggagtgtcaagagtacctgaaacttttttcttcttcttacgtaaaacctggccttttgtagacgtctgacgattagtttttgaaatactttccg

SEQ ID NO: 939 - DNA, 369 bp, Homo sapiens
ttttttttttaaagttttcagactttatttcacagcgattgacacagaaacatactagagttagtaacacggcacccagccccaccgccgcccgcttcatcgggtcctgctcctaggaggactgggctggggctgggggtggggatgggatgggggtggggaagggacgggacgttgcagtttaaggcatttctggcttcggagccatccctgccacctctgcacctgccccttgaccttggtcagacactggctggcccctggtcattctgagacaaggacgactttcactgacgctgtggggaggatttgcagtgaggcagccctcagccgctctcaggcgagatgggaaagatgagacccaccact

SEQ ID NO: 940 - DNA, 455 bp, Homo sapiens
tttttttttaccattttttttatatcctgcatttatttaagcaaaccaaatgtgtagagataggaaattaatgtgttataatgttttacaaatacagagagaaaacacagaatattaagaccctgaagagagtgcatttgagaacgcagttctatcataggagaccacttgcagggaacacattaaagccattgctgacacagccatctgtcattcctggtttgccgtcatttaagtagtttcaatagataaatcggtgatttgcttttaaacaaatattaatgttaatgattagggtagccttgaagggtttgtgagtgactgtactatacaatgtgatgctaggcttaatgtgtcatttcaatgctgttgtacattatgcaggggaaataatgtcttattacacattaactgcgacatccactaaaatgtgaactagtttgcataggttagtc

SEQ ID NO: 941 - DNA, 541 bp, Homo sapiens
tttttttttttttttttttttttttttggggcagctaaaatttttattctgttgtcaaggggcaagatgccagcttggaagtgccaaggagctaaagggcccagcactgccggccccagaactgtctgttcaggctgtgcagtaagcaccagagcctcgcctgtccacgaagggtgtaagcctgtgctccacaatgtgctcagctccagagaggcccaacaacctcaggagggcttggctgtgggtctgaatttctttcctttgtgcttgaagctgcgcagtgggttctgggactttgctctcttggccttcctacaagaggaagacagcttcttccgcttttgtgagggcgtaccaggccacggagagcaggaggaaccaggtagtcaggaacatggcccaggtggggcttcaccactgcggggtgcaaaggtaggtcatgccgcagcagctggaggtccctagggttgtcttcaaagtatgtcttaagcttctcagaatgcagaagctcttccttgatctccttcaatcttgcctcccg

SEQ ID NO: 942 - DNA, 365 bp, Homo sapiens
ttttttttttttgaaacgaatgcattttattttaggtaacaaaagtagagtcaagtattttttcaaagttcatatacaggcacagtctcagtgaactggcgtcagggcctcgtacagtctctgtgcagccagctccaccatttctcggagggattcatcgtcttcacttccctcttcacattctacagtccgtgtctccaagttaaggttggcagttttcccgtccactgtgacgctaagaatagagtcatcctttacacttacacagtcttctccaaatatgtcctggagcatgatctccaacctcttgctgtaaacgtgcatttctaattttttagaaaccttctgtactgcaccttttctta

SEQ ID NO: 943 - DNA, 332 bp, Homo sapiens
ttttgatgataaacgactttactctaaaagcggctggaactcagtgacatgagcgtgcgctgaccccacatgggccccctgtgcaagcagagctggccggcccctccttgctggcagaggcacgggaggcctgctggggatgaggccactggccagggctatgctgcaccagaccaatggcaccgccccacccctcccagcgcaggggcagcttggagcagaggcagcactggccaccgctgcgggggcaagtcagcgtcaagagagtccctgagtgagaaggcccagataagcccaggccccccaggccagcggacaggcacaggcagggc

SEQ ID NO: 944 - DNA, 438 bp, Homo sapiens
tttttttttacatttgcaaaacaacatttattcttttaaaaaatctatatacattgccatacaaagataccacattgaagcagttctcaggaaccttccagtgagccttctcttataattgcccgagcaagatttcgtgccagagaaagtctcagcatttccaccttggtgttctctatgtcatcatcctggagctgctcggtatcagattctccatgcacaggtcttcttgacgtcaagtcctccagacaccgcatcaactcataagtctgttctgctgagaaaatcacctgtttctgttccaaaaggggcaaggcatctgtcagcagagtcatccagaaagaccgaggggcaatccgagacgtcatcaaggacagaaggagagaagctgcgtcggcaaaacgcttctccccgtacatacggtggaactcgcgatac

SEQ ID NO: 945 - DNA, 454 bp, Homo sapiens
actttgtgtgttgtgtcttattaacaccaaaatgtgccacatcatggtttagaagaggtggagggtgcaggcaggaggctccgaagtcccaggcaggcgcgcagcctctggcatctccatggactccagctggagagcctgtccgctcagcaacaccccaggcagcaccaagaataacatgcccacaagaacatcatggccaagagacgcacaggcgcatcccgcttccaggcacctttcccacctggccagaagtccctgctgtcatcccgacttgcacggtggttttggtaaccagtgggctgtgcaggagtgaaagtggggtcactttccttcctttcccagctgctggagtcggaactgctgcctttgtttggcggccttgtttcttaaatcagttccctcttaggatttattacactaaaaaaaaaattagtttttgaaaagaaatagg

SEQ ID NO: 946 - DNA, 446 bp, Homo sapiens
tttttttttttttttttttttcaaaaaggcaactttttttttttcttggcatcaatgaatatgcacttcagaaatctacagagaacttttttcactttgtatttgttccacagcattctagccaggagtacaaaataggagctcttcaagcagcacatgaagatggcccaggagccttcagccatccagagcagcagagcagcacctaaatctccacacacttcccagtataaccactaagaacacactagacccttggcattaggggatttatcatttccagttctattatctgggaatgactccaagggtttgtgacaagcttttgaaacgtaagtgctaagacgagtgtggacaagtcactgagctaatgaagaatagacccactgtctgcttggctctgctattttgtacctgtcttcacatgtggggaaacttcataactg

SEQ ID NO: 947 - DNA, 392 bp, Homo sapiens
acaacagctgatttttatttttcttcttgattctcttctacagtttccaaattctctacaatgaacatgtacttctttttaatatcaaaagacaaaagaattggtacgtaaaaagaacatccttcccatcttcaaggtcaagattgaacgctgactcctgcaggaagtcttccaggattcccaggcaggaatgatggctccctgtccctgtagctccaggagttcttgcttcacgcacgcctcacataccagactgaatgttggcaggaggagtgaccaggtcggtcatctgtgtccctaccacctacaacaggccagcaatctacccgtgtgtgtttgttggacagaattaaccatgatgggcggccgagggcgctggagctatttggggg

SEQ ID NO: 948 - DNA, 372 bp, Homo sapiens; identical to SEQ ID NO: 403

SEQ ID NO: 949 - DNA, 534 bp, Homo sapiens
tgtctgaatcaaagatttttattgattctcctgccaaacacaactgatttccatctacaattactttttaaggtaagaaacagtaagtcaactgaacaaagagctgggctttgggcctggaacgtgattacacaccgactgagaaatgcaggacctcagggtggggtctagtcaggctggccgcagcagggcacgaacctgcctcagtgggccttctccaagaacgctctgcagcacctgacacactgctggtacaccgtctcaaagtcagagtcattcccataatagggatcttcacataaaaattggtttttgtgggatcaagctcccaagtagttcaattttaagcttgcaagttttaacccgcatactttttctattcaaaaccccccgattgctttcatccctacataggtatatatccaatgtgggaaaaacctccttgggtaatctgccggggaaacttggctcatgggaaatccgggcctcttcatgcagctctgcctccgtagttcaggggggttcccaaactca

SEQ ID NO: 950 - DNA, 293 bp, Homo sapiens
catgtcccctgcttgaacactgaagggcaggtggtgggccatggcatggtccccagctgaggagcaggtgtccctgagaacccaaacttcccagagagtatgtgagaaccaaccaatgaaaacagtcccatcgctcttacccggtaagtaaacagtcagaaaattagcatgaaagcagtttagcattgggaggaagctcagatctctagagctgtcttgtcgccgcccaggattgacctgtgtgtaagtcccaataaactcacctactcatcaaaaaaaaaaaaaaaaaaacc

SEQ ID NO: 951 - DNA, 254 bp, Homo sapiens
ttttttttttttttttcaaagaccacagtgctttactttttgtcttaacagaggagataacttgagggacagcccccaaggcgccaggtagccttcaggggcgggcagggttgggggaggtaggagactcggaccggcagccctggctccagcttcatcatctgtgtcttccctctctggccaggctcttcgaggggatgcaggaggctgggcacggtgagctggcagggggcttggtcttcgggtgcccagcg

SEQ ID NO: 952 - DNA, 344 bp, Homo sapiens
tttttttttttttttttttttttttggtagttcttagttttattataaccttgtattttctggcaaaaatataaatctaaatgcatgatctctgggcacacagctcaagtatcagccttgagatgacctaagcagcaaaaatttggcctatttaattaaatgcacaggaggttgcagccgcatttattagaaaaatattatcctttggaaattcctttcttgaagattggctccagggcgttgttctttctgtttttatgcaattgcacttccttggcaggcagccaggcgctccggtgctcacaggccatgggacactccagttccctgcagacccagcgggc

SEQ ID NO: 953 - DNA, 451 bp, Homo sapiens
  misc_feature (1)..(451): n=a,t,g or c
agaattaacttctacaagaaaacatacaaacaaccccatctccagacaaaggaagagcaacggaagaaacgcgagcaagaacgaaaggagaagaaagcaaaggttttgggaatgcgaaggggcctcattttggctgaagattaataattttttaacatcttgtaaatattcctgtattctcaacttttttccttttgtaaatttttttttttttgctgtcatccccactttagtcacgagatctttttctgctaactgttcatagtctgtgtagtgtccatgggttcttcatgtgctatgatctctgaaaagacgttatcaccttaaagctcaaattctttgggatggtttttacttaagtccattaacaattcaggtttctaacgagacccatcctaaaattctgtttctagatttttaatgtcaagttcccaagtntcccctgctggtt

SEQ ID NO: 954 - DNA, 534 bp, Homo sapiens
tttttttttttttttttttttacagatatagctggtttattttggaaacaagtctcatccagaaatgttatttactgcatttaaaaaccatggaaggcgatttgcatggttcctccccacgccctcactcccaccaagtacagctttaccacccaaggtcctttcaggacccaggcctggcggctgtaggagagagcagtgaatcctaagggcaagagaatggcgtccacttgccagagtttctcagagcagagccagctgctcctccagacaggccggtgaggcacttgacaccctcacaaaggggaaaccctgaaggaagtacttcagggggtgcctgcccgatgcgggaggttttgggctagccctccccagatccccggcctgaggggcctcctccagctgcagaagtcaagctgccaaactgccaaagtattcctgcagctccagcagggcccggaagcgatgggagacagcgttcttctccgccttaggcatctctgcgtacgtctgctcatatccatcaggctgaaa

SEQ ID NO: 955 - DNA, 418 bp, Homo sapiens
ttttttttttttttttttttttttttttttttgacaatgagaaaaaattttatttatgacgatcttgagcagtataaaactcagaagctccactgaggtgaaggaaacatggacatgatactaagcaaagcctagtcttttccataaaatgaataagaagtacatttggtggagtttgagaccagcctgggcaacacagtgagaccctgtctctaaaagcattaaagcattaatcctcgcatttcgatagggctatgtagcttttaagtaagcaatgttagaatgagttgtagagttttatttttgtgaatatagtgagtgacagatggcaattacatgaggatatttgaacgaaggtacataagcctaaacaatttcacctaggtaaaatattgatgtcataaccaaactatatggc

SEQ ID NO: 956 - DNA, 384 bp, Homo sapiens
atttggaccggcatgcaggcaacttcttttgttgttacatacctgtattaggaaaattacacccattttacagaaaaatcccaaaacatatactgcaataagctcaaaacaatgtgaaaaagaccagtgtgaatggcacacaaaaatcgcctctttataaattaactggaattcatgatcatgaagtaggcacagggaaatccagtcctcagggctttgctctctggaagaacacctttaagtaatttttaaaaactttagcatcaggctgctgaagcgcttgacaaaactcctgaattatttctggagctacttgcaaggagggcaggtattcttgttgaagatactgaacacattctgggccccgtttgagatgaattgttt

SEQ ID NO: 957 - DNA, 419 bp, Homo sapiens
ttcacaaaagccatctctctttatttttcattcctgccgttcaaccagtttgtgcaagctgaggatgagtgggttttggaacgggaggcagagcatctggggacagaccctcctggaaatggtctatgcacactgctgaggctggttagacttgagaagcaattgacaataaactctacagaactggaaatgttcaaaagtgtcaaggtggcttctggctgttttcctgcctccctgtgggggtcagttatacccatcagtcctgtgcaaaggtcctgggactggcccaggggcagccggattcttcgctggggacaggagctgtcctgctcacccagcagaagcatgccaatggacaggtgctcgggtgtgtgcccaggtgctgtggcccccaaactccgtggctcctcaagcatgtc

SEQ ID NO: 958 - DNA, 429 bp, Homo sapiens
ttccataataacaaaagtcagtttattaaatgctcaattctcaaaattatatatatatatttttaattatttaaaaaaacttccatgcccttccattcccctccctccaaactaggtattgtccaagttgtatcaaatgccacaaagtctaccatgcacccagaagcagagaagacaggaggtccagaggacaaggtatggtggggtcactactcgcactgcagagtccacgcgagttaactcatgctgggggcaaagaatggaaagagctaatacacagacaaagcaaaagaatgaaatgcgcagctgaccagagacgtttacaatttataccaacttacaaatatttagggtgcccaccaactccgagagaacagaccaaactaaccacatgaaggaagacctctgccggggcctcctctccctaca

SEQ ID NO: 959 - DNA, 483 bp, Homo sapiens
tttagaagtgaaagttgtttttattgtttatatattatcaagcaggcatctgatgacctgtggaattagaaataccagcagacatttccaaggggtaggtgcacaggtcaacagaactaaactacagtgatcttcccttagatccttttctactgaggtgaatagctcaaaagacaaggatgcctttagtccaggctaacccctgtagcctctacgcaattaacacagaagaaaggccttcctcccttccagcactggggctcaacagtggactgagtgtttggtagtgtacatttccaatcttaatagagcaaagccagacttctgctttgatgactgagctacagggacaggagtggtccaaggttctcaaattctgtttttgtttttttccagacttctatactattgtctgccctaggctgtagggaatgctggttagtttgctgaacagacactgtgttcagcagggtttgtggtatc

SEQ ID NO: 960 - DNA, 414 bp, Homo sapiens
ttttttttcaataggtatcttctttttttattccagataactacttccactcacaatgagatgaattgtctttttacagaatttagggattccaagttgcctggttttaatataatacatattcacaaaatttacacagctcatgcataccataacttatacagagaacagtttagcagtctgcttaaaatgttacaaaaaaaaatcataaaaagccattgttctgttacacataatctgtactgaagtcataagcatcatcctcttcaatgattttatccaagataaaagaccttgtagactgttcacctgctgtagtctcctcagacagtgcctcccctgtctcttctgcagcaaacatgcctgagctgttttcatcaacttcttcatcaacagtttcctggtcactgtctt

SEQ ID NO: 961 - DNA, 303 bp, Homo sapiens
ttttcattttgaaaaagctatttactttttttccaaatattatcccaaaaggtgttttacagataagggtcaatacgaagtcaaacattctacagaagaaaatcgtttttacagacattaagaataattttaacagaagaaaaagctcacatctatctagatgtggctatgttccatgggaaaaatttcagcatccaaagtgcaaagaaaaaatgactgtagcttttcttaccacaaaatattgacaatcttcccttatagcctactctttattgttagttgggatgccaaaggatgatatat

SEQ ID NO: 962 - DNA, 391 bp, Homo sapiens
ttttttttttttttcaaccatcaatggcattttattgtggaagtttctatgtattacataggtattaacttccttcctctcctgctcctccccacaaaatccagaaagttatttttatacataaacaactgaacatataaaaatcttggacctaatttctctaaagtcttgggttaaaagaacttgagtggcgcttctcctttctgagagtactacttctcaaggaggattcatggtctgtcctttgctcactacagatttctcctcttctctgggaaaaaatggtcaatgcttctgcttccttttaataaactaatttcttgattattatacattattattattccccacttgacaccttcttagaaacttgattgttggatgtgttttt

SEQ ID NO: 963 - DNA, 760 bp, Homo sapiens
gccaggagttgtgagtttccaagccccagctcactctgaccacttctctgcctgcccagcatcatgaagggccttgcagctgccctccttgtcctcgtctgcaccatggccctctgctcctgtgcacaagttggtaccaacaaagagctctgctgcctcgtctatacctcctggcagattccacaaaagttcatagttgactattctgaaaccagcccccagtgccccaagccaggtgtcatcctcctaaccaagagaggccggcagatctgtgctgaccccaataagaagtgggtccagaaatacatcagcgacctgaagctgaatgcctgaggggcctggaagctgcgagggcccagtgaacttggtgggcccaggagggaacaggagcctgagccagggcaatggccctgccaccctggaggccacctcttctaagagtcccatctgctatgcccagccacattaactaactttaatcttagtttatgcatcatatttcattttgaaattgatttctattgttgagctgcattatgaaattagtattttctctgacatctcatgacattgtctttatcatcctttcccctttcccttcaactcttcgtacattcaatgcatggatcaatcagtgtgattagctttctcagcagacattgtgccatatgtatcaaatgacaaatctttattgaatggttttgctcagcaccaccttttaatatattggcagtacttattatataaaaggtaaaccagc

SEQ ID NO: 964 - DNA, 1201 bp, Homo sapiens; identical to SEQ ID NO: 409

SEQ ID NO: 965 - DNA, 2922 bp, Homo sapiens
ggacaccgggccatgcacgcccccaactgaagctgcatctcaaagccgaagattccagcagcccaggggatttcaaagagctcagactcagaggaacatctgcggagagacccccgaagccctctccagggcagtcctcatccagacgctccgctagtgcagacaggagcgcgcagtggccccggctcgccgcgccatggagcggatccccagcgcgcaaccaccccccgcctgcctgcccaaagcaccgggactggagcacggagacctaccagggatgtaccctgcccacatgtaccaagtgtacaagtcaagacggggaataaagcggagcgaggacagcaaggagacctacaaattgccgcaccggctcatcgagaaaaagagacgtgaccggattaacgagtgcatcgcccagctgaaggatctcctacccgaacatctcaaacttacaactttgggtcacttggaaaaagcagtggttcttgaacttaccttgaagcatgtgaaagcactaacaaacctaattgatcagcagcagcagaaaatcattgccctgcagagtggtttacaagctggtgagctgtcagggagaaatgtcgaaacaggtcaagagatgttctgctcaggtttccagacatgtgcccgggaggtgcttcagtatctggccaagcacgagaacactcgggacctgaagtcttcgcagcttgtcacccacctccaccgggtggtctcggagctgctgcagggtggtacctccaggaagccatcagacccagctcccaaagtgatggacttcaaggaaaaacccagctctccggccaaaggttcggaaggtcctgggaaaaactgcgtgccagtcatccagcggactttcgctcactcgagtggggagcagagcggcagcgacacggacacagacagtggctatggaggagaatcggagaagggcgacttgcgcagtgagcagccgtgcttcaaaagtgaccacggacgcaggttcacgatgggagaaaggatcggcgcaattaagcaagagtccgaagaaccccccacaaaaaagaaccggatgcagctttcggatgatgaaggccatttcactagcagtgacctgatcagctccccgttcctgggcccacacccacaccagcctcctttctgcctgcccttctacctgatcccaccttcagcgactgcctacctgcccatgctggagaagtgctggtatcccacctcagtgccagtgctatacccaggcctcaacgcctctgccgcagccctctctagcttcatgaacccagacaagatctcggctcccttgctcatgccccagagactcccttctcccttgccagctcatccgtccgtcgactcttctgtcttgctccaagctctgaagccaatcccccctttaaacttagaaaccaaagactaaactctctaggggatcctgctgctttgctttccttcctcgctacttcctaaaaagcaacaaaaaagtttttgtgaatgctgcaagattgttgcattgtgtatactgagataatctgaggcatggagagcagattcagggtgtgtgtgtgtgtgtgtgtgtgtgtgtgtatgtgcgtgtgcgtgcacatgtgtgcctgcgtgttggtataggactttaaagctccttttggcatagggaagtcacgaaggattgcttgacatcaggagacttgggggggattgtagcagacgtctgggcttttccccacccagagaatagcccccttcgatacacatcagctggattttcaaaagcttcaaagtcttggtctgtgagtcactcttcagtttgggagctgggtctgtggctttgatcagaaggtactttcaaaagagggctttccagggctcagctcccaaccagctgttaggaccccacccttttgcctttattgtcgacgtgactcaccagacgtcggggagagagagcagtcagaccgagctttctgctaacatggggaggtagcaggcactggcatagcacggtagtggtttggggaggtttccgcaggtctgctccccacccctgcctcggaagaataaagagaatgtagttccctactcaggctttcgtagtgattagcttactaaggaactgaaaatgggccccttgtacaagctgagctgccccggagggagggaggagttccctgggcttctggcacctgtttctaggcctaaccattagtacttactgtgcagggaaccaaaccaaggtctgagaaatgcggacaccccgagcgagcaccccaaagtgcacaaagctgagtaaaaagctgcccccttcaaacagaactagactcagttttcaattccatcctaaaactccttttaaccaagcttagcttctcaaaggcctaaccaagccttggcaccgccagatcctttctgtaggctaattcctcttgcccaacggcatatggagtgtccttattgctaaaaaggattccgtctccttcaaagaagttttatttttggtccagagtacttgttttcccgatgtgtccagccagctccgcagcagcttttcaagatgcactatgcctgattgctgatcgtgttttaactttttcttttcctgtttttattttggtattaagtcgttgcctttatttgtaaagctgttataaatatatattatataaatatattaaaaaggaaaatgtttcagatgtttatttgtataattacttgattcacacagtgagaaaaaatgaatgtattcctgtttttgaagagaagaataatttttttttctctagggagaggtacagtgtttatattttggagccttcctgaaggtgtaaaattgtaaatatttttatctatgagtaaatgttaagtagttgttttaaaatacttaataaaataattcttttcctgtggaag

SEQ ID NO: 966 - DNA, 415 bp, Homo sapiens
  misc_feature (1)..(415): n=a,t,g or c
gatcctgatgctgccagagccattgtggatgctttaccaccaccctgtgaatctgcctgcacagtaccaacagacgtggataagtggttccatcaccagaaaaactaatgagatttctctggaatacangctgatattgctacatcgtgttcatctggatgtattagaagtaaaagtagtagcttttcaaagctttaaatttgtagaactcatctaactaaagtaaattctgctgtgactaatccaatatactcagaatgttatccatctaaagcatttttcatatctcaactaagataacttttagcacatgcttaaatatcaaagcagttgtcatttggaagtcacttgtgaatagatgtgcaagggggngcacatattggntgtatatgtttnccntatgttaggggataaa

SEQ ID NO: 967 - DNA, 271 bp, Homo sapiens
  misc_feature (1)..(271): n=a,t,g or c
gatcggtttcgccatcatgacgcagtgtctcccagtggccctgttctccctggtgggcttcacccagatgaccatntgggccaagggcaagcaccgcagctacctgaaggagttccgggactacccgcccctgcgcatgcccatnatncccttcctgctctgagcgctcacccctgctgaggctcagcccctnaacccggtggcattctgggggaggagtggggcccacagntctccagcacccggaataaagcccgnctgccccagtcgg

SEQ ID NO: 968 - DNA, 297 bp, Homo sapiens
  misc_feature (1)..(297): n=a,t,g or c
agggttcagttccagctgattttatttccttctcaaaaaaagttatttacagarggtatatatcaacaatctgacaggcagtgaacttgacatgdttagctggcatgatttnnncttttttntcccccaaamattgtttttgkggccttgaattttargrcaaatwttytacasggsatattgcacagggtgggtggcaaaaaaaagtttaaaaacaaaaacccttavsggrmcygccttaaaaaggvagacgkcctagkgccygtcatgttatattammcatacatacacacaatc

SEQ ID NO: 969 - DNA, 3213 bp, Homo sapiens
agagactcaagatgattccctttttacccatgttttctctactattgctgcttattgttaaccctataaacgccaacaatcattatgacaagatcttggctcatagtcgtatcaggggtcgggaccaaggcccaaatgtctgtgcccttcaacagattttgggcaccaaaaagaaatacttcagcacttgtaagaactggtataaaaagtccatctgtggacagaaaacgactgttttatatgaatgttgccctggttatatgagaatggaaggaatgaaaggctgcccagcagttttgcccattgaccatgtttatggcactctgggcatcgtgggagccaccacaacgcagcgctattctgacgcctcaaaactgagggaggagatcgagggaaagggatccttcacttactttgcaccgagtaatgaggcttgggacaacttggattctgatatccgtagaggtttggagagcaacgtgaatgttgaattactgaatgctttacatagtcacatgattaataagagaatgttgaccaaggacttaaaaaatggcatgattattccttcaatgtataacaatttggggcttttcattaaccattatcctaatggggttgtcactgttaattgtgctcgaatcatccatgggaaccagattgcaacaaatggtgttgtccatgtcattgaccgtgtgcttacacaaattggtacctcaattcaagacttcattgaagcagaagatgacctttcatcttttagagcagctgccatcacatcggacatattggaggcccttggaagagacggtcacttcacactctttgctcccaccaatgaggcttttgagaaacttccacgaggtgtcctagaaaggttcatgggagacaaagtggcttccgaagctcttatgaagtaccacatcttaaatactctccagtgttctgagtctattatgggaggagcagtctttgagacgctggaaggaaatacaattgagataggatgtgacggtgacagtataacagtaaatggaatcaaaatggtgaacaaaaaggatattgtgacaaataatggtgtgatccatttgattgatcaggtcctaattcctgattctgccaaacaagttattgagctggctggaaaacagcaaaccaccttcacggatcttgtggcccaattaggcttggcatctgctctgaggccagatggagaatacactttgctggcacctgtgaataatgcattttctgatgatactctcagcatggttcagcgcctccttaaattaattctgcagaatcacatattgaaagtaaaagttggccttaatgagctttacaacgggcaaatactggaaaccatcggaggcaaacagctcagagtcttcgtatatcgtacagctgtctgcattgaaaattcatgcatggagaaagggagtaagcaagggagaaacggtgcgattcacatattccgcgagatcatcaagccagcagagaaatccctccatgaaaagttaaaacaagataagcgctttagcaccttcctcagcctacttgaagctgcagacttgaaagagctcctgacacaacctggagactggacattatttgtgccaaccaatgatgcttttaagggaatgactagtgaagaaaaagaaattctgatacgggacaaaaatgctcttcaaaacatcattctttatcacctgacaccaggagttttcattggaaaaggatttgaacctggtgttactaacattttaaagaccacacaaggaagcaaaatctttctgaaagaagtaaatgatacacttctggtgaatgaattgaaatcaaaagaatctgacatcatgacaacaaatggtgtaattcatgttgtagataaactcctctatccagcagacacacctgttggaaatgatcaactgctggaaatacttaataaattaatcaaatacatccaaattaagtttgttcgtggtagcaccttcaaagaaatccccgtgactgtctatacaactaaaattataaccaaagttgtggaaccaaaaattaaagtgattgaaggcagtcttcagcctattatcaaaactgaaggacccacactaacaaaagtcaaaattgaaggtgaacctgaattcagactgattaaagaaggtgaaacaataactgaagtgatccatggagagccaattattaaaaaatacaccaaaatcattgatggagtgcctgtggaaataactgaaaaagagacacgagaagaacgaatcattacaggtcctgaaataaaatacactaggatttctactggaggtggagaaacagaagaaactctgaagaaattgttacaagaagaggtcaccaaggtcaccaaattcattgaaggtggtgatggtcatttatttgaagatgaagaaattaaaagactgcttcagggagacacacccgtgaggaagttgcaagccaacaaaaaagttcaaggttctagaagacgattaagggaaggtcgttctcagtgaaaatccaaaaaccagaaaaaaatgtttatacaaccctaagtcaataacctgaccttagaaaattgtgagagccaagttgacttcaggaactgaaacatcagcacaaagaagcaatcatcaaataattctgaacacaaatttaatatttttttttctgaatgagaaacatgagggaaattgtggagttagcctcctgtggtaaaggaattgaagaaaatataacaccttacaccctttttcatcttgacattaaaagttctggctaactttggaatccattagagaaaaatccttgtcaccagattcattacaattcaaatcgaagagttgtgaactgttatcccattgaaaagaccgagccttgtatgtatgttatggatacataaaatgcacgcaagccattatctctccatgggaagctaagttataaaaataggtgcttggtgtacaaaactttttatatcaaaaggctttgcacatttctatatgagtgggtttactggtaaattatgttattttttacaactaattttgtactctcagaatgtttgtcatatgcttcttgcaatgcatattttttaatctcaaacgtttcaataaaaccatttttcagatataaagagaattacttcaaattgagtaattcagaaaaactcaagatttaagttaaaaagtggtttggacttgggaa

SEQ ID NO: 970 - DNA, 836 bp, Homo sapiens
gtgaaacaccctcggctgggaagtcagttcgttctctcctctcctctcttcttgtttgaacatggtgcggactaaagcagacagtgttccaggcacttacagaaaagtggtggctgctcgagcccccagaaaggtgcttggttcttccacctctgccactaattcgacatcagtttcatcgaggaaagctgaaaataaatatgcaggagggaaccccgtttgcgtgcgcccaactcccaagtggcaaaaaggaattggagaattctttaggttgtcccctaaagattctgaaaaagagaatcagattcctgaagaggcaggaagcagtggcttaggaaaagcaaagagaaaagcatgtcctttgcaacctgatcacacaaatgatgaaaaagaatagaactttctcattcatctttgaataacgtctccttgtttaccctggtattctagaatgtaaatttacataaatgtgtttgttccaattagctttgttgaacaggcatttaattaaaaaatttaggtttaaatttagatgttcaaaagtagttgtgaaatttgagaatttgtaagactaattatggtaacttagcttagtattcaatataatgcattgtttggtttcttttaccaaattaagtgtctagttcttgctaaaatcaagtcattgcattgtgttctaattacaagtatgttgtatttgagatttgcttagattgttgtactgctgccatttttattggtgtttgattattggaatggtgccatattgtcactccttctacttgctttaaaaagcagagttagatttttgcacattaaaaaattcagtattaatt

SEQ ID NO: 971 - DNA, 2333 bp, Homo sapiens
gaattcgggtgggtggggacagggctggccgcggcgctggcggggttggtggggctggccaccgccgccttcgggcatgtgcagcgggcggagatgttgcctaagacctcggggacgcgggccacttcgctggggaggccggaggaggaggaggatgagctggcccaccgctgcagcagcttcatggccccgcctgtgaccgacctgggcgagctgcgaaggaggccgggcgacatgaagaccaagatggagctgctgattctggagacccaggcccaggtgtgccaggctctggcacaggtagacgggggcgccaacttttctgtggaccggtgggagaggaaggaaggaggtggcggcatcagctgtgtacttcaagatgggtgtgttttcgaaaaggctggggtgagcatttctgttgttcatggaaatctttcagaggaagctgcaaaacaaatgagaagcagaggaaaagttctgaagactaaagatggtaaattgccattttgtgctatgggcgtgagctctgttatccaccccaagaatcctcatgctcctactatccatttcaactacagatactttgaagtagaagaagctgatggcaacaagcagtggtggtttggtggtggatgtgacctcactccaacatacttgaatcaagaagacgctgtccattttcacagaactctgaaggaggcttgtgaccagcatggtccagatctctaccccaaatttaaaaaatggtgtgatgattacttctttatagcccatcgtggagagcggcggggcattggtggtatcttttttgatgatcttgactctccgtccaaggaggaggtgtttcgctttgtacagagctgtgccagggctgtagttccttcttacattccccttgtgaaaaagcactgtgatgactcattcaccccccaggagaagctgtggcagcagctcagaagaggacggtatgtagaatttaatctgctgtatgatcggggcacaaagtttggcctcttcactccaggatccagaattgaaagtatcttgatgtctttacctctaactgcccgatgggagtacatgcattcaccctcagagaattccaaagaagctgaaattctggaagttctacgccatccaagggactgggtgcgttgatgcaggcagaatggctgtgcaggggtttggagggcacacgatgtgtcgtccccatgccactggtcggcactttgccactgtgtcgagttacccgtgccttagtcttctccactctgcaccctacctcgtggccagatgataacatgttttggatgctgtccgtgatgaatggtgagatgcgagattgtcagagtcaattgattaaacctcatttataccttctagtgtcattttatatgactagtttacaaaataggacattgagtttccaagtattgagataagggaatataaatagtattatatgtatcaggaaatctctcatcttgtttttgtttcatgtattttttaaagttttcatttgtgccacaaaaatctgtcgtggaatatattttattttcattaattcagtgaagttgagacttcatagtaatttagatgcaacttgaaggtaaaaattttactttgtcaatactgaagtctctgctgtaatccttatatatctttctccagagacataatattgtcaaatagatacacatttttctaataggtatttagaagcacttgaaatattcttaatctctgcatgtgttacaattcagttatttctgtagtttgtaaactctaaagtgacattactattattttagagatgtctaagttgtaattttgatttttgtggaaccattgtttgttaatgttgggattctctgcacttttgaatgtgaaagcttatatccctgaattctgatacttaagagttttctatttcagacatctctgtgtggaagttgagactaagaataatcctagggatgtcatgaatttaggcaatgtttctcatttggaaaatgaaatgagaaataatttccttctttaaagcaagtatatatagtatgagaaacttggaggcatttcatacacacatttcttaggaaaatggacacattgaaaatgtcctcttttttatattagagattctgcagctctttgctcttaagagcaaatcacaacaggattcttaatgtatgatttctttgttcatatttatgaatgtattattttatttgcttcgtaataaagtttataaggaagagcatctcatacatatcattatcgtggaacacgttgaacgtttgtgattctgtgtggcctttttggggctggaaaaa

SEQ ID NO: 972 - DNA, 328 bp, Homo sapiens
  misc_feature (1)..(328): n=a,t,g or c
cagctccgccatggctcctaaaggcagctccaaacagcagtctgaggaggacctgctcctgcagnatttcagccgcaatctctcggccaagtcctccgcgctcttcttcggaaacgcgttcatcgtgtctgccatccccatctggttatactggcgaatatggcatatggatcttattcagtctgctgttttgtatagtgtgatgaccctagtaagcacatatttggtagcctttgcatacaagaatgtgaaatttgttctcaagcacaaagtagcacagaagagggaggatgctgtttccaaagaagtgactcgaaaactttctgaa

SEQ ID NO: 973 - DNA, 350 bp, Homo sapiens
  misc_feature (1)..(350): n=a,t,g or c
gctcgtgggttggcagtatgagagttgtaatggcccgactgttgagtgagggggagcaggggatcccaacggcttgcgctgcctttgcgcanagccggcgggcggccacgtcgcggcctggctggggtaggagagggcggtccccagtgcagttgggtgaactaccgttgcacactggagtttctggtgtctttgcttggaactgacctagctcgtggcagggggaactcggctagcggccccacagcccctgctgactcaaaacaactgagttgtaagacgttcatcgccgtgttatccttgagtaaagaagcgggcttttgccatgttgtccaggctggtctctactt

SEQ ID NO: 974 - DNA, 595 bp, Homo sapiens
gggcaaggctgggccgggaagggcgtgggttgaggagaggctccagacccgcacgccgcgcgcacagagctctcagcgccgctcccagccacagcctcccgcgcctcgctcagctccaacatggcaaaaatctccagccctacagagactgagcggtgcatcgagtccctgattgctgtcttccagaagtatgctggaaaggatggttataactacactctctccaagacagagttcctaagcttcatgaatacagaactagctgccttcacaaagaaccagaaggaccctggtgtccttgaccgcatgatgaagaaactggacaccaacagtgatggtcagctagatttctcagaatttcttaatctgattggtggcctagctatggcttgccatgactccttcctcaaggctgtcccttcccagaagcggacctgaggaccccttggccctggccttcaaacccaccccctttccttccagcctttctgtcatcatctccacagcccacccatcccctgagcacactaaccacctcatgcaggccccacctgccaatagtaataaagcaatgtcacttttttaaaacatgaaa

SEQ ID NO: 975 - DNA, 2104 bp, Homo sapiens
gctgttgtcgctcgctcagcgtctccctctcggccgccctctcctcgggacgatggcgcgcggtggccgcggccgccgcctggggttagccctggggctgctgctggcgctggtgctggcgccgcgggttctgcgggccaagcccacggtgcgcaaagagcgcgtggtgcggcccgactcggagctgggcgagcggccccctgaggacaaccagagcttccagtacgaccacgaggccttcctgggcaaggaggactccaagaccttcgaccagctcaccccggacgagagcaaggagaggctagggaagattgttgatcgaatcgacaatgatggggatggctttgtcactactgaggagctgaaaacctggatcaaacgggtgcagaaaagatacatctttgataatgtcgccaaagtctggaaggattatgatagggacaaggatgataaaatttcctgggaagaatacaaacaagccacctatggttactacctaggaaaccccgcagagtttcatgattcttcagatcatcacacctttaaaaagatgctgccacgtgatgagagaagattcaaagctgcagacctcaatggtgacctgacagctactcgggaggagttcactgcctttctgcatcctgaagagtttgaacatatgaaggaaattgtggttttggaaaccctggaggacatcgacaagaacggggatgggtttgtggatcaggatgagtatattgcggatatgttttcccatgaggagaatggccctgagccagactgggttttatcagaacgggagcagtttaacgaattccgggatctgaacaaggacgggaagttagacaaagatgagattcgccactggatcctccctcaagattatgatcacgcacaggctgaggccaggcatctggtatatgaatcagacaaaaacaaggatgagaagctaactaaagaggaaatattggagaactggaacatgtttgttggaagccaagctaccaattacggggaagatctcacaaaaaatcatgatgagctttgatagacactcaccagaatatggcagactgtcataggcattctgttattgtcttggattgttgctacaattgtctaattacagcagttgtgatcccacaaaaagcaagtttatacctcagattggggtataaaaattgtttttcgctcagtatttactggaaaatggacatcactagtctttcagtaagatttctctcaaaacacgtgaaaaccttggtaaattgcaattctttctggggatatattggtacaacatgacttaaaacttttttttttctattaaaacttaaaggggaacaaaacttgaaaaagccctgttcttcagaaggtgagtgggttgagggaggcagtaatatgaagtgactgctgtgtattttaactaccagatttttatatttgccactgttagatagttggaaaggggaaattctgtttaagcgaaagtggtatcatcctaggtaagcttatttcagaacaagtctaatatatcagattctttcttttcgactttatactctgagttattacttactgtaagtggtgtatatgaaacctccatgcattttccagtatggatctgctaatatgcacagtaaatccatgtctttgtttgtttttctattaagaagcaatcaagaaagataatgtgaaaaagaaaggaatttagaggtagggaaaagatgaatgtcagacatgtgaagaactatagtaaaaatgataaaccacctaaatatccttgaacctaccttaaaatgccaatgaggtaggcctgatctttgaatagtggctaggatacaatgcatttcctcagtgatcactgattagaatgagttggtgggatccttgggaagccaaacggagcggggttctggatcatgtcccatccagtccagtgaatccccgacccgcagacctgccccccccgcaacagcttataccatggaatgaggacaaggtgatactctgagctgtggactgaactggcagacacaacctgtacagattgaaatttcaccttgtaaggaggaagtgaatgaaataaaggatccccctaagg

SEQ ID NO: 976 - DNA, 367 bp, Homo sapiens
acaagttactacaatagaaccgttttattaaacatatgcccgwatttatbycgtacaaaacggagtaacacttcttsttttcctctgcccccggaggcactaccgcagaacttcatgttcacagaaacacacgtcatggcamgygtgtcaaaacgtcatgacaagcmggaamgtgcaattctgaaagtaatgccacacaaccamcgcgggaaatgdaaacmggcagmggccagcaggtttctcggctagggctctgcctataccgccctggtcctgctcatctttcagcmgtaaacattttacggcgagaactcctgagcactatgtaagaamtctcccggtagsatccttccaattccatctatcc

SEQ ID NO: 977 - DNA, 2427 bp, Homo sapiens
gacgtttcgcgccaatttcggttggccggccacagtccaccgcgcggagattctcagcttccccaggagcaagacctctgagcccgccaagcgcggccgcacggccctcggcagcgatggcactgaaggactacgcgctagagaaggaaaaggttaagaagttcttacaagagttctaccaggatgatgaactcgggaagaagcagttcaagtatgggaaccagttggttcggctggctcatcgggaacaggtggctctgtatgtggacctggacgacgtagccgaggatgaccccgagttggtggactcaatttgtgagaatgccaggcgctacgcgaagctctttgctgatgccgtacaagagctgctgcctcagtacaaggagagggaagtggtaaataaagatgtcctggacgtttacattgagcatcggctaatgatggagcagcggagtcgggaccctgggatggtccgaagcccccagaaccagtaccctgctgaactcatgcgcagatttgagctgtattttcaaggccctagcagcagcaagcctcgtgtgatccgggaagtgcgggctgactctgtggggaagttggtaactgtgcgtggaatcgtcactcgtgtctctgaagtcaaacccaagatggtggtggccacttacacttgtgaccagtgtggggcagagacctaccagccgatccagtctcccactttcatgcctctgatcatgtgcccaagccaggagtgccaaaccaaccgctcaggagggcggctgtatctgcagacacggggctccagattcatcaaattccaggagatgaagatgcaagaacatagtgatcaggtgcctgtgggaaatatccctcgtagtatcacggtgctggtagaaggagagaacacaaggattgcccagcctggagaccacgtcagcgtcactggtattttcttgccaatcctgcgcactgggttccgacaggtggtacagggtttactctcagaaacctacctggaagcccatcggattgtgaagatgaacaagagtgaggatgatgagtctggggctggagagctcaccagggaggagctgaggcaaattgcagaggaggatttctacgaaaagctggcagcttcaatcgccccagaaatatacgggcatgaagatgtgaagaaggcactgctgctcctgctagtcgggggtgtggaccagtctcctcgaggcatgaaaatccggggcaacatcaacatctgtctgatgggggatcctggtgtggccaagtctcagctcctgtcatacattgatcgactggcgcctcgcagccagtacacaacaggccggggctcctcaggagtggggcttacggcagctgtgctgagagactccgtgagtggagaactgaccttagagggtggggccctggtgctggctgaccagggtgtgtgctgcattgatgagttcgacaagatggctgaggccgaccgcacagccatccacgaggtcatggagcagcagaccatctccattgccaaggccggcattctcaccacactcaatgcccgctgctccatcctggctgccgccaaccctgcctacgggcgctacaaccctcgccgcagcctggagcagaacatacagctacctgctgcactgctctcccggtttgacctcctctggctgattcaggaccggcccgaccgagacaatgacctacggttggcccagcacatcacctatgtgcaccagcacagccggcagcccccctcccagtttgaacctctggacatgaagctcatgaggcgttacatagccatgtgccgcgagaagcagcccatggtgccagagtctctggctgactacatcacagcagcatacgtggagatgaggcgagaggcttgggctagtaaggatgccacctatacttctgcccggaccctgctggctatcctgcgcctttccactgctctggcacgtctgagaatggtggatgtggtggagaaagaagatgtgaatgaagccatcaggctaatggagatgtcaaaggactctcttctaggagacaaggggcagacagctaggactcagagaccagcagatgtgatatttgccaccgtccgtgaactggtctcagggggccgaagtgtccggttctctgaggcagagcagcgctgtgtatctcgtggcttcacacccgcccagttccaggcggctctggatgaatatgaggagctcaatgtctggcaggtcaatgcttcccggacacggatcacttttgtctgattccagcctgcttgcaaccctggggtcctcttgttccctgctggcctgccccttgggaaggggcagtgatgcctttgaggggaaggaggagcccctctttctcccatgctgcacttactccttttgctaataaaagtgtttgtagattgtc

SEQ ID NO: 978 - DNA, 661 bp, Homo sapiens
cggccgcggatccattgtggtccgcttctctgcactatgtcgggtggcctcctgaaggcgctgcgcagcgactcctacgtggagctgagccagtaccgggaccagcacttccggggtgacaatgaagaacaagaaaaattactgaagaaaagctgtacgttatatgttggaaatctttctttttacacaactgaagaacaaatctatgaactcttcagcaaaagtggtgacataaagaaaatcattatgggtctggataaaatgaagaaaacagcatgtggattctgttttgtggaatattactcacgcgcagatgcggaaaactccatgcggtacataaatgggacgcgtctggatgaccgaatcattcgcacagactgggacgcaggctttaaggagggcaggcaatacggccgtgggcgatctgggggccaggttcgggatgagtatcggcaggactacgatgctgggagaggaggctatggaaaactggcacagaaccagtgagtggtgagagctctgtcagtgacaaacactcctttggcctgttgaatttgctgaagaacatcacctaaagtctgcacacgagcccatttttaccaagatttgagtcagtgtctttactgagctggaagcctctgaaagttattaaaggcagatc

SEQ ID NO: 979 - DNA, 328 bp, Homo sapiens
ggcaaaactgcctattctgctatttaaaaaccctcaatgactttattttctactgccgcctttttcatgtgcaccaaaatgaaaatgtttaaattaactgtgttgtacaaatggtacccaacacaaactttttttaaattagtaatacttttgtttaaagttttaagtttgcattttgactttttttgtaaggatgtatgttgtgtgtttaacctttattaactaacgttaaaagctgtgatgtgtgcgtagaatattacgtatgcatgttcatgtctaaagaatggctgttgatgataaaataaaaatcagctttcatttttctaaa

SEQ ID NO: 980 - DNA, 1049 bp, Homo sapiens
gtcttgatgcccaggttgtaaatggttacatgattcatgatcaggaaagcaaatcagaggttcagattccttaccctctgtcagaaaacaatcaagtgcagagtggaagagctttccatcacggaagattcatcatgagtctccggaaagcagctatggcagagcccaatgcaaagtttattggaggtgttgtgttacagttattagaggaagatgatgttgtgatgggagttcagtacaaggataaagagactggagatatcaaggaactccatgctccactgactgttgttgcagatgggcttttctccaagttcaggaaaagcctggtctccaataaagtttctgtatcatctcattttgttggctttcttatgaagaatgcaccacagtttaaagcaaatcatgctgaacttattttagctaacccgagtccagttctcatctaccagatttcatccagtgaaactcgagtacttgttgacattagaggagaaatgccaaggaatttaagagaatacatggttgaaaaaatttacccacaaatacctgatcacctgaaagaaccattcttagaagccactgacaattctcatctgaggtccatgccagcaagcttccttcctccttcatcagtgaagaaacgaggtgttcttcttttgggagacgcatataatatgaggcatccacttactggtggaggaatgactgttgcttttaaagatataaaactatggagaaaactgctaaagggtatccctgacctttatgatgatgcagctattttcgaggccaaaaaatcattttactgggcaagaaaaacatctcattcctttgtcgtgaatatccttgctcaggctctttatgaattattttctgccacagatgattccctgcatcaactaagaaaagcctgttttctttatttcaaacttggtggcgaatgtgttgcgggtcctgttgggctgctttctgtattgtctcctaaccctctagttttaattggacacttctttgctgttgcaatctatgccgtgtatttttgcttt

SEQ ID NO: 981 - DNA, 2476 bp, Homo sapiens
cggccagcacaccccggcacctcctctgcggcagctgcgcctcgcaagcgcagtgccgcagcgcacgccggagtggctgtagctgcctcggcgcggctgccgccctgcgcgggctgtgggctgcgggctgcgcccccgctgctggccagctctgcacggctgcgggctctgcggcgcccggtgctctgcaacgctgcggcgggcggcatgggataacgcggccatggtgcgccgagatcgcctccgcaggatgagggagtggtgggtccaggtggggctgctggccgtgcccctgcttgctgcgtacctgcacatcccaccccctcagctctcccctgcccttcactcatggaagtcttcaggcaagtttttcacttacaagggactgcgtatcttctaccaagactctgtgggtgtggttggaagtccagagatagttgtgcttttacacggttttccaacatccagctacgactggtacaagatttggaagggtctgaccttgaggtttcatcgggtgattgcccttgatttcttaggctttggcttcagtgacaaaccgagaccacatcactattccatatttgagcaggccagcatcgtggaagcgcttttgcggcatctggggctccagaaccgcagaatcaaccttctttctcatgactatggagatattgttgctcaggagcttctctacaggtacaagcagaatcgatctggtcggcataccataaagagtctctgtctgtcaaatggaggtatctttcctgagactcaccgtccactccttctccaaaagctactcaaagatggaggtgtgctgtcacccatcctcacacgactgatgaacttctttgtattctctcgaggtctcaccccagtctttgggccgtatactcggccctctgagagtgagctgtgggacatgtgggcagggatccgcaacaatgacgggaacttagtcattgacagtctcttacagtacatcaatcagaggaagaagttcagaaggcgctgggtgggagctcttgcctctgtaactatccccattcattttatctatgggccattggatcctgtaaatccctatccagagtttttggagctgtacaggaaaacgctgccgcggtccacagtgtcgattctggatgaccacattagccactatccacagctagaggatcccatgggcttcttgaatgcatatatgggcttcatcaactccttctgagctggaaagagtagcttccctgtattacctcccctactcccttatgtgttgtgtattccacttaggaagaaatgcccaaaagaggtcctggccatcaaacataattctctcacaaagtccactttactcaaattggtgaacagtgtataggaagaagccagcaggagctctgactaaggttgacataatagtccacctcccattactttgatatctgatcaaatgtatagacttggctttgttttttgtgctattaggaaattctgatgagcattactattcactgatgcagaaagacgttcttttgcataaaagacttttttttaacactttggacttctctgaaatatttagaagtgctaatttctggcccacccccaacaggaattctatagtaaggaggaggagaaggggggctccttccctctcctcgaatgacgttatgggcacatgccttttaaaagttctttaagcaacacagagctgagtcctctttgtcatacctttggatttagtgtttcatcagctgtttttagttataaacattttgttaaaatagatattggtttaaatgatacagtattttaggtatgatttaagactatgatttacctatacattatatatattttataaagatactaaaccagcatacccttactctgccagagtagtgaagctaattaaacacgtttggtttctgaataaattgaactaaatccaaactatttcctaaaatcacaggacattaaggaccaatagcatctgtgccagagatgtactgttattagctgggaagaccaattctaacagcaaataacagtctgagactcctcatacctcagtggttagaagcatgtctctcttgagctacagtagaggggaagggattgttgtgtagtcaagtcaccatgctgaatgtacactgattcctttatgatgactgcttaactccccactgcctgtcccagagaggctttccaatgtagctcagtaattcctgttactttacagacaggaaagttccagaaactttaagaacaaactctgaaagacctatgagcaaatggtgctgaatactttttttttaaagccacatttcattgtcttagtcaaagcaggattattaagtgattatttaaaattcgtttttttaaattagcaacttcaagtataacaactttgaaactggaataagtgtttattttctattaataaaaatgaattgtgacaaaaaaaaaaccg

SEQ ID NO: 982 - DNA, 380 bp, Homo sapiens
gtcggttgggtaggcagtcatggatcaggtaatgcagtttgttgagccaagtcggcagtttgtaaaggactccattcggctggttaaaagatgcactaaacctgatagaaaagaattccagaagattgccatggcaacagcaataggatttgctataatgggattcattggcttctttgtgaaattgatccatattcctattaataacatcattgttggtggctgaatacattttggaagagagtttttcatcttagagattggtgaacaagtgtgagggtgtgagaactcacagaatacaaatttgcctgtatgttttgtgggtttttttttttcctttcaagatgttttctatttccaaattaaagtaatttcaaagt

SEQ ID NO: 983 - DNA, 287 bp, Homo sapiens
  misc_feature (1)..(287): n=a,t,g or c
ctgagtcgaggttatgtacttcctgttgtcagttacatccgaaagtgtctggagaagctggacactgacatttcactcattcgctattttgtcactgaggtgctggacgtcattgctcctccttatncctctgacttcgtgcaacttttcctccccatcctggagaatgacagnatcgnaggtnccatcanaacggaaggtgagcatgaccctgtgacggagtttatagctcactgcaantctaactacatcatggtgaactaatttagagcatcctccagagctga

SEQ ID NO: 984 - DNA, 2047 bp, Homo sapiens
gtcgcggctcgagagcgagagtcacgtcccggcgctagcccagcccgacccaggcccaccgtggtgcacgcaaaccacttcctggccatgcgctccctcctgcttctcagcgccttctgcctcctggaggcggccctggccgccgaggtgaagaaacctgcagccgcagcagctcctggcactgcggagaagttgagccccaaggcggccacgcttgccgagcgcagcgccggcctggccttcagcttgtaccaggccatggccaaggaccaggcagtggagaacatcctggtgtcacccgtggtggtggcctcgtcgctggggctcgtgtcgctgggcggcaaggcgaccacggcgtcgcaggccaaggcagtgctgagcgccgagcagctgcgcgacgaggaggtgcacgccggcctgggcgagctgctgcgctcactcagcaactccacggcgcgcaacgtgacctggaagctgggcagccgactgtacggacccagctcagtgagcttcgctgatgacttcgtgcgcagcagcaagcagcactacaactgcgagcactccaagatcaacttccgcgacaagcgcaggccgctgcagtccatcaacgagtgggccgcgcagaccaccgacggcaagctgcccgaggtcaccaaggacgtggagcgcacggacggcgccctgttagtcaacgccatgttcttcaagccacactgggatgagaaattccaccacaagatggtggacaaccgtggcttcatggtgactcggtcctataccgtgggtgtcatgatgatgcaccggacaggcctctacaactactacgacgacgagaaggaaaagctgcaaatcgtggagatgcccctggcccacaagctctccagcctcatcatcctcatgccccatcacgtggagcctctcgagcgccttgaaaagctgctaaccaaagagcagctgaagatctggatggggaagatgcagaagaaggctgttgccatctccttgcccaagggtgtggtggaggtgacccatgacctgcagaaacacctggctgggctgggcctgactgaggccattgacaagaacaaggccgacttgtcacgcatgtcaggcaagaaggacctgtacctggccagcgtgttccacgccaccgcctttgagttggacacagatggcaacccctttgaccaggacatctacgggcgcgaggagctgcgcagccccaagctgttctacgccgaccaccccttcatcttcctagtgcgggacacccaaagcggctccctgctattcattgggcgcctggtccggcctaagggtgacaagatgcgagacgagttatagggcctcagggtgcacacaggatggcaggaggcatccaaaggctcctgagacacatgggtgctattggggttgggggggaggtgaggtaccagccttggatactccatggggtgggggtggaaaagcagaccggggttcccgtgtgcctgagcggaccttcccagctagaattcactccacttggacatgggccccagataccatgatgctgagcccggaaactccacatcctgtgggacctgggccatagtcattctgcctgccctgaaagtcccagatcaagcctgcctcaatcagtattcatatttatagccaggtaccttctcacctgtgagaccaaattgagctaggggggtcagccagccctcttctgacactaaaacacctcagctgcctccccagctctatcccaacctctcccaactataaaactaggtgctgcagcccctgggaccaggcacccccagaatgacctggccgcagtgaggcggattgagaaggagctcccaggaggggcttctgggcagactctggtcaagaagcatcgtgtctggcgttgtggggatgaactttttgttttgtttcttccttttttagttcttcaaagatagggagggaagggggaacatgagcctttgttgctatcaatccaagaacttatttgtacattttttttttcaataaaacttttccaatgacattt

SEQ ID NO: 985 - DNA, 3614 bp, Homo sapiens
ctgaggaagtgggacctccccttttgggtcggtagttcagcgccggcgccggtgtgcgagccgcggcagagtgaggcaggcaacccgaggtgcggagcgacctgcggaggctgagccccgctttctcccagggtttcttatcagccagccgccgctgtccccgggggagtaggaggctcctgacaggccgcggctgtctgtgtgtccttctgagtgtcagaggaacggccagaccccgcgggccggagcagaacgcggccagggcagaaagcggcggcaggagaagcaggcagggggccggaggacgcagaccgagacccgaggcggaggcggaccgcgagccggccatgtcggtggtggggttggacgtgggctcgcagagctgctacatcgcggtagcccgggccgggggcatcgagaccatcgccaatgagttcagcgaccggtgcaccccgtcagtcatatcatttggatcaaaaaatagaacaatcggagttgcagccaaaaatcagcaaatcactcatgcaaacaatacggtgtctaacttcaaaagatttcatggccgagcattcaatgaccccttcattcaaaaggagaaggaaaacttgagttacgatttggttccattgaaaaatggtggagttggaataaaggtaatgtacatgggtgaagaacatctatttagtgtggagcagataacagccatgttgttgactaagctgaaggaaactgctgaaaacagcctcaagaaaccagtaacagattgtgttatttcagtcccctccttctttacagatgctgagaggcgatctgtgttagatgctgcacagattgttggcctaaactgtttaagacttatgaatgacatgacagctgttgctttgaattacggaatttataagcaggatctcccaagcctggatgagaaacctcggatagtggtttttgttgatatgggacattcagcttttcaagtgtctgcttgtgcttttaacaagggaaaattgaaggtactgggaacagcttttgatcctttcttaggaggaaaaaacttcgatgaaaagttagtggaacatttttgtgcagaatttaaaactaagtacaagttggatgcaaaatccaaaatacgagcactcctacgtctgtatcaggaatgtgaaaaactgaaaaagctaatgagctctaacagcacagaccttccactgaatatcgaatgctttatgaatgataaagatgtttccggaaagatgaacaggtcacaatttgaagaactctgtgctgaacttctgcaaaagatagaagtacccctttattcactgttggaacaaactcatctcaaagtagaagatgtgagtgcagttgagattgttggaggcgctacacgaattccagctgtgaaggaaagaattgccaaattctttggaaaagatattagcacaacactcaatgcagatgaagcagtagccagaggatgtgcattacagtgtgcaatactttccccggcatttaaagttagagaattttccgtcacagatgcagttccttttccaatatctctgatctggaaccatgattcagaagatactgaaggtgttcatgaagtctttagtcgaaaccatgctgctcctttctccaaagttctcacctttctgagaagggggccttttgagctagaagctttctattctgatccccaaggagttccatatccagaagcaaaaataggccgctttgtagttcagaatgtttctgcacagaaagatggagaaaaatctagagtaaaagtcaaagtgcgagtcaacacccatggcattttcaccatctctacggcatctatggtggagaaagtcccaactgaggagaatgaaatgtcttctgaagctgacatggagtgtctgaatcagagaccaccagaaaacccagacactgataaaaatgtccagcaagacaacagtgaagctggaacacagccccaggtacaaactgatgctcaacaaacctcacagtctcccccttcacctgaacttacctcagaagaaaacaaaatcccagatgctgacaaagcaaatgaaaaaaaagttgaccagcctccagaagctaaaaagcccaaaataaaggtggtgaatgttgagctgcctattgaagccaacttggtctggcagttagggaaagaccttcttaacatgtatattgagacagagggtaagatgataatgcaagataaattggaaaaagaaaggaatgatgctaaaaatgcagttgaggaatatgtgtatgagttcagagacaagctgtgtggaccatatgaaaaatttatatgtgagcaggatcatcaaaattttttgagactcctcacagaaactgaagactggctgtatgaagaaggagaggaccaagctaaacaagcatatgttgacaagttggaagaattaatgaaaattggcactccagttaaagttcggtttcaggaagctgaagaacggccaaaaatgtttgaagaactaggacagaggctgcagcattatgccaagatagcagctgacttcagaaataaggatgagaaatacaaccatattgatgagtctgaaatgaaaaaagtggagaagtctgttaatgaagtgatggaatggatgaataatgtcatgaatgctcaggctaaaaagagtcttgatcaggatccagttgtacgtgctcaggaaattaaaacaaaaatcaaggaattgaacaacacatgtgaacccgttgtaacacaaccgaaaccaaaaattgaatcacccaaactggaaagaactccaaatggcccaaatattgataaaaaggaagaagatttagaagacaaaaacaattttggtgctgaacctccacatcagaatggtgaatgttaccctaatgagaaaaattctgttaatatggacttggactagataaccttaaattggcctattccttcaattaataaaatatttttgccatagtatgtgactctacataacatactgaaactatttatattttcttttttaaggatatttagaaattttgtgtattatatggaaaaagaaaaaaagcttaagtctgtagtctttatgatcctaaaagggaaaattgccttggtaactttcagattcctgtggaattgtgaattcatactaagctttctgtgcagtctcaccatttgcatcactgaggatgaaactgacttttgtcttttggagaaaaaaaactgtactgcttgttcaagagggctgtgattaaaatctttaagcatttgttcctgccaaggtagttttcttgcattttgctctccattcagcatgtgtgtgggtgtggatgtttataaacaagactaagtctgacttcataagggctttctaaaaccatttctgtccaagagaaaatgactttttgctttgatattaaaaattcaatgagtaaaacaaaagctagtcaaatgtgttagcagcatgcagaacaaaaactttaaactttctctctcactatacagtatattgtcatgtgaaagtgtggaatggaagaaatgtcgatcctgttgtaactgattgtgaacacttttatgagctttaaaataaagttcatcttatggtgtcatttct

SEQ ID NO: 986 - DNA, 409 bp, Homo sapiens
  misc_feature (1)..(409): n=a,t,g or c
tgaaaagcctgtaagaaatacaggatttgataatattttgaaggcaggaaaaacccaaattgtttcttctttgagagtcatgactaccttctggtgtggagaaattgccattggaaaatttgacaattttgattctcactggtatgtttaaaaactgaataaaaggaatagaatttttttttgataaaggatcacaaaacaattctaaaacctaactgtttttaccattgaaatttaaattgtgataataggttttaaatgtctaggaatgcaactgatagggcttttcttggaactgttagtttttttgaagtagttttttcatgtttaatttgtatttgttaaaaaaacaaaaaggcaaaaattccccaaaaccccggttaaccaccnggggcaaaacngttgtggc

SEQ ID NO: 987 - DNA, 390 bp, Homo sapiens
  misc_feature (1)..(390): n=a,t,g or c
atcttanttaaaacctttttnacaatttattncctgttgnnaanctttaaaaatgaggtnctagctaagtgcagggtttcagtggtgaaattttgaccatgtgaacacataaataaatatttacagtctttggcaaaacacatgacgtttcatcaacctatacgataaatttgtttagaaaancataaataatttacaaaaaatatggtacattctaaatattcacatcatcgtcactcccacaccattgtacggttgaccccacaacacagaaacaggaaaacctgcacgctgttgacagtcgctacatttnatgaggtatcccaacgcttcgttggtctcggggantacaggctccacaggcaaaaaggtaaaaagtgcaggcaaanc

SEQ ID NO: 988 - DNA, 535 bp, Homo sapiens
  misc_feature (1)..(535): n=a,t,g or c
cattgttgccattggcaggttttggcaatgtttgggggntaaagnacagttagnaaatattattcagttaaacaataatgtgtgaacttttaagatggataatagggncatggnactgagtgctgnctatcttgtaaatgtgcacaggtacacttaccttttttttttttttttttttaagtttttcccattcaggaaaacaacattgtgatctgtactacagggaaccaaatgtcatgcgtcatacatgtgggtataaagtacataaaatatatctaactattcataatgtggggtgggtaatactgtctgtgaaataatgtaagaagcttttcacttaaaaaaaatgcattactttcacttaacactagacaccaggtcgaaaattttcaaggttatagtacttatttcaacaattcttgagatgctagctagtgttgaagctaaaaatagctttatttatgctgaattgtgatttttttatgccaaaatttttttngggtctaatcattgatgangcctgggnattaatntt

SEQ ID NO: 989 - DNA, 370 bp, Homo sapiens
  misc_feature (1)..(370): n=a,t,g or c
gggtgctttatttccatgctgggcgcccgggaagtatgtacacggggtacgtgccaagcatcctcgcgcgaccccgagagcccggggagcgggngcttgccggccgtcgcactcatttacccggagacagggagaggctcttctgcgtgaagcggttgtgcagagcctcatgcatcacggagcatgagaagatgttcccctgctgccacctgctcttgtccacggtgagcttgctgtagaggaagaaggagccgtcggagtncagcatggggaggcntgggtnttgtagttnttctccggctgcccgctgctttcccantccacgggcgatgtcgctgggggtagaagcctttgaacagggaagtcaggc

SEQ ID NO: 990 - DNA, 395 bp, Homo sapiens
  misc_feature (1)..(395): n=a,t,g or c
tttgttacttttacatgatctttattatttaagaaaaacctcttttaaccatttatataacagaaaaaaaatagggaggctggtagatcatcacatatatagtagctaaaatatgaaaggccagggaatttattattaatgaagtcataaaacagacttaaccaaaagtgtgtgctaggaaacaagcagtttcacttcagagacttcattgcaggaacccagtttccttatgtggaaaaaagtgattataaataacagttatctgaaaggtggttgagaggattaaatgagatcacctatgcaaacaaatacatgtaggtatgaaagaccatccgtcctgggggtngtggaaagtttaagtttccccnccagaacccttccctttaagggcctta

SEQ ID NO: 991 - DNA, 2133 bp, Homo sapiens
cgggagagcgcgctctgcctgccgcctgcctgcctgccactgagggttcccagcaccatgagggcctggatcttctttctcctttgcctggccgggagggccttggcagcccctcagcaagaagccctgcctgatgagacagaggtggtggaagaaactgtggcagaggtgactgaggtatctgtgggagctaatcctgtccaggtggaagtaggagaatttgatgatggtgcagaggaaaccgaagaggaggtggtggcggaaaatccctgccagaaccaccactgcaaacacggcaaggtgtgcgagctggatgagaacaacacccccatgtgcgtgtgccaggaccccaccagctgcccagcccccattggcgagtttgagaaggtgtgcagcaatgacaacaagaccttcgactcttcctgccacttctttgccacaaagtgcaccctggagggcaccaagaagggccacaagctccacctggactacatcgggccttgcaaatacatccccccttgcctggactctgagctgaccgaattccccctgcgcatgcgggactggctcaagaacgtcctggtcaccctgtatgagagggatgaggacaacaaccttctgactgagaagcagaagctgcgggtgaagaagatccatgagaatgagaagcgcctggaggcaggagaccaccccgtggagctgctggcccgggacttcgagaagaactataacatgtacatcttccctgtacactggcagttcggccagctggaccagcaccccattgacgggtacctctcccacaccgagctggctccactgcgtgctcccctcatccccatggagcattgcaccacccgctttttcgagacctgtgacctggacaatgacaagtacatcgccctggatgagtgggccggctgcttcggcatcaagcagaaggatatcgacaaggatcttgtgatctaaatccactccttccacagtaccggattctctctttaaccctccccttcgtgtttcccccaatgtttaaaatgtttggatggtttgttgttctgcctggagacaaggtgctaacatagatttaagtgaatacattaacggtgctaaaaatgaaaattctaacccaagacatgacattcttagctgtaacttaactattaaggccttttccacacgcattaatagtcccatttttctcttgccatttgtagctttgcccattgtcttattggcacatgggtggacacggatctgctgggctctgccttaaacacacattgcagcttcaacttttctctttagtgttctgtttgaaactaatacttaccgagtcagactttgtgttcatttcatttcagggtcttggctgcctgtgggcttccccaggtggcctggaggtgggcaaagggaagtaacagacacacgatgttgtcaaggatggttttgggactagaggctcagtggtgggagagatccctgcagaatccaccaaccagaacgtggtttgcctgaggctgtaactgagagaaagattctggggctgtcttatgaaaatatagacattctcacataagcccagttcatcaccatttcctcctttacctttcagtgcagtttcttttcacattaggctgttggttcaaacttttgggagcacggactgtcagttctctgggaagtggtcagcgcatcctgcagggcttctcctcctctgtcttttggagaaccagggctcttctcaggggctctagggactgccaggctgtttcagccaggaaggccaaaatcaagagtgagatgtagaaagttgtaaaatagaaaaagtggagttggtgaatcggttgttctttcctcacatttggatgattgtcataaggtttttagcatgttcctccttttcttcaccctcccctttgttcttctattaatcaagagaaacttcaaagttaatgggatggtcggatctcacaggctgagaactcgttcacctccaagcatttcatgaaaaagctgcttcttattaatcatacaaactctcaccatgatgtgaagagtttcacaaatctttcaaaataaaaagtaatgacttagaaactgaaaaaaaaaaaaaaaaaaaaaaaaaaaaaa

SEQ ID NO: 992 - DNA, 5416 bp, Homo sapiens; identical to SEQ ID NO: 429

SEQ ID NO: 993 - DNA, 4792 bp, Homo sapiens
ggaccacccagtaccgatcccttcacgaccgtcaccatggaagtgtcaccattgcagcctgtaaatgaaaatatgcaagtcaacaaaataaagaaaaatgaagatgctaagaaaagactgtctgttgaaagaatctatcaaaagaaaacacaattggaacatattttgctccgcccagacacctacattggttctgtggaattagtgacccagcaaatgtgggtttacgatgaagatgttggcattaactatagggaagtcacttttgttcctggtttgtacaaaatctttgatgagattctagttaatgctgcggacaacaaacaaagggacccaaaaatgtcttgtattagagtcacaattgatccggaaaacaatttaattagtatatggaataatggaaaaggtattcctgttgttgaacacaaagttgaaaagatgtatgtcccagctctcatatttggacagctcctaacttctagtaactatgatgatgatgaaaagaaagtgacaggtggtcgaaatggctatggagccaaattgtgtaacatattcagtaccaaatttactgtggaaacagccagtagagaatacaagaaaatgttcaaacagacatggatggataatatgggaagagctggtgagatggaactcaagcccttcaatggagaagattatacatgtatcacctttcagcctgatttgtctaagtttaaaatgcaaagcctggacaaagatattgttgcactaatggtcagaagagcatatgatattgctggatccaccaaagatgtcaaagtctttcttaatggaaataaactgccagtaaaaggatttcgtagttatgtggacatgtatttgaaggacaagttggatgaaactggtaactccttgaaagtaatacatgaacaagtaaaccacaggtgggaagtgtgtttaactatgagtgaaaaaggctttcagcaaattagctttgtcaacagcattgctacatccaagggtggcagacatgttgattatgtagctgatcagattgtgactaaacttgttgatgttgtgaagaagaagaacaagggtggtgttgcagtaaaagcacatcaggtgaaaaatcacatgtggatttttgtaaatgccttaattgaaaacccaacctttgactctcagacaaaagaaaacatgactttacaacccaagagctttggatcaacatgccaattgagtgaaaaatttatcaaagctgccattggctgtggtattgtagaaagcatactaaactgggtgaagtttaaggcccaagtccagttaaacaagaagtgttcagctgtaaaacataatagaatcaagggaattcccaaactcgatgatgccaatgatgcagggggccgaaactccactgagtgtacgcttatcctgactgagggagattcagccaaaactttggctgtttcaggccttggtgtggttgggagagacaaatatggggttttccctcttagaggaaaaatactcaatgttcgagaagcttctcataagcagatcatggaaaatgctgagattaacaatatcatcaagattgtgggtcttcagtacaagaaaaactatgaagatgaagattcattgaagacgcttcgttatgggaagataatgattatgacagatcaggaccaagatggttcccacatcaaaggcttgctgattaattttatccatcacaactggccctctcttctgcgacatcgttttctggaggaatttatcactcccattgtaaaggtatctaaaaacaagcaagaaatggcattttacagccttcctgaatttgaagagtggaagagttctactccaaatcataaaaaatggaaagtcaaatattacaaaggtttgggcaccagcacatcaaaggaagctaaagaatactttgcagatatgaaaagacatcgtatccagttcaaatattctggtcctgaagatgatgctgctatcagcctggcctttagcaaaaaacagatagatgatcgaaaggaatggttaactaatttcatggaggatagaagacaacgaaagttacttgggcttcctgaggattacttgtatggacaaactaccacatatctgacatataatgacttcatcaacaaggaacttatcttgttctcaaattctgataacgagagatctatcccttctatggtggatggtttgaaaccaggtcagagaaaggttttgtttacttgcttcaaacggaatgacaagcgagaagtaaaggttgcccaattagctggatcagtggctgaaatgtcttcttatcatcatggtgagatgtcactaatgatgaccattatcaatttggctcagaattttgtgggtagcaataatctaaacctcttgcagcccattggtcagtttggtaccaggctacatggtggcaaggattctgctagtccacgatacatctttacaatgctcagctctttggctcgattgttatttccaccaaaagatgatcacacgttgaagtttttatatgatgacaaccagcgtgttgagcctgaatggtacattcctattattcccatggtgctgataaatggtgctgaaggaatcggtactgggtggtcctgcaaaatccccaactttgatgtgcgtgaaattgtaaataacatcaggcgtttgatggatggagaagaacctttgccaatgcttccaagttacaagaacttcaagggtactattgaagaactggctccaaatcaatatgtgattagtggtgaagtagctattcttaattctacaaccattgaaatctcagagcttcccgtcagaacatggacccagacatacaaagaacaagttctagaacccatgttgaatggcaccgagaagacacctcctctcataacagactatagggaataccatacagataccactgtgaaatttgttgtgaagatgactgaagaaaaactggcagaggcagagagagttggactacacaaagtcttcaaactccaaactagtctcacatgcaactctatggtgctttttgaccacgtaggctgtttaaagaaatatgacacggtgttggatattctaagagacttttttgaactcagacttaaatattatggattaagaaaagaatggctcctaggaatgcttggtgctgaatctgctaaactgaataatcaggctcgctttatcttagagaaaatagatggcaaaataatcattgaaaataagcctaagaaagaattaattaaagttctgattcagaggggatatgattcggatcctgtgaaggcctggaaagaagcccagcaaaaggttccagatgaagaagaaaatgaagagagtgacaacgaaaaggaaactgaaaagagtgactccgtaacagattctggaccaaccttcaactatcttcttgatatgcccctttggtatttaaccaaggaaaagaaagatgaactctgcaggctaagaaatgaaaaagaacaagagctggacacattaaaaagaaagagtccatcagatttgtggaaagaagacttggctacatttattgaagaattggaggctgttgaagccaaggaaaaacaagatgaacaagtcggacttcctgggaaaggggggaaggccaaggggaaaaaaacacaaatggctgaagttttgccttctccgcgtggtcaaagagtcattccacgaataaccatagaaatgaaagcagaggcagaaaagaaaaataaaaagaaaattaagaatgaaaatactgaaggaagccctcaagaagatggtgtggaactagaaggcctaaaacaaagattagaaaagaaacagaaaagagaaccaggtacaaagacaaagaaacaaactacattggcatttaagccaatcaaaaaaggaaagaagagaaatccctggcctgattcagaatcagataggagcagtgacgaaagtaattttgatgtccctccacgagaaacagagccacggagagcagcaacaaaaacaaaattcacaatggatttggattcagatgaagatttctcagattttgatgaaaaaactgatgatgaagattttgtcccatcagatgctagtccacctaagaccaaaacttccccaaaacttagtaacaaagaactgaaaccacagaaaagtgtcgtgtcagaccttgaagctgatgatgttaagggcagtgtaccactgtcttcaagccctcctgctacacatttcccagatgaaactgaaattacaaacccagttcctaaaaagaatgtgacagtgaagaagacagcagcaaaaagtcagtcttccacctccactaccggtgccaaaaaaagggctgccccaaaaggaactaaaagggatccagctttgaattctggtgtctctcaaaagcctgatcctgccaaaaccaagaatcgccgcaaaaggaagccatccacttctgatgattctgactctaattttgagaaaattgtttcgaaagcagtcacaagcaagaaatccaagggggagagtgatgacttccatatggactttgactcagctgtggctcctcgggcaaaatctgtacgggcaaagaaacctataaagtacctggaagagtcagatgaagatgatctgttttaaaatgtgaggcgattattttaagtaattatcttaccaagcccaagactggttttaaagttacctgaagctcttaacttcctcccctctgaatttagtttggggaaggtgtttttagtacaagacatcaaagtgaagtaaagcccaagtgttctttagcttt

SEQ ID NO: 994 - DNA, 1977 bp, Homo sapiens
cactccagtgtggcatcatgtggcagctgctcctcccaactgctctgctacttctagtttcagctggcatgcggactgaagatctcccaaaggctgtggtgttcctggagcctcaatggtacagggtgctcgagaaggacagtgtgactctgaagtgccagggagcctactcccctgaggacaattccacacagtggtttcacaatgagaacctcatctcaagccaggcctcgagctacttcattgacgctgccacagtcgacgacagtggagagtacaggtgccagacaaacctctccaccctcagtgacccggtgcagctagaagtccatgtcggctggctgttgctccaggcccctcggtgggtgttcaaggaggaagaccctattcacctgaggtgtcacagctggaagaacactgctctgcataaggtcacatatttacagaatggcaaagacaggaagtattttcatcataattctgacttccacattccaaaagccacactcaaagatagcggctcctacttctgcagggggcttgttgggagtaaaaatgtgtcttcagagactgtgaacatcaccatcactcaaggtttggcagtgtcaaccatctcatcattctctccacctgggtaccaagtctctttctgcttggtgatggtactcctttttgcagtggacacaggactatatttctctgtgaagacaaacatttgaagctcaacaagagactggaaggaccataaacttaaatggagaaaggaccctcaagacaaatgacccccatcccatgggagtaataagagcagtggcagcagcatctctgaacatttctctggatttgcaaccccatcatcctcaggcctctctacaagcagcaggaaacatagaactcagagccagatcctttatccaactctcgatttttccttggtctccagtggaagggaaaagcccatgatcttcaagcagggaagccccagtgagtagctgcattcctagaaattgaagtttcagagctacacaaacactttttctgtcccaaccattccctcacagtaaaacaacaatacaggctagggatggtaatcctttaaacatacaaaaattgctcgtattataaattacccagtttagaggggaaaaaagaaaataattattcctaaacaaatggataagtagaattaatgattgaggcaggaccctacagagtgtgggaactgctggggatctagagaattcagtgggaccaatgaaagcatggctgagaaatagcagggtagtccaggatagtctaagggaggtgttcccatctgagcccagagataagggtgtcttcctagaacattagccgtagtggaattaacaggaaatcatgagggtgacgtagaattgagtcttccaggggactctatcagaactggaccatttccaagtatataacgatgagccctctaatgctaggagtagcaaatggtcctaggaaggggactgaggattggggtgggggtggggtggaaaagaaagtacagaacaaaccctgtgtcactgtcccaagttaagctaagtgaacagaactatctcagcatcagaatgagaatgagaaagcctgagaagaaagaaccaaccacaagcacacaggaaggaaagcgcaggaggtgaaaatgctttcttggccagggtagtaagaattagaggttaatgcagggactgtaaaaccaccttttctgcttcaatgtctagttcctgtatagctttgttcattgcatttattaaacaaatgttgtataaccaatactaaatgtactactgagcttcactgagttacgctgtgaaactttcaaatccttcttcagtcagttccaatgaggtggggatggagaagacaattgttgcttatgaaaaaaagctttagctgtctcctgttttgtaagctttcagtgcaacatttcttggttccaataaagcattttac

SEQ ID NO: 995 - DNA, 2271 bp, Homo sapiens
tggccggaattccggggagggagaagcccctttggcctgccttacggaagcctgcgagggagggtggtgtccactgcccagttccgtgtcccgatgcccagcgccacgcagcgcaagagtcaggagaagccgcgggagatcatggacgcggcggaagattatgctaaagagagatatggaatatcttcaatgatacaatcacaagaaaaaccagatcgagttttggttcgggttagagacttgacaatacaaaaagctgatgaagttgtttgggtacgtgcaagagttcatacaagcagagctaaagggaaacagtgcttcttagtcctacgtcagcagcagtttaatgtccaggctcttgtggcggtgggagaccatgcaagcaagcagatggttaaatttgctgccaacatcaacaaagagagcattgtggatgtagaaggtgttgtgagaaaagtgaatcagaaaattggaagctgtacacagcaagacgttgagttacatgttcagaagatttatgtgatcagtttggctgaaccccgtctgcccctgcagctggatgatgctgttcggcctgagcaagaaggagaagaggaaggaagagctactgttaaccaggatacaagattagacaacagagtcattgatcttaggacatcaactagtcaggcagtcttccgtctccagtctggcatctgccatctcttccgagaaactttaattaacaaaggttttgtggaaatccaaactcctaaaattatttcagctgccagtgaaggaggagccaatgtttttactgtgtcatattttaaaaataatgcatacctggctcagtccccacagctatataagcaaatgtgcatttgtgctgattttgagaaggttttctctattggaccagtattcagagcggaagactctaatacccatagacatctaactgagtttgttggtttggacattgaaatggcttttaattaccattaccacgaagttatggaagaaattgctgacaccatggtacaaatattcaaaggacttcaagaaaggtttcagactgaaattcaaacagtgaataaacagttcccatgtgagccattcaaatttttggagccaactctaagactagaatattgtgaagcattggctatgcttagggaagctggagtcgaaatgggagatgaagacgatctgagcacaccaaatgaaaagctgttgggtcatttggtaaaggaaaagtatgatacagatttttatattcttgataaatatccattggctgtaagacctttctataccatgcctgacccaagaaatcccaaacagtccaagtcttacgatatgttcatgagaggagaagaaatattgtcaggagctcaaagaatacatgatcctcaactgctaacagagagagctttacatcatggaaatgatttggagaaaattaaggcttacattgattccttccgctttggagcccctcctcatgctggtggaggcattggattggaacgagttactatgctgtttctgggattgcataatgttcgtcagacctccatgttccctcgtgatcccaaacgactcactccttaaattcacactttgccacttaactccagtgtggatgacagagcgagaccctgcctcaaaaaaaaaaaaaaaaaaaaaaaaaaaaaaaaaaaaaaaaaaaaaaaaaaaaaaaaaaaaaagaaagccacacttattcttttcagtaacctgctagtgcacaggctgtactttaggtacttaaaatatgcactagaataaatttgcaaggccctaaaatatcactgttatttttggagtaattcagtataggttcgtttaaaagagatttttataacttcagacatgcatcagtaggaaataacttgagaaattcatatggttatgttacaaattcatattctgttactacagtaaacgttaagagttttaaacagttaagattgtacaatttttcttcttttctatattacaagggccccagtgttaatgtcttagattttcagtatttgaacttatttttttaaattctgtcattgagataagaataattcaggtagcatctgaaattttaatgaatgtataattggcatatcatggaaaattaaccagaaagtatcagttcttaaaagttatgcctagaaattatgtaaagctaaactactggttagaaagtattcagtgtaatattgtattaatttgttaaattctaaacttgaatttcaataaaattttaaagct

SEQ ID NO: 996 - DNA, 3311 bp, Homo sapiens
ggatccttccaccttgcctaccaaagtggggatgaaagtttgtctggggcattgcagttttagacaggaagaccagggaaggcctcactgagaaggtgacatttgagccaagacttaaaaaggtacgaaagtgagccatgtggaagtcttggggggaggagtgaactaggcagaggcacagctgggcaaagggcctgaggtgtgaccatgcctatggatttgaggaacttcaaagaggctgtgtgctgcaggagagtgaagggcagggagtggcaggaaatgaaggcagacaggtagcagtggggaggacgcaggggtccagctcatgtaggtcttgattggacacagtgagtttcagatgacagcctcctgtctcatggggtagccccaaagccacaggagtctggtgatttccctcttccccaccagacatctatgccatcggggtgggcaagctggatgtggactggagagaactgaatgagctagggtccaagaaggatggtgagaggcatgccttcattctgcaggacacaaaggctctgcaccaggtctttgaacatatgctgggtgagtgagctttgccctccttggtgtggggaggatggtgaggagcccgccaaaggcccgttttgggaacctggacacagtgcccctcacttgcctccttccccatctgatcctcacacccacagatgtctccaagctcacagacaccatctgcggggtggggaacatgtcagcaaacgcctctgaccaggagaggacaccctggcatgtcactattaaggtaccaggaaggaggggcagggcttggattccagaggtaaaagcggccatgggccagacatactgcaatctctgaaaatcacctgttcccctgcagcccaagagccaagagacctgccggggggccctcatctccgaccaatgggtcctgacagcagctcattgcttccgcgatggcaacgaccactccctgtggagggtcaatgtgggtaaggcaggggatgcaccagcctcctgatccgtgaagccacagatcctaccacctcacccagcctctggcccctgcaggagccctggtctagcctaatctagtgtatcatttccaggagaccccaaatcccagtggggcaaagaattccttattgagaaggcggtgatctccccagggtttgatgtctttgccaaaaagaaccagggaatcctggagttctatggtgatgacatagctctgctgaagctggcccagaaagtaaagatgtccacccatgccaggtgcctggagtcttggatgggagggtgccctgcagggaagagtgctctggagatccctggaagagactactggggacaggctggtgtgacccttgctcttctccccaggcccatctgccttccctgcacgatggaggccaatctggctctgcggagacctcaaggcagcacctgtagggaccatggtgagtgctgggacttatggtgcttgagagctggggccggggtttgggggtgataacaaggactaggctgcagtccccaagccaggaacctggattctgggtaaaaggaccagcaccaacatccccttctcttgactatagagaatgaactgctgaacaaacagagtgttcctgctcattttgtcgccttgaatgggagcaaactgaacattaaccttaagatgggagtggaggtgagggtctcaggttggggatgctgggatccccctgtgacagctcccagaatgtctctcttccttctccaggtctggctgctttctctctctgacgcgggtcacccctcctcccaagcctcacaaacctgctaggtgtccctgggtctgcttattctttttttgttgttattgagatggagtcttgctctgtctcccaggctggagtgcagtggcacgacctcagctcactgcaacttctgcctcctgggttcaagcgattctcctacttcagcctcccgagtagctgagattacaggtgcccaccaccacaccagctaatttttgtatttttagtagagacgggacttcgccatgttggccaggatggtcttgaactcctgacctcaagtgatctgcctgcctcaacctcccaaagtgctgagattacaggcgtgagccactgcaccccacccgggtctgcttattctacccttctctctggttccacccctgctgcagtggacaagctgtgccgaggttgtctcccaagaaaaaaccatgttccccaacttgacagatgtcagggaggtggtgacagaccagttcctatgcagtgggacccaggaggatgagagtccctgcaagggtgagtccctcaccatgcctggattcccaaggggaaggccacctgtgtctctgtggccagcatgcatgccagaacaccagtccactgccctagatgacactgtctcctgtcaccctttgctggcaggagaatctgggggagcagttttccttgagcggagattcaggttttttcaggtgagaaggtagaagcttgcaggacccaggggttacaggatctcagccttgttggggggatgagggaggcctttgagggatctagggaggttggggcttacagttggggctgtggcagcctcccagccagttctctccttttctccaggtgggtctggtgagctggggtctttacaacccctgccttggctctgctgacaaaaactcccgcaaaagggcccctcgtagcaaggtcccgccgccacgagactttcacatcaatctcttccgcatgcagccctggctgaggcagcacctgggggatgtcctgaattttttacccctctagccatggccactgagccctctgctgccctgccagaatctgccgcccctccatcttctacctctgaatggccacccttagaccctgtgatccatcctctctcctagctgagtaaatccgggtctctaggatgccagaggcagcgcacacaagctgggaaatcctcagggctcctaccagcaggactgcctcgctgccccacctcccgctccttggcctgtccccagattccttccctggttgacttgactcatgcttgtttcactttcacatggaatttcccagttatgaaattaataaaaatcaatggtttccacatctctcagtgcctctatctggaggccaggtagggctggccttgggggagggggaggccagaatgactccaagagctacaggaaggcaggtcagagaccccactggacaaacagtggctggactctgcaccataacacacaatcaacaggggagtgagctggatcc

SEQ ID NO: 997 - DNA, 5784 bp, Homo sapiens
acggcatccagtacagaggggctggacttggacccctgcagcagccctgcacaggagaagcggcatataaagccgcgctgcccgggagccgctcggccacgtccaccggagcatcctgcactgcagggccggtctctcgctccagcagagcctgcgcctttctgactcggtccggaacactgaaaccagtcatcactgcatctttttggcaaaccaggagctcagctgcaggaggcaggatggtctggaggctggtcctgctggctctgtgggtgtggcccagcacgcaagctggtcaccaggacaaagacacgaccttcgaccttttcagtatcagcaacatcaaccgcaagaccattggcgccaagcagttccgcgggcccgaccccggcgtgccggcttaccgcttcgtgcgctttgactacatcccaccggtgaacgcagatgacctcagcaagatcaccaagatcatgcggcagaaggagggcttcttcctcacggcccagctcaagcaggacggcaagtccaggggcacgctgttggctctggagggccccggtctctcccagaggcagttcgagatcgtctccaacggccccgcggacacgctggatctcacctactggattgacggcacccggcatgtggtctccctggaggacgtcggcctggctgactcgcagtggaagaacgtcaccgtgcaggtggctggcgagacctacagcttgcacgtgggctgcgacctcataggaccagttgctctggacgagcccttctacgagcacctgcaggcggaaaagagccggatgtacgtggccaaaggctctgccagagagagtcacttcaggggtttgcttcagaacgtccacctagtgtttgaaaactctgtggaagatattctaagcaagaagggttgccagcaaggccagggagctgagatcaacgccatcagtgagaacacagagacgctgcgcctgggtccgcatgtcaccaccgagtacgtgggccccagctcggagaggaggcccgaggtgtgcgaacgctcgtgcgaggagctgggaaacatggtccaggagctctcggggctccacgtcctcgtgaaccagctcagcgagaacctcaagagagtgtcgaatgataaccagtttctctgggagctcattggtggccctcctaagacaaggaacatgtcagcttgctggcaggatggccggttctttgcggaaaatgaaacgtgggtggtggacagctgcaccacgtgtacctgcaagaaatttaaaaccatttgccaccaaatcacctgcccgcctgcaacctgcgccagtccatcctttgtggaaggcgaatgctgcccttcctgcctccactcggtggacggtgaggagggctggtctccgtgggcagagtggacccagtgctccgtgacgtgtggctctgggacccagcagagaggccggtcctgtgacgtcaccagcaacacctgcttggggccctcgatccagacacgggcttgcagtctgagcaagtgtgacacccgcatccggcaggacggcggctggagccactggtcaccttggtcttcatgctctgtgacctgtggagttggcaatatcacacgcatccgtctctgcaactccccagtgccccagatggggggcaagaattgcaaagggagtggccgggagaccaaagcctgccagggcgccccatgcccaatcgatggccgctggagcccctggtccccgtggtcggcctgcactgtcacctgtgccggtgggatccgggagcgcacccgggtctgcaacagccctgagcctcagtacggagggaaggcctgcgtgggggatgtgcaggagcgtcagatgtgcaacaagaggagctgccccgtggatggctgtttatccaacccctgcttcccgggagcccagtgcagcagcttccccgatgggtcctggtcatgcggcttctgccctgtgggcttcttgggcaatggcacccactgtgaggacctggacgagtgtgccctggtccccgacatctgcttctccaccagcaaggtgcctcgctgtgtcaacactcagcctggcttccactgcctgccctgcccgccccgatacagagggaaccagcccgtcggggtcggcctggaagcagccaagacggaaaagcaagtgtgtgagcccgaaaacccatgcaaggacaagacacacaactgccacaagcacgcggagtgcatctacctgggtcacttcagcgaccccatgtacaagtgcgagtgccagacaggctacgcgggcgacgggctcatctgcggggaggactcggacctggacggctggcccaacctcaatctggtctgcgccaccaacgccacctaccactgcatcaaggataactgcccccatctgccaaattctgggcaggaagactttgacaaggacgggattggcgatgcctgtgatgatgacgatgacaatgacggtgtgaccgatgagaaggacaactgccagctcctcttcaatccccgccaggctgactatgacaaggatgaggttggggaccgctgtgacaactgcccttacgtgcacaaccctgcccagatcgacacagacaacaatggagagggtgacgcctgctccgtggacattgatggggacgatgtcttcaatgaacgagacaattgtccctacgtctacaacactgaccagagggacacggatggtgacggtgtgggggatcactgtgacaactgccccctggtgcacaaccctgaccagaccgacgtggacaatgaccttgttggggaccagtgtgacaacaacgaggacatagatgacgacggccaccagaacaaccaggacaactgcccctacatctccaacgccaaccaggctgaccatgacagagacggccagggcgacgcctgtgaccctgatgatgacaacgatggcgtccccgatgacagggacaactgccggcttgtgttcaacccagaccaggaggacttggacggtgatggacggggtgatatttgtaaagatgattttgacaatgacaacatcccagatattgatgatgtgtgtcctgaaaacaatgccatcagtgagacagacttcaggaacttccagatggtccccttggatcccaaagggaccacccaaattgatcccaactgggtcattcgccatcaaggcaaggagctggttcagacagccaactcggaccccggcatcgctgtaggttttgacgagtttgggtctgtggacttcagtggcacattctacgtaaacactgaccgggacgacgactatgctggcttcgtctttggttaccagtcaagcagccgcttctatgtggtgatgtggaagcaggtgacgcagacctactgggaggaccagcccacgcgggcctatggctactccggcgtgtccctcaaggtggtgaactccaccacggggacgggcgagcacctgaggaacgcgctgtggcacacggggaacacgccggggcaggtgcgaaccttatggcacgaccccaggaacattggctggaaggactacacggcctataggtggcacctgactcacaggcccaagaccggctacatcagagtcttagtgcatgaaggaaaacaggtcatggcagactcaggacctatctatgaccaaacctacgctggcgggcggctgggtctatttgtcttctctcaagaaatggtctatttctcagacctcaagtacgaatgcagagatatttaaacaagatttgctgcatttccggcaatgccctgtgcatgccatggtccctagacacctcagttcattgtggtccttgcggcttctctctctagcagcacctcctgtcccttgaccttaactctgatggttcttcacctcctgccagcaaccccaaacccaagtgccttcagaggataaatatcaatggaactcagagatgaacatctaacccactagaggaaaccagtttggtgatatatgagactttatgtggagtgaaaattgggcatgccattacattgctttttcttgtttgtttaaaaagaatgacgtttacatataaaatgtaattacttattgtatttatgtgtatatggagttgaagggaatactgtgcataagccattatgataaattaagcatgaaaaatattgctgaactacttttggtgcttaaagttgtcactattcttgaattagagttgctctacaatgacacacaaatcccgctaaataaattataaacaagggtcaattcaaatttgaagtaatgttttagtaaggagagattagaagacaacaggcatagcaaatgacataagctaccgattaactaatcggaacatgtaaaacagttacaaaaataaacgaactctcctcttgtcctacaatgaaagccctcatgtgcagtagagatgcagtttcatcaaagaacaaacatccttgcaaatgggtgtgacgcggttccagatgtggatttggcaaaacctcatttaagtaaaaggttagcagagcaaagtgcggtgctttagctgctgcttgtgccgttgtggcgtcggggaggctcctgcctgagcttccttccccagctttgctgcctgagaggaaccagagcagacgcacaggccggaaaaggcgcatctaacgcgtatctaggctttggtaactgcggacaagttgcttttacctgatttgatgatacatttcattaaggttccagttataaatattttgttaatatttattaagtgactatagaatgcaactccatttaccagtaacttattttaaatatgcctagtaacacatatgtagtataatttctagaaacaaacatctaataagtatataatcctgtgaaaatatgaggcttgataatattaggttgtcacgatgaagcatgctagaagctgtaacagaatacatagagaataatgaggagtttatgatggaaccttaatatataatgttgccagcgattttagttcaatatttgttactgttatctatctgctgtatatggaattcttttaattcaaacgctgaaaacgaatcagcatttagtcttgccaggcacacccaataatcagtcatgtgtaatatgcacaagtttgtttttgtttttgttttttttgttggttggtttttttgctttaagttgcatgatctttctgcaggaaatagtcactcatcccactccacataaggggtttagtaagagaagtctgtctgtctgatgatggatagggggcaaatctttttcccctttctgttaatagtcatcacatttctatgccaaacaggaacgatccataactttagtcttaatgtacacattgcattttgataaaattaattttgttgtttcctttgaggttgatcgttgtgttgttttgctgcactttttacttttttgcgtgtggagctgtattcccgagacaacgaagcgttgggatacttcattaaatgtagcgactgtcaacagcgtgcaggttttctgtttctgtgttgtggggtcaaccgtacaatggtgtgggaatgacgatgatgtgaatatttagaatgtaccatattttttgtaaattatttatgtttttctaaacaaatttatcgtataggttgatgaaacgtcatgtgttttgccaaagactgtaaatatttatttatgtgttcacatggtcaaaatttcaccactgaaaccctgcacttagctagaacctcatttttaaagattaacaacaggaaataaattgtaaaaaaggttttct

SEQ ID NO: 998 - DNA, 2388 bp, Homo sapiens
tcctgccccaggcccagcttctctcctgccttccaacgccatggggagcaatctcagcccccaactctgcctgatgccctttatcttgggcctcttgtctggaggtgtgaccaccactccatggtctttggcccagccccagggatcctgctctctggagggggtagagatcaaaggcggctccttccgacttctccaagagggccaggcactggagtacgtgtgtccttctggcttctacccgtaccctgtgcagacacgtacctgcagatctacggggtcctggagcaccctgaagactcaagaccaaaagactgtcaggaaggcagagtgcagagcaatccactgtccaagaccacacgacttcgagaacggggaatactggccccggtctccctactacaatgtgagtgatgagatctctttccactgctatgacggttacactctccggggctctgccaatcgcacctgccaagtgaatggccggtggagtgggcagacagcgatctgtgacaacggagcggggtactgctccaacccgggcatccccattggcacaaggaaggtgggcagccagtaccgccttgaagacagcgtcacctaccactgcagccgggggcttaccctgcgtggctcccagcggcgaacgtgtcaggaaggtggctcttggagcgggacggagccttcctgccaagactccttcatgtacgacacccctcaagaggtggccgaagctttcctgtcttccctgacagagaccatagaaggagtcgatgctgaggatgggcacggcccaggggaacaacagaagcggaagatcgtcctggacccttcaggctccatgaacatctacctggtgctagatggatcagacagcattggggccagcaacttcacaggagccaaaaagtgtctagtcaacttaattgagaaggtggcaagttatggtgtgaagccaagatatggtctagtgacatatgccacataccccaaaatttgggtcaaagtgtctgaagcagacagcagtaatgcagactgggtcacgaagcagctcaatgaaatcaattatgaagaccacaagttgaagtcagggactaacaccaagaaggccctccaggcagtgtacagcatgatgagctggccagatgacgtccctcctgaaggctggaaccgcacccgccatgtcatcatcctcatgactgatggattgcacaacatgggcggggacccaattactgtcattgatgagatccgggacttgctatacattggcaaggatcgcaaaaacccaagggaggattatctggatgtctatgtgtttggggtcgggcctttggtgaaccaagtgaacatcaatgctttggcttccaagaaagacaatgagcaacatgtgttcaaagtcaaggatatggaaaacctggaagatgttttctaccaaatgatcgatgaaagccagtctctgagtctctgtggcatggtttgggaacacaggaagggtaccgattaccacaagcaaccatggcaggccaagatctcagtcattcgcccttcaaagggacacgagagctgtatgggggctgtggtgtctgagtactttgtgctgacagcagcacattgtttcactgtggatgacaaggaacactcaatcaaggtcagcgtaggaggggagaagcgggacctggagatagaagtagtcctatttcaccccaactacaacattaatgggaaaaaagaagcaggaattcctgaattttatgactatgacgttgccctgatcaagctcaagaataagctgaaatatggccagactatcaggcccatttgtctcccctgcaccgagggaacaactcgagctttgaggcttcctccaactaccacttgccagcaacaaaaggaagagctgctccctgcacaggatatcaaagctctgtttgtgtctgaggaggagaaaaagctgactcggaaggaggtctacatcaagaatggggataagaaaggcagctgtgagagagatgctcaatatgccccaggctatgacaaagtcaaggacatctcagaggtggtcacccctcggttcctttgtactggaggagtgagtccctatgctgaccccaatacttgcagaggtgattctggcggccccttgatagttcacaagagaagtcgtttcattcaagttggtgtaatcagctggggagtagtggatgtctgcaaaaaccagaagcggcaaaagcaggtacctgctcacgcccgagactttcacatcaacctctttcaagtgctgccctggctgaaggagaaactccaagatgaggatttgggttttctataaggggtttcctgctggacaggggcgtgggattgaattaaaacagctgcgacaac

SEQ ID NO: 999 - DNA, 2167 bp, Homo sapiens; identical to SEQ ID NO: 437

SEQ ID NO: 1000 - DNA, 492 bp, Homo sapiens
tggtatagctcatgagtctcacacccaggtgaattccctagtgctataggatttgattcatttatggtctcccattatttatactgtatttgtttttcattgattttattctttgcagtcggatacttctggagactatgaaatcacactcttaaaaatctgtggtggagatgactgaaccaagaagataatctccaaaggtccacgatgggcttttccaacagctccaccttacttcttctcatactatttaagagaacaagcaaatataaacagcaacttgtgttcctaacaggaattttcattgttctataacaacaacaacaaaagcgattattattttagagcatctcatttataatgtagcagctcataaatgaaattgaaaatggtattaaagatctgcaactactatccaacttatatttctgctttcaaagttaagaatctttatagttctactccattaaatataaagcaagataataaaac

SEQ ID NO: 1001 - DNA, 1778 bp, Homo sapiens; identical to SEQ ID NO: 439

SEQ ID NO: 1002 - DNA, 2519 bp, Homo sapiens
agtcccgcccctgcgtgcggcgcttctcccaggccccaccttccatccagtgccctggaccctcggctgggtagcgccaccagagcgaccaaacgtcccgcgccttccaggccgcactccagagccaaaagagctccatggcggcggcggccaagcccaacaacctttccctggtggtgcacggaccgggggacttgcgcctggagaactatcctatccctgaaccaggcccaaatgaggtcttgctgaggatgcattctgttggaatctgtggctcagatgtccactactgggagtatggtcgaattgggaattttattgtgaaaaagcccatggtgctgggacatgaagcttcgggaacagtcgaaaaagtgggatcatcggtaaagcacctaaaaccaggtgatcgtgttgccatcgagcctggtgctccccgagaaaatgatgaattctgcaagatgggccgatacaatctgtcaccttccatcttcttctgtgccacgccccccgatgacgggaacctctgccggttctataagcacaatgcagccttttgttacaagcttcctgacaatgtcacctttgaggaaggcgccctgatcgagccactttctgtggggatccatgcctgcaggagaggcggagttaccctgggacacaaggtccttgtgtgtggagctgggccaatcgggatggtcactttgctcgtggccaaagcaatgggagcagctcaagtagtggtgactgatctgtctgctacccgattgtccaaagccaaggagattggggctgatttagtcctccagatctccaaggagagccctcaggaaatcgccaggaaagtagaaggtctgctggggtgcaagccggaagtcaccatcgagtgcacgggggcagaggcctccatccaggcgggcatctacgccactcgctctggtgggaccctcgtgcttgtggggctgggctctgagatgaccaccgtacccctactgcatgcagccatccgggaggtggatatcaagggcgtgtttcgatactgcaacacgtggccagtggcgatttcgatgcttgcgtccaagtctgtgaatgtaaaacccctcgtcacccataggtttcctctggagaaagctctggaggcctttgaaacatttaaaaagggattggggttgaaaatcatgctcaagtgtgaccccagtgaccagaatccctgatgttaatgggctctgctcatccccacagtctcgggatctcagggcacaatggctggacaggggtgggctctgatgcagaactttctcttttgaatgttaagaataactaatacaattcattgtgaacagaagtccttaagcagaggaattggtgtgccttaaagatacaatctgggatagtttgggggaacttgtagccagaatgccctgttcatgctgagcaaagttcagcaagtagagcagagtttggcaggcaggtgccaggaactccccttcttcctggagtgccttcattgaggaaggaaatctggcccttgggtttcctggttccactgctactgacccagaggggaatgagggctgagttatgaaaagataacttcatgaagacttaactggcccagaagctgattttcatgaaaatctgccactcagggtctgggatgaaggcttgtcagcacttccagtttagaacgcaatgtttctagagacatattggctgtttgttttgatgataaaaggagaataagaaaaggcatcactttcctggatccaggataatttttaaaccaatcaaatgaaaaaaacaaacaaacaaaaaaggaaatgtcatgtgaggttaaaccagtttgcattcccctaatgtggaaaaagtaagaggactactcagcactgtttgaagattgcctcttctacagcttctgagaattgtgttatttcacttgccaagtgaaggaccccctccccaacatgccccagcccacccctaagcatggtcccttgtcaccaggcaaccaggaaactgctacttgtggacctcaccagagaccaggagggtttggttagctcacaggacttcccccaccccagaagattagcatcccatactagactcatactcaactcaactaggctcatactcaattgatggttattagacaattccatttctttctggttattataaacagaaaatctttcctcttctcattaccagtaaaggctcttggtatctttctgttggaatgatttctatgaacttgtcttattttaatggtgggttttttttctggtaagatttagacctaaatcgcatcatgccaacttgtgactttgagactattcatcaagaatgaggatatagtagccatgacatagcttgagctatagcctttaattccttactttggctatgggtggagggtgagtttgaagaggttctgattttcttgtaacctgggaaagccatgaccttgtgcccgattctttcagattgctttgggtaataaatattggtggtggtatctg

SEQ ID NO: 1003 - DNA, 3590 bp, Homo sapiens
cgcggacccggccggcccaggcccgcgcccgccgcggccctgagaggccccggcaggtcccggcccggcggcggcagccatggccggggggccgggcccgggggagcccgcagcccccggcgcccagcacttcttgtacgaggtgccgccctgggtcatgtgccgcttctacaaagtgatggacgccctggagcccgccgactggtgccagttcgccgccctgatcgtgcgcgaccagaccgagctgcggctgtgcgagcgctccgggcagcgcacggccagcgtcctgtggccctggatcaaccgcaacgcccgtgtggccgacctcgtgcacatcctcacgcacctgcagctgctccgtgcgcgggacatcatcacagcctggcaccctcccgccccgcttccgtccccaggcaccactgccccgaggcccagcagcatccctgcacccgccgaggccgaggcctggagcccccggaagttgccatcctcagcctccaccttcctctccccagcttttccaggctcccagacccattcagggcctgagctcggcctggttccaagccctgcttccctgtggcctccaccgccatctccagccccttcttctaccaagccaggcccagagagctcagtgtccctcctgcagggagcccgcccctctccgttttgctggcccctctgtgagatttcccggggcacccacaacttctcggaggagctcaagatcggggagggtggctttgggtgcgtgtaccgggcggtgatgaggaacacggtgtatgctgtgaagaggctgaaggagaacgctgacctggagtggactgcagtgaagcagagcttcctgaccgaggtggagcagctgtccaggtttcgtcacccaaacattgtggactttgctggctactgtgctcagaacggcttctactgcctggtgtacggcttcctgcccaacggctccctggaggaccgtctccactgccagacccaggcctgcccacctctctcctggcctcagcgactggacatccttctgggtacagcccgggcaattcagtttctacatcaggacagccccagcctcatccatggagacatcaagagttccaacgtccttctggatgagaggctgacacccaagctgggagactttggcctggcccggttcagccgctttgccgggtccagccccagccagagcagcatggtggcccggacacagacagtgcggggcaccctggcctacctgcccgaggagtacatcaagacgggaaggctggctgtggacacggacaccttcagctttggggtggtagtgctagagaccttggctggtcagagggctgtgaagacgcacggtgccaggaccaagtatctgaaagacctggtggaagaggaggctgaggaggctggagtggctttgagaagcacccagagcacactgcaagcaggtctggctgcagatgcctgggctgctcccatcgccatgcagatctacaagaagcacctggaccccaggcccgggccctgcccacctgagctgggcctgggcctgggccagctggcctgctgctgcctgcaccgccgggccaaaaggaggcctcctatgacccaggtgtacgagaggctagagaagctgcaggcagtggtggcgggggtgcccgggcatttggaggccgccagctgcatccccccttccccgcaggagaactcctacgtgtccagcactggcagagcccacagtggggctgctccatggcagcccctggcagcgccatcaggagccagtgcccaggcagcagagcagctgcagagaggccccaaccagcccgtggagagtgacgagagcctaggcggcctctctgctgccctgcgctcctggcacttgactccaagctgccctctggacccagcacccctcagggaggccggctgtcctcagggggacacggcaggagaatcgagctgggggagtggcccaggatcccggcccacagccgtggaaggactggcccttggcagctctgcatcatcgtcgtcagagccaccgcagattatcatcaaccctgcccgacagaagatggtccagaagctggccctgtacgaggatggggccctggacagcctgcagctgctgtcgtccagctccctcccaggcttgggcctggaacaggacaggcaggggcccgaagaaagtgatgaatttcagagctgatgtgttcacctgggcagatcccccaaatccggaagtcaaagttctcatggtcagaagttctcatggtgcacgagtcctcagcactctgccggcagtgggggtgggggcccatgcccgcgggggagagaaggaggtggccctgctgttctaggctctgtgggcataggcaggcagagtggaaccctgcctccatgccagcatctgggggcaaggaaggctggcatcatccagtgaggaggctggcgcatgttgggaggctgctggctgcacagacccgtgaggggaggagaggggctgctgtgcaggggtgtggagtagggagctggctcccctgagagccatgcagggcgtctgcagcccaggcctctggcagcagctctttgcccatctctttggacagtggccaccctgcacaatggggccgacgaggcctagggccctcctacctgcttacaatttggaaaagtgtggccgggtgcggtggctcacgcctgtaatcccagcactttgggaggccaaggcaggaggatcgctggagcccagtaggtcaagaccagccagggcaacatgatgagaccctgtctctgccaaaaaattttttaaactattagcctggcgtggtagcgcacgcctgtggtcccagctgctggggaggctgaagtaggaggatcatttatgcttgggaggtcgaggctgcagtgagtcatgattgtatgactgcactccagcctgggtgacagagcaagaccctgtttcaaaaagaaaaaccctgggaaaagtgaagtatggctgtaagtctcatggttcagtcctagcaagaagcgagaattctgagatcctccagaaagtcgagcagcacccacctccaacctcgggccagtgtcttcaggctttactggggacctgcgagctggcctaatgtggtggcctgcaagccaggccatccctgggcgccacagacgagctccgagccaggtcaggcttcggaggccacaagctcagcctcaggcccaggcactgattgtggcagaggggccactacccaaggtctagctaggcccaagacctagttacccagacagtgagaagcccctggaaggcagaaaagttgggagcatggcagacagggaagggaaacattttcagggaaaagacatgtatcacatgtcttcagaagcaagtcaggtttcatgtaaccgagtgtcctcttgcgtgtccaaaagtagcccagggctgtagcacaggcttcacagtgattttgtgttcagccgtgagtcacactacatgcccccgtgaagctgggcattggtgacgtccaggttgtccttgagtaataaaaacgtatgttccctaaaaaaaaaaaaaggaattc

SEQ ID NO: 1004 - DNA, 2826 bp, Homo sapiens
ccggttaggggccgccatcccctcagagcgtcgggatatcgggtggcggctcgggacggaggacgcgctagtgttcttctgtgtggcagttcagaatgatggatcaagctagatcagcattctctaacttgtttggtggagaaccattgtcatatacccggttcagcctggctcggcaagtagatggcgataacagtcatgtggagatgaaacttgctgtagatgaagaagaaaatgctgacaataacacaaaggccaatgtcacaaaaccaaaaaggtgtagtggaagtatctgctatgggactattgctgtgatcgtctttttcttgattggatttatgattggctacttgggctattgtaaaggggtagaaccaaaaactgagtgtgagagactggcaggaaccgagtctccagtgagggaggagccaggagaggacttccctgcagcacgtcgcttatattgggatgacctgaagagaaagttgtcggagaaactggacagcacagacttcaccagcaccatcaagctgctgaatgaaaattcatatgtccctcgtgaggctggatctcaaaaagatgaaaatcttgcgttgtatgttgaaaatcaatttcgtgaatttaaactcagcaaagtctggcgtgatcaacattttgttaagattcaggtcaaagacagcgctcaaaactcggtgatcatagttgataagaacggtagacttgtttacctggtggagaatcctgggggttatgtggcgtatagtaaggctgcaacagttactggtaaactggtccatgctaattttggtactaaaaaagattttgaggatttatacactcctgtgaatggatctatagtgattgtcagagcagggaaaatcacgtttgcagaaaaggttgcaaatgctgaaagcttaaatgcaattggtgtgttgatatacatggaccagactaaatttcccattgttaacgcagaactttcattctttggacatgctcatctggggacaggtgacccttacacacctggattcccttccttcaatcacactcagtttccaccatctcggtcatcaggattgcctaatatacctgtccagacaatctccagagctgctgcagaaaagctgtttgggaatatggaaggagactgtccctctgactggaaaacagactctacatgtaggatggtaacctcagaaagcaagaatgtgaagctcactgtgagcaatgtgctgaaagagataaaaattcttaacatctttggagttattaaaggctttgtagaaccagatcactatgttgtagttggggcccagagagatgcatggggccctggagctgcaaaatccggtgtaggcacagctctcctattgaaacttgcccagatgttctcagatatggtcttaaaagatgggtttcagcccagcagaagcattatctttgccagttggagtgctggagactttggatcggttggtgccactgaatggctagagggatacctttcgtccctgcatttaaaggctttcacttatattaatctggataaagcggttcttggtaccagcaacttcaaggtttctgccagcccactgttgtatacgcttattgagaaaacaatgcaaaatgtgaagcatccggttactgggcaatttctatatcaggacagcaactgggccagcaaagttgagaaactcactttagacaatgctgctttccctttccttgcatattctggaatcccagcagtttctttctgtttttgcgaggacacagattatccttatttgggtaccaccatggacacctataaggaactgattgagaggattcctgagttgaacaaagtggcacgagcagctgcagaggtcgctggtcagttcgtgattaaactaacccatgatgttgaattgaacctggactatgagaggtacaacagccaactgctttcatttgtgagggatctgaaccaatacagagcagacataaaggaaatgggcctgagtttacagtggctgtattctgctcgtggagacttcttccgtgctacttccagactaacaacagatttcgggaatgctgagaaaacagacagatttgtcatgaagaaactcaatgatcgtgtcatgagagtggagtatcacttcctctctccctacgtatctccaaaagagtctcctttccgacatgtcttctggggctccggctctcacacgctgccagctttactggagaacttgaaactgcgtaaacaaaataacggtgcttttaatgaaacgctgttcagaaaccagttggctctagctacttggactattcagggagctgcaaatgccctctctggtgacgtttgggacattgacaatgagttttaaatgtgatacccatagcttccatgagaacagcagggtagtctggtttctagacttgtgctgatcgtgctaaattttcagtaggcctacaaaacctgatgttaaaattccatcccatcatcttggtactactagatgtctttaggcagcagcttttaatacagggtagataacctgtacttcaagttaaagtgaataaccacttaaaaaatgtccatgatggaatattcccctatctctagaattttaagtgctttgtaatgggaactgcctctttcctgttgttgttaatgaaaatgtcagaaaccagttatgtgaatgatctctctgaatcctaagggctggtctctgctgaaggttgtaagtggtcgcttactttgagtgatcctccaacttcatttgatgctaaataggagataccaggttgaaagaccttctccaaatgagatct

SEQ ID NO: 1005 - DNA, 2826 bp, Homo sapiens; identical to SEQ ID NO: 1004

SEQ ID NO: 1006 - DNA, 2826 bp, Homo sapiens; identical to SEQ ID NO: 1004

SEQ ID NO: 1007 - DNA, 1317 bp, Homo sapiens
acagctgctcttggggatatcatggggcactatgatgaaagcatgccagatccacttcctgagtttactgaagatcaggcggctcctgatgacaaaaacaaaacggacccaggggttcatgctaccctgaagtcactcagtagtcagattgaaaccatgcgcagccccgatggctcgaaaaagcacccagcccgcacgtgtgatgacctaaagctttgccattccgcaaagcagagtggtgaatactggattgatcctaaccaaggatctgttgaagatgccatcaaagtttactgcaacatggaaacaggagaaacatgtatttcagcaaacccatccagtgtaccacgtaaaacctggtgggccagtaaatctcctgacaataaacctgtttggtatggtcttgatatgaacagagggtctcagttcgcttatggagaccaccaatcacctaatacagccattactcagatgacttttttgcgccttttatcaaaagaagcctcccagaacatcacttacatctgtaaaaacagtgtaggatacatggacgatcaagctaagaacctcaaaacagctgtggttctcaaaggggcaaatgacttagatatcaaagcagagggaaatattagatcccggtatatcgttcttcaagacacttgctctaagcggaatggaaatgtgggcaagactgtctttgaatatagaacacagaatgtggcacgcttgcccatcatagatcttgctcctgtggatgttggcggcacagaccaggaattcggcgttgaaattgggccagtttgttttgtgtaaagtaagccaagacacatcgacaatgagcaccaccatcaatgaccaccgccattcacaagaactttgactgtttgaagttgatcctgagactcttgaagtaatggctgatcctgcatcagcattgtatatatggtcttaagtgcctggcctccttatccttcagaatatttattttacttacaatcctcaagttttaattgattttaaatatttttcaatacaacagtttaggtttaagatgaccaatgacaatgaccacctttgcagaaagtaaactgattgaataaataaatctccgttttcttcaatttatttcagtgtaatgaaaaagttgcttagtatttatgaggaaattcttcttcctggcaggtagcttaaagagtggggtatacagagccacaacacatgtttattttacaaaagctgcagttgaaaaatagaaattagtgcccttttgtgacctctcattccaagattgtcaattaaaaatgagtttaaaatgtt

SEQ ID NO: 1008 - DNA, 1452 bp, Homo sapiens
ttggtttctgctgggtgtaggtccttggctggtcgggctccggtgttctgcttctccccgctgagctgctgcctggtgaagaggaagccatggcgctccgagtcaccaggaactcgaaaattaatgctgaaaataaggcgaagatcaacatggcaggcgcaaagcgcgttcctacggcccctgctgcaacctccaagcccggactgaggccaagaacagctcttggggacattggtaacaaagtcagtgaacaactgcaggccaaaatgcctatgaagaaggaagcaaaaccttcagctactggaaaagtcattgataaaaaactaccaaaacctcttgaaaaggtacctatgctggtgccagtgccagtgtctgagccagtgccagagccagaacctgagccagaacctgagcctgttaaagaagaaaaactttcgcctgagcctattttggttgatactgcctctccaagcccaatggaaacatctggatgtgcccctgcagaagaagacctgtgtcaggctttctctgatgtaattcttgcagtaaatgatgtggatgcagaagatggagctgatccaaacctttgtagtgaatatgtgaaagatatttatgcttatctgagacaacttgaggaagagcaagcagtcagaccaaaatacctactgggtcgggaagtcactggaaacatgagagccatcctaattgactggctagtacaggttcaaatgaaattcaggttgttgcaggagaccatgtacatgactgtctccattattgatcggttcatgcagaataattgtgtgcccaagaagatgctgcagctggttggtgtcactgccatgtttattgcaagcaaatatgaagaaatgtaccctccagaaattggtgactttgcttttgtgactgacaacacttatactaagcaccaaatcagacagatggaaatgaagattctaagagctttaaactttggtctgggtcggcctctacctttgcacttccttcggagagcatctaagattggagaggttgatgtcgagcaacatactttggccaaatacctgatggaactaactatgttggactatgacatggtgcactttcctccttctcaaattgcagcaggagctttttgcttagcactgaaaattctggataatggtgaatggacaccaactctacaacattacctgtcatatactgaagaatctcttcttccagttatgcagcacctggctaagaatgtagtcatggtaaatcaaggacttacaaagcacatgactgtcaagaacaagtatgccacatcgaagcatgctaagatcagcactctaccacagctgaattctgcactagttcaagatttagccaaggctgtggcaaaggtgtaacttgtaaacttgagttggagtactatactttacaaactaaaattggcacatgtgcatctgt

SEQ ID NO: 1009 - DNA, 2691 bp, Homo sapiens
gcttgcccgtcggtcgctagctcgctcggtgcgcgtcgtcccgctccatggcgctcttcgtgcggctgctggctctcgccctggctctggccctgggccccgccgcgaccctggcgggtcccgccaagtcgccctaccagctggtgctgcagcacagcaggctccggggccgccagcacggccccaacgtgtgtgctgtgcagaaggttattggcactaataggaagtacttcaccaactgcaagcagtggtaccaaaggaaaatctgtggcaaatcaacagtcatcagctacgagtgctgtcctggatatgaaaaggtccctggggagaagggctgtccagcagccctaccactctcaaacctttacgagaccctgggagtcgttggatccaccaccactcagctgtacacggaccgcacggagaagctgaggcctgagatggaggggcccggcagcttcaccatcttcgcccctagcaacgaggcctgggcctccttgccagctgaagtgctggactccctggtcagcaatgtcaacattgagctgctcaatgccctccgctaccatatggtgggcaggcgagtcctgactgatgagctgaaacacggcatgaccctcacctctatgtaccagaattccaacatccagatccaccactatcctaatgggattgtaactgtgaactgtgcccggctcctgaaagccgaccaccatgcaaccaacggggtggtgcacctcatcgataaggtcatctccaccatcaccaacaacatccagcagatcattgagatcgaggacacctttgagacccttcgggctgctgtggctgcatcagggctcaacacgatgcttgaaggtaacggccagtacacgcttttggccccgaccaatgaggccttcgagaagatccctagtgagactttgaaccgtatcctgggcgacccagaagccctgagagacctgctgaacaaccacatcttgaagtcagctatgtgtgctgaagccatcgttgcggggctgtctgtagagaccctggagggcacgacactggaggtgggctgcagcggggacatgctcactatcaacgggaaggcgatcatctccaataaagacatcctagccaccaacggggtgatccactacattgatgagctactcatcccagactcagccaagacactatttgaattggctgcagagtctgatgtgtccacagccattgaccttttcagacaagccggcctcggcaatcatctctctggaagtgagcggttgaccctcctggctcccctgaattctgtattcaaagatggaacccctccaattgatgcccatacaaggaatttgcttcggaaccacataattaaagaccagctggcctctaagtatctgtaccatggacagaccctggaaactctgggcggcaaaaaactgagagtttttgtttatcgtaatagcctctgcattgagaacagctgcatcgcggcccacgacaagagggggaggtacgggaccctgttcacgatggaccgggtgctgacccccccaatggggactgtcatggatgtcctgaagggagacaatcgctttagcatgctggtagctgccatccagtctgcaggactgacggagaccctcaaccgggaaggagtctacacagtctttgctcccacaaatgaagccttccgagccctgccaccaagagaacggagcagactcttgggagatgccaaggaacttgccaacatcctgaaataccacattggtgatgaaatcctggttagcggaggcatcggggccctggtgcggctaaagtctctccaaggtgacaagctggaagtcagcttgaaaaacaatgtggtgagtgtcaacaaggagcctgttgccgagcctgacatcatggccacaaatggcgtggtccatgtcatcaccaatgttctgcagcctccagccaacagacctcaggaaagaggggatgaacttgcagactctgcgcttgagatcttcaaacaagcatcagcgttttccagggcttcccagaggtctgtgcgactagcccctgtctatcaaaagttattagagaggatgaagcattagcttgaagcactacaggaggaatgcaccacggcagctctccgccaatttctctcagatttccacagagactgtttgaatgttttcaaaaccaagtatcacactttaatgtacatgggccgcaccataatgagatgtgagccttgtgcatgtgggggaggagggagagagatgtactttttaaatcatgttccccctaaacatggctgttaacccactgcatgcagaaacttggatgtcactgcctgacattcacttccagagaggacctatcccaaatgtggaattgactgcctatgccaagtccctggaaaaggagcttcagtattgtggggctcataaaacatgaatcaagcaatccagcctcatgggaagtcctggcacagtttttgtaaagcccttgcacagctggagaaatggcatcattataagctatgagttgaaatgttctgtcaaatgtgtctcacatctacacgtggcttggaggcttttatggggccctgtccaggtagaaaagaaatggtatgtagagcttagatttccctattgtgacagagccatggtgtgtttgtaataataaaaccaaagaaacata

SEQ ID NO: 1010 - DNA, 1599 bp, Homo sapiens
tctaaagaagcccctgggagcacagctcatcaccatggactggacctggaggttcctctttgtggtggcagcagctacaggtgtccagtcccagatgcaggtggtgcagtctggggctgaagtaaagaagcctgggtcctcggtgacggtctcctgcaaggcatctggaggcaccttcagcaactatgctatcagctgggtgcgacaggcccctggacaagggcttgagtggatgggagggatcatccctctttttggtacaccaacctactcacagaacttccagggcagagtcacgattaccgcggacaaatccaccagcacagcccacatggagctgatcagcctgagatctgaggacacggccgtgtattactgtgcgacagatcgctacaggcaggcaaattttgaccgggcccgggttggctggttcgacccctggggccagggcaccctggtcaccgtctcctcagcctccaccaagggcccatcggtcttccccctggcaccctcctccaagagcacctctgggggcacagcggccctgggctgcctggtcaaggactacttccccgaaccggtgacggtgtcgtggaactcaggcgccctgaccagcggcgtgcacaccttcccggctgtcctacagtcctcaggactctactccctcagcagcgtggtgaccgtgccctccagcagcttgggcacccagacctacatctgcaacgtgaatcacaagcccagcaacaccaaggtggacaagaaagttgagcccaaatcttgtgacaaaactcacacatgcccaccgtgcccagcacctgaactcctggggggaccgtcagtcttcctcttccccccaaaacccaaggacaccctcatgatctcccggacccctgaggtcacatgcgtggtggtggacgtgagccacgaagaccctgaggtcaagttcaactggtacgtggacggcgtggaggtgcataatgccaagacaaagccgcgggaggagcagtacaacagcacgtaccgtgtggtcagcgtcctcaccgtcctgcaccaggactggctgaatggcaaggagtacaagtgcaaggtctccaacaaagccctcccagcccccatcgagaaaaccatctccaaagccaaagggcagccccgagaaccacaggtgtacaccctgcccccatcccgggatgagctgaccaagaaccaggtcagcctgacctgcctggtcaaaggcttctatcccagcgacatcgccgtggagtgggagagcaatgggcagccggagaacaactacaagaccacgcctcccgtgctggactccgacggctccttcttcctctacagcaagctcaccgtggacaagagcaggtggcagcaggggaacgtcttctcatgctccgtgatgcatgaggctctgcacaaccactacacgcagaagagcctctccctgtctccgggtaaatgagtgcgacggccggcaagcccccgctccccgggctctcgcggtcgcacgaggatgcttggcacgtaccccgtgtacatacttcccgggcgcccagcatggaaataaagcacccagcgctgccctgggcccctgcg

SEQ ID NO: 1011 - DNA, 3308 bp, Homo sapiens
ggcggccgcgctcgtcggggccgggggcggggccgatccctccggcttcccgcttcccgcggagaacaacaatgaaagtgaaagaggggtggggcgggggcgagcccgggttctgtggcccatttgccctgtggccttgagcaagcccctcccccaggcctcgggggctctcccggtttgggggaaccgggcgaggcaatgccacaggcccagggttagagggggtgggcacttgcagctgccgatgtggctggatctggaacttctcggagacggctcctgtcagcgccaagtttcaccaaatccaggcctgcccctcctcccccaggacccccactcgcagtccctcaagcctgtgctcccggaaaggcactgggcgaccgcacccgtggctttctctgggcgaccgggtcccagactccccccagcacagcagagcgcttccctgcccaccccggaaaccgccccaggtggccgcgccccctccccagcagccagcagggcgccagggctgagccggccgtggaggggagcgggtcccgcggttatacaggcgccggggctccgcggcaggcaagagaagctgaggcctgagaacggcccaaaccttggcgtacggcaggggacgacctgggatgggggcagcgggcggcggcgcagggagtgggccgggggccggtgtgcgcgggcgggacggggcccggggtcgggagacaccgcttggaagatggggccgggagaggcgccgtcgcagcgcagagggcaccggcggggagacgcgaggacgcggggcccgggaacacggacgccggagtagaagcgcggggggccgggctggagcgggggcggggacgcgggggtcgggggcggtgcgggtttgaggggagggggcgggcgggtccttccctgggggggtggggagagggggcgggggcccatgtgaccggctcagaccgttctggagacaaaaggggccgcggcggccggagcgggacgggcccggcgcgggagggagcgaagcagcgcgggcagcgagcgagtgagcgcgcggcgggcccctggtccgccggcccgcggccgatctaggggctgggggctggaggcggggtgggggtctgagctgcgtcctgggctcgaggcgtcccccgggggagtcgcctcttagcggtgcgtccgggctagcggcgaggggccgccccaagtcttcccaccgccgccaccttagcagcccgacttggggcctggaaagtggagcacgcggaggtgggagggccctgcacgcggccccggtgggaaaggggacgggccagggattcagactcgggctctcccctcaggatgcagcaccgaggcttcctcctcctcaccctcctcgccctactggcgctcacctccgcggtcgccaaaaagaaaggtgatgggggatgatcgaaggagggctggggacgggcaggcaggcccctccacttctggctggccgcctggttcctagcctggaacccaggaaggcggctcccgagggagtctccccgtgccccagtcctgaactctgttcctcgcgcgtgtagataaggtgaagaagggcggcccggggagcgagtgcgctgagtgggcctgggggccctgcacccccagcagcaaggattgcggcgtgggtttccgcgagggcacctgcggggcccagacccagcgcatccggtgcagggtgccctgcaactggaagaaggagtttggaggtaggcgggcgcagtcagagggcagagacgggggcacagcctcgccgaagcctgggcggacccttggcggagggcggggccgcgggcgcgcagcgctgacctgggccgctctctcgccagccgactgcaagtacaagtttgagaactggggtgcgtgtgatgggggcacaggcaccaaagtccgccaaggcaccctgaagaaggcgcgctacaatgctcagtgccaggagaccatccgcgtcaccaagccctgcacccccaagaccaaagcaaaggccaaaggtcagcgaaaggagaagggggtggggctgtcgcggggggctgcccccccccccccgcctgtgaggggacaattccaagttaaaccttaagttttgagtcctggccagtggcttcctgacatcgcctcacttggcttccctgcctggaaaagtctgaagatgggcactacaagagaggccgcaggtgatgctggggacataaatcctccctggcccaaatagggaccaactcaaactactccattggagcatctggcttaggacccagggagagagtcctggaacggcttgcctttggtcagctctccagccacgggcagcatttggtcagctctgccctttctagtgttgggaggaggtcaaggcccaccctgggcctctcagctcactcgtgactcagcccagcgaggccagcagggcaggggtgaatctgcccgcttctcaggtgaggaggctgaggatgcccagggctgctgtgaccaggactaggactggaaacttgaaggttttctgatcccaagtggaaataggaagctggggatgtcccatgtccacatcacaatggctgccccatcccctgcttccgagtcagctgattggaaaccactaggggcagatcttctccttccctgatgcccgggtgtttgtggagccggcggtctgcaatgggtcagcctaactgctgatatggtattaatatttctttcttgttttacagccaagaaagggaagggaaaggactagacgccaagcctggatgccaaggagcccctggtgtcacatggggcctggccacgccctccctctcccaggcccgagatgtgacccaccagtgccttctgtctgctcgttagctttaatcaatcatgccctgccttgtccctctcactccccagccccacccctaagtgcccaaagtggggagggacaagggattctgggaagcttgagcctcccccaaagcaatgtgagtcccagagcccgcttttgttcttccccacaattccattactaagaaacacatcaaataaactgactttttccccccaataaaagctcttcttttttaatataaagccccttcccaaggagtttgctgtggaaatgtgtttgggagtgggaaggtggggagaaagaccaggctgtagggactggtgggtttcagggggcttggtggtgggtgctctccagagctcatggaaaaagcagaacaattacaacatttcttccagggcccctgaaaggtgctccccatcaagtcacctaagcctttcggtcctcatctccctca

SEQ ID NO: 1012 - DNA, 1221 bp, Homo sapiens
cgcaggctggaaggaagacgaacctacgaagcagagatctgaagacagcatgtacacagccattccccagagtggctctccattcccaggctcagtgcaggatccaggcctgcatgtgtggcgggtggagaagctgaagccggtgcctgtggcgcaagagaaccagggcgtcttcttctcgggggactcctacctagtgctgcacaatggcccagaagaggtttcccatctgcacctgtggataggccagcagtcatcccgggatgagcagggggcctgtgccgtgctggctgtgcacctcaacacgctgctgggagagcggcctgtgcagcaccgcgaggtgcagggcaatgagtctgacctcttcatgagctacttcccacggggcctcaagtaccaggaaggtggtgtggagtcagcatttcacaagacctccacaggagccccagctgccatcaagaaactctaccaggtgaaggggaagaagaacatccgtgccaccgagcgggcactgaactgggacagcttcaacactggggactgcttcatcctggacctgggccagaacatcttcgcctggtgtggtggaaagtccaacatcctggaacgcaacaaggcgagggacctggccctggccatccgggacagtgagcgacagggcaaggcccaggtggagattgtcactgatggggaggagcctgctgagatgatccaggtcctgggccccaagcctgctctgaaggagggcaaccctgaggaagacctcacagctgacaaggcaaatgcccaggccgcagctctgtataaggtctctgatgccactggacagatgaacctgaccaaggtggctgactccagcccctttgcccttgaactgctgatatctgatgactgctttgtgctggacaacgggctctgtggcaagatctatatctggaaggggcgaaaagcgaatgagaaggagcggcaggcagccctgcaggtggccgagggcttcatctcgcgcatgcagtacgccccgaacactcaggtggagattctgcctcagggccgtgagagtcccatcttcaagcaatttttcaaggactggaaatgagggtgggcgtcttcctgccccatgctcccctgccccccaccacctgcctgcttgcttctctggctgcctggtcagtgcagaggtgccccctgcagatgttcaataaaggagacaagtgctttccc

SEQ ID NO: 1013 - DNA, 4003 bp, Homo sapiens
attaaacctctcgccgagcccctccgcagactctgcgccggaaagtttcatttgctgtatgccatcctcgagagctgtctaggttaacgttcgcactctgtgtatataacctcgacagtcttggcacctaacgtgctgtgcgtagctgctcctttggttgaatccccaggcccttgttggggcacaaggtggcaggatgtctcagtggtacgaacttcagcagcttgactcaaaattcctggagcaggttcaccagctttatgatgacagttttcccatggaaatcagacagtacctggcacagtggttagaaaagcaagactgggagcacgctgccaatgatgtttcatttgccaccatccgttttcatgacctcctgtcacagctggatgatcaatatagtcgcttttctttggagaataacttcttgctacagcataacataaggaaaagcaagcgtaatcttcaggataattttcaggaagacccaatccagatgtctatgatcatttacagctgtctgaaggaagaaaggaaaattctggaaaacgcccagagatttaatcaggctcagtcggggaatattcagagcacagtgatgttagacaaacagaaagagcttgacagtaaagtcagaaatgtgaaggacaaggttatgtgtatagagcatgaaatcaagagcctggaagatttacaagatgaatatgacttcaaatgcaaaaccttgcagaacagagaacacgagaccaatggtgtggcaaagagtgatcagaaacaagaacagctgttactcaagaagatgtatttaatgcttgacaataagagaaaggaagtagttcacaaaataatagagttgctgaatgtcactgaacttacccagaatgccctgattaatgatgaactagtggagtggaagcggagacagcagagcgcctgtattggggggccgcccaatgcttgcttggatcagctgcagaactggttcactatagttgcggagagtctgcagcaagttcggcagcagcttaaaaagttggaggaattggaacagaaatacacctacgaacatgaccctatcacaaaaaacaaacaagtgttatgggaccgcaccttcagtcttttccagcagctcattcagagctcgtttgtggtggaaagacagccctgcatgccaacgcaccctcagaggccgctggtcttgaagacaggggtccagttcactgtgaagttgagactgttggtgaaattgcaagagctgaattataatttgaaagtcaaagtcttatttgataaagatgtgaatgagagaaatacagtaaaaggatttaggaagttcaacattttgggcacgcacacaaaagtgatgaacatggaggagtccaccaatggcagtctggcggctgaatttcggcacctgcaattgaaagaacagaaaaatgctggcaccagaacgaatgagggtcctctcatcgttactgaagagcttcactcccttagttttgaaacccaattgtgccagcctggtttggtaattgacctcgagacgacctctctgcccgttgtggtgatctccaacgtcagccagctcccgagcggttgggcctccatcctttggtacaacatgctggtggcggaacccaggaatctgtccttcttcctgactccaccatgtgcacgatgggctcagctttcagaagtgctgagttggcagttttcttctgtcaccaaaagaggtctcaatgtggaccagctgaacatgttgggagagaagcttcttggtcctaacgccagccccgatggtctcattccgtggacgaggttttgtaaggaaaatataaatgataaaaattttcccttctggctttggattgaaagcatcctagaactcattaaaaaacacctgctccctctctggaatgatgggtgcatcatgggcttcatcagcaaggagcgagagcgtgccctgttgaaggaccagcagccggggaccttcctgctgcggttcagtgagagctcccgggaaggggccatcacattcacatgggtggagcggtcccagaacggaggcgaacctgacttccatgcggttgaaccctacacgaagaaagaactttctgctgttactttccctgacatcattcgcaattacaaagtcatggctgctgagaatattcctgagaatcccctgaagtatctgtatccaaatattgacaaagaccatgcctttggaaagtattactccaggccaaaggaagcaccagagccaatggaacttgatggccctaaaggaactggatatatcaagactgagttgatttctgtgtctgaagttcacccttctagacttcagaccacagacaacctgctccccatgtctcctgaggagtttgacgaggtgtctcggatagtgggctctgtagaattcgacagtatgatgaacacagtatagagcatgaatttttttcatcttctctggcgacagttttccttctcatctgtgattccctcctgctactctgttccttcacatcctgtgtttctagggaaatgaaagaaaggccagcaaattcgctgcaacctgttgatagcaagtgaatttttctctaactcagaaacatcagttactctgaagggcatcatgcatcttactgaaggtaaaattgaaaggcattctctgaagagtgggtttcacaagtgaaaaacatccagatacacccaaagtatcaggacgagaatgagggtcctttgggaaaggagaagttaagcaacatctagcaaatgttatgcataaagtcagtgcccaactgttataggttgttggataaatcagtggttatttagggaactgcttgacgtaggaacggtaaatttctgtgggagaattcttacatgttttctttgctttaagtgtaactggcagttttccattggtttacctgtgaaatagttcaaagccaagtttatatacaattatatcagtcctctttcaaaggtagccatcatggatctggtagggggaaaatgtgtattttattacatctttcacattggctatttaaagacaaagacaaattctgtttcttgagaagagaatattagctttactgtttgttatggcttaatgacactagctaatatcaatagaaggatgtacatttccaaattcacaagttgtgtttgatatccaaagctgaatacattctgctttcatcttggtcacatacaattatttttacagttctcccaagggagttaggctattcacaaccactcattcaaaagttgaaattaaccatagatgtagataaactcagaaatttaattcatgtttcttaaatgggctactttgtcctttttgttattagggtggtatttagtctattagccacaaaattgggaaaggagtagaaaaagcagtaactgacaacttgaataatacaccagagataatatgagaatcagatcatttcaaaactcatttcctatgtaactgcattgagaactgcatatgtttcgctgatatatgtgtttttcacatttgcgaatggttccattctctctcctgtactttttccagacacttttttgagtggatgatgtttcgtgaagtatactgtatttttacctttttccttccttatcactgacacaaaaagtagattaagagatgggtttgacaaggttcttcccttttacatactgctgtctatgtggctgtatcttgtttttccactactgctaccacaactatattatcatgcaaatgctgtattcttctttggtggagataaagatttcttgagttttgttttaaaattaaagctaaagtatctgtattgcattaaatataatatcgacacagtgctttccgtggcactgcatacaatctgaggcctcctctctcagtttttatatagatggcgagaacctaagtttcagttgattttacaattgaaatgactaaaaaacaaagaagacaacattaaaaacaatattgtttcta

SEQ ID NO: 1014 - DNA, 330 bp, Homo sapiens; identical to SEQ ID NO: 453

SEQ ID NO: 1015 - DNA, 354 bp, Homo sapiens
tttttttttttttttttgtcatatccataaagtttattttaaaaaactgttaaaaactaaccatacaggtttattaatatacttaaaaagtttgttccctatgttgaagtaaaatacattagcaacatcttccggacaccatctttataaaagtaaaacttctagatcctgaaatgtactacagtagagtctatagtttacacttttaatcacagattggaattcattctccttactcccctacttcccacatgtggcagttattacttcaaaattaatgacattcactcatgttatactaccacagatccttaaatagagtacatactgcataattactaacagagccagtct

SEQ ID NO: 1016 - DNA, 478 bp, Homo sapiens
  misc_feature (1)..(478): n=a,t,g or c
gcgaccgacacgtcctccatgtccgcgcccagccggnctcgcgccgcctgcagctccttggacagccgtgcccgcgtctcctccgccaccggggtcagttgttcctccagttccgatttgtaggccttcaactccttcatggtctcgtccatcagcgccctcagttcctgggtgacctgggagctcgagcagctcctcctgcacctgctcagacagtgtctgcacccagcgcaggtaatcccaaaagcgacccagtgccagttcccagcgctggccgctctgccactcggtctgctggcgcagtcgnggctccggctctgtctccaccgcttgctccaccttggcctggcatcctgccaggaatgtgaccagcaacgcagcccacagaaccttcatcttcctgcctgtgattggccagtcggctcctggggaaggacgtccttcaacctcgtgccgaattcttggcctcgaaggcaaa

SEQ ID NO: 1017 - DNA, 497 bp, Homo sapiens
  misc_feature (1)..(497): n=a,t,g or c
caaaaacatataaataaaatccatccctcttgtcggggacctgcaggggggcaaccttaatccaaacacctggctatcaaataatcagaatgtattgtctcagacaggatttcagttccgggaggcaggggcatgangnnnganggggccggantgangagacaaaagttccagagcctccctcgaaggttctctactactgtattctgtacataatgtaccatcccatgtggaatctgtgagtgtcctcttaagtagcgtgggctagccaatctgccgttcatggtgtattgtaaactccgaattccatatgtaataggatgcaagtctaagcgtttcatgtggacataaatgtatctaaataaaactttccctagcactgtggctgacctcacccttacttttatactttagtatgaaacttgatgagaacttttggnaagtgaagtanttttttttatatatatacatatataatgtaactatcctattatata

SEQ ID NO: 1018 - DNA, 422 bp, Homo sapiens
  misc_feature (1)..(422): n=a,t,g or c
gcattagacacagtttaatcgccttcaaatagatgaaaagttccggtttacactcccccaccgcataagtcatccagacaggaccctggcttagaaagaggaaaacacaggtgctctaggaaatatagccacatataatacataaatcttcttccctgaaatagagcaggtcctgagcagagtgactgggggccacagccacccccagggtgaagtggctctgggactctgccggtggaagtgctggaagagcggggcttggagggaagcccccagtgtggttaccatagccagaggtgggccgaggcttaagggtgagttacccgagangcaagcagtgctggggctttccctcactcagccgaggcttaaatggaagaactggttagcatttttttttttttganggtacatcgggggag

SEQ ID NO: 1019 - DNA, 367 bp, Homo sapiens
gatttaaataggtttatttcttcatttacaagaggaatatatttggcttctctcttaagactctgagattcacaatcagcagctctaaaaaataaaggagcagtttggcttccggaagaagaggaggcaacactcggacctggttcttgtacaacaagaaaacatcgctggggccccgctgaggctggagtgggggtggaggctggtctttggaggatgccacccccaccccatcctcttgtcaggccctcggggtaccccagaagcttggtgggtgagtattccacctgcttacacaccactgaaagccacagccagccagtaactaaggggcaagaagagcattgtccaagctggccctcatgcc

SEQ ID NO: 1020 - DNA, 320 bp, Homo sapiens; identical to SEQ ID NO: 462

SEQ ID NO: 1021 - DNA, 471 bp, Homo sapiens
  misc_feature (1)..(471): n=a,t,g or c
tttttttttttttttttttaatagaacaagaagtttattactcccactcagtagttcctgggggctttgatgttaagtcatacataattcgagaaataccaggaatcttcttaatctcagtgaccatctttaataccacctctacngggatctcattgccaggtgttgcaggtataccagtcatgaagtcactagtaataaaggttcgaataaccacagatctctggcatgaaggctgcttttgaagtgggtcccgatcaaaatgtaatggtgtcaaaatcaccggcatcnggctgattttcccagcatacccagactccctgngaatgttatgggcctcaaaatcagcttgggcgtaaaagtacttgngcaccccntgttgtcaagaaagttgggagtaacatctgtaggaggttctttaactggtgggccaaatntataaaccactccgttaacgttgnggacacatgg

SEQ ID NO: 1022 - DNA, 408 bp, Homo sapiens
gaacaagtacaaatttagcaattttaatcaatattcttgcagacaagtgtggatatgtatatgcatatatacatatatatatcaaaattgagaatttacaaataagatttgatacatttattctagcagtgggtaagtccatagagtaaatttcaagtaggatatatttattttctttggtggtgtttttaataattcctttctactgcatacaaagggacctgaagcttaaattcagttagttttggagaaatccaaaatgagaaaaacagaaagcatgtagcattccatgaagcaagaacagcgtgcatatgctattcctggaaatactgaagtgtccgaatttcatgcctaaaaagtctgggaaatcacactgaatcagttgctggtttctgatgtctctgggat

SEQ ID NO: 1023 - DNA, 470 bp, Homo sapiens; identical to SEQ ID NO: 468
  misc_feature (1)..(470): n=a,t,g or c

SEQ ID NO: 1024 - DNA, 292 bp, Homo sapiens
  misc_feature (1)..(292): n=a,t,g or c
tgtgcttttgacactttatccgtttttatttaaaaacatgctaaaaacatggtgttccataaagccaggaccaggatgaaggaacgcacagatacggcaatgcaagcagaaagtgcatctgaaaccaacaagcgtgctcaccctgctctccctcccgtgctgcccgggggangcaaggtgggcaaggagggggcaggaagcccccatggcctcacctcctgagtccccaatcagggcagggaggccaggccccaccctggactattgactcactgcagtggggaggaggaaa

SEQ ID NO: 1025 - DNA, 165 bp, Homo sapiens
ctctttgagtaactttattttggaggagttccataagcattaggaacatacataaaatgacacaccactgttgacaatgaaaaaaaaaacagcatttgatattttccagctttttaagttaaaaaatgattcagttaaaacaaaacaaaagtttagatattttag

SEQ ID NO: 1026 - DNA, 252 bp, Homo sapiens
  misc_feature (1)..(252): n=a,t,g or c
tttttttaaaacattaaataattttattcttttctcatttacagtagcccagtggtaagcatgttagaaaacctgaagaaatttaaaagtttttggtttacaaaaagcatgtataaaaatacctgttcagacaaacaaagatctcgatcattacattgcccagctttaagaatcccaaaaataactaaaatactgtcaatcaaatgagagggctacatgggnttattaaagtttattttaacaattttagcg

SEQ ID NO: 1027 - DNA, 439 bp, Homo sapiens
tttttgatttaaaagattttattttctttatgcaggtaggcagttagaaatttcaaagtctaacaatgacattcttgaagtgggcacagcttttaaactcaggctatgtatacagtaaccttgtggaactggttcagccagatcttcactttcatgaaagcacagggtctgtccttttctttccagagggctcctctcatattccatcgccagtttctgttacaaggcagactgaatcaagccaagatcaacacacactggtacacgtggctcccaaccaattttatatgtatatatatattctacttccaacacccgcattcatcctggttcaatcaaagcctggttttggccaacaataaactcgtcaggagatcgaaggttgtagatgtctgcacgtggcttccttggaggtccagtggtgactccctcttccaaa

SEQ ID NO: 1028 - DNA, 413 bp, Homo sapiens
  misc_feature (1)..(413): n=a,t,g or c
ttggnttgagtttggcctttcctactgcagccaggtgagagcttaagatgtcagtccccaatatcttcacagagtgcctttatgaccagtttggagaattacgatggtaaggggaagaggcagatatgaagaggaatggttaggggaattgtcattcataactctgtgctatattacttgaggggctaagaaaaatgtatggtcagtgaaacacagtagtgtacccttaaatgccttataaaagaccatccatccagtctgcgcttttgactgtgtgcaagtatcagtaataatgcttttggggggctcagatgaacagcgaacacccaatcagccaggggctctgggaagggaaagctcccaaaaatgaggaagtcccttccaacacccatttttcccattactgttctcac

SEQ ID NO: 1029 - DNA, 284 bp, Homo sapiens; identical to SEQ ID NO: 480

SEQ ID NO: 1030 - DNA, 371 bp, Homo sapiens; identical to SEQ ID NO: 481
  misc_feature (1)..(371): n=a,t,g or c

SEQ ID NO: 1031 - DNA, 348 bp, Homo sapiens
ttgcataacaagtttatttttttaaaaggcatatagacaataaacaaagtaaataatcagatcttaacttctgtcctagacttgttccgttaagttctagtctgtgagcacttgtagttcaataatcgtcatcttcatcagagtccattacttttcttctgttgaatttcactgttgttgtcttttctgtttgttggcttacttttttaaggatttctattaaaccttgttctgataccttctcacttaggttgtccatatcttgccatctgtataagggtaattctctactgctttaggttttttcagggctttacaaggtgctaaggttacttaacctggggcccg

SEQ ID NO: 1032 - DNA, 449 bp, Homo sapiens
  misc_feature (1)..(449): n=a,t,g or c
cgaaagtgtcatcaatttgtaattttagtattaactctgtaaaagtgtctgtaggtacgttttatattatataaggacagaccaaaaatcaacctatcaaagcttcaaaaactttgggaaagggtgggattaagtacaagcacatttggcttacagtaaatgaactgatttttattaactgcttttgcccatataaaatgctgatatttactggaaacctagccagcttcacgattatgactaaagtaccagattataatgccagaatataatgtgcaggcaatcgtgggatgtctctgacaaagtgtgtctcaaaaataatattactttttacattaaaggaaattttaatgtttctctgggagttgggggctcctnggcttttcagagtttgggttaatcngtgttggaattctaggtggatccaaccatattggggcccnctcctt

SEQ ID NO: 1033 - DNA, 431 bp, Homo sapiens
  misc_feature (1)..(431): n=a,t,g or c
anattcggcacaggaagttggagggagatgcagctttaaacagattatttcagcagatctattcagatggttctgatgaagtgaaacgngccatgaacaaatcctttatggagtcgggtggtacagttttgagtaccaactggtctgatgtaggtaaaaggaaagttgaaatcaatcctcctgatgatatggaatggaaaaagtactaaataaattaatttgctctcatcgtattgtgtatattcacctaatgcccattgtgtattgatattgcattcttgaattttgaacactgaatatctttttgaaagattatacttctttacctctttgtgctttagaaattattttccttcaagtgttcaagtctaatgaagaatgaagataacattttatccacngcgtccntaaagattncagacagggtgaaa

SEQ ID NO: 1034 - DNA, 558 bp, Homo sapiens
cgagtcagtgccgtttgcgccagttggatcgaagcctcttaaaatggcagatgatttggacttcgagacaggagatgcaggggcctcagccaccttcccaatgcagtgctcagcattacgtaagaatggctttgtggtgctcaaaggctggccatgtaagatcgtggagatgtctgcttcgaagactggcaagcacggccacgccaaggtccatctggttggtattgacatctttactgggaagaaatatgaagatatctgcccatcaactcataatatggatgtccccaacatcagaaggaatgacttccagctgattggcatccaggatgggtacctatcactgctccaggacagtggggaggtaccagaggaccttcgtctccctgagggagaccttggcaaggagattgagcagaagtacgactgtggagaagagatcctgatcacggtgctgtctgccatgacagaggaggcagctgttgcaatcaaggccatggcaaaataactggctcccagggtggcagtggtggcagcagtgatcctccgaacctgcag

SEQ ID NO: 1035 - DNA, 534 bp, Homo sapiens; identical to SEQ ID NO: 486

SEQ ID NO: 1036 - DNA, 2237 bp, Homo sapiens
aattccgggaaacgccggcacgaaggcctcccaggcctggccgtgcagtggggcgccatcgggcacgtgggcattttggtggagacgatgagcaccaacgacacgatcgtcagtggcacgctgccccagcgcatggcgtcctgcctggaggtgctggacctcttcctgaaccagccccacatggtcctgagcagctttgtgctggctgagaaggctgcggcctatagggacagggacagccagcgggacctggtggaggccgtggcacacattctgggcatccgcgacttggctgctgtcaacctggacagctcactggcggacctgggcctggactcgctcatgagcgtggaggtgcgccagacgctggagcgtgagctcaacctggtgctgtccgtgcgcgaggtgcggcaactcacgctccggaaactgcaggagctgtcctcaaaggcggatgaggccagcgagctggcatgccccacgcccaaggaggatggtctggcccagcagcagactcagctgaacctgcgctccctgctggtgaacccggagggccccaccctgatgcggctcaactccgtgcagagctcggagcggcccctgttcctggtgcacccaatcgagggctccaccaccgtgttccacagcctggcctcccggctcagcatccccacctatggcctgcagtgcacccgagctgcgccccttgacagcatccacagcctggctgcctactacatcgactgcatcaggcaggtgcagcccgagggcccctaccgcgtggccggctactcctacggggcctgcgtggcctttgaaatgtgctcccagctgcaggcccagcagagcccagcccccacccacaacagcctcttcctgttcgacggctcgcccacctacgtactggcctacacccagagctaccgggcaaagctgaccccaggctgtgaggctgagcctgagacggaggccatatgcttcttcgtgcagcagttcacggacatggagcacaacagggtgctggaggccctgctgccgctgaagggcctagaggagcgtgtggcagccgccgtggacctgatcatcaagagccaccagggcctggaccgccaggagctgagctttgcggcccggtccttctactacaagctgcgtgccgctgagcagtacacacccaaggccaagtaccatggcaacgtgatgctactgcgcgccaagacgggtggcacctacgggcaggacctgggcgcggactacaacctctcccaggtatgcgacgggaaagtatccgtccacgtcatcgagggtgaccaccgcacgctgctggagggcagcggcctggagtccatcatcagcatcatccacagctccctggctgagccacgcgtgagcgtgcgggagggctaggcccgtgcccccgcctgccaccggaggtcactccaccatccccaccccaccccaccccacccccgccatgcaacgggattgaagggtcctgccggtgggaccctgtccggcccagtgccactgccccccgaggctgctagacgtaggtgttaggcatgtcccacccacccgccgcctcccacggcacctcggggacaccagagctgccgacttggagactcctggtctgtgaagagccggtggtgcccgtgcccgcaggaactgggctgggcctcgtgcgcccgtggggtctgcgcttggtctttctgtgcttggatttgcatatttattgcattgctggtagagacccccaggcctgtccaccctgccaagactcctcaggcagcgtgtgggtcccgcactctgcccccatttccccgatgttcccttgcgggacgcgggcagccacccaagcctgctggctgcggccccctctcggccaggcattggctcagcccgctgagtggggggtcgtgggccagtccccgaggagctgggcccctgcacaggcacacagggcccggccacacccagcggccccccgcacagccacccgtggggtgctgcccttatgcccggcgccgggcaccaactccatgtttggtgtttgtctgtgtttgtttttcaagaaatgattcaaattgctgcttggattttgaaatttactgtaactgtcagtgtacacgtctggaccccgtttcatttttacaccaatttggtaaaaatgctgctctcagcctcccacaattaaaccgcatgtgatctccaaaaaaaaaaaaaaaaaaaaaaaa

SEQ ID NO: 1037 - DNA, 250 bp, Homo sapiens
caaataggacataaaggtccctagatttttaatcaaaatattttacaatttttgctctgctagcatgagatcaacaagaaaacccaacaggaatacataaaaaacttaacaagttgactttaataagtaaaaattacaacattcttctcccagcaatgaacaatttcattttttaaaagtaaacgaggcctaaaacaagagggcacaggaacaagtagtcagatggatttaggtgagcactgtacacaag

SEQ ID NO: 1038 - DNA, 458 bp, Homo sapiens
  misc_feature (1)..(458): n=a,t,g or c
agaagattcaaacaccatctattgagcacctacattgtgtgccaggtagtaaaataggtgctttcatacacattgtctcaattcctgtgaggtcagaattatctctgcatttgaaacttgaggaaacatgctcagagtgcaagaagcttccttgcctgagatcacctagaaaggaaccctcagagccggcaactgaatcttggtccctgtgatgtcaagcccattgctctnccactncagaacatggcctctagattaatgccaccgattcaggaacacctccgacagttttgaaatacccccatgttgccttgtttgttttttccttctgggcttcttctattacagtctctttcattgggaaggctctgttagggccaagggccaggaggctggattactggacacgggagtcccaatgtcaggattngccancattcaggatngcttggggggtt

SEQ ID NO: 1039 - DNA, 11185 bp, Homo sapiens
gctgccccgagcctttctggggaagaactccaggcgtgcggacgcaacagccgagaacattaggtgttgtggacaggagctgggaccaagatcttcggccagccccgcatcctcccgcatcttccagcaccgtcccgcaccctccgcatccttccccgggccaccacgcttcctatgtgacccgcctgggcaacgccgaacccagtcgcgcagcgctgcagtgaattttccccccaaactgcaataagccgccttccaaggccaagatgttcataaatataaagagcatcttatggatgtgttcaaccttaatagtaacccatgcgctacataaagtcaaagtgggaaaaagcccaccggtgaggggctccctctctggaaaagtcagcctaccttgtcatttttcaacgatgcctactttgccacccagttacaacaccagtgaatttctccgcatcaaatggtctaagattgaagtggacaaaaatggaaaagatttgaaagagactactgtccttgtggcccaaaatggaaatatcaagattggtcaggactacaaagggagagtgtctgtgcccacacatcccgaggctgtgggcgatgcctccctcactgtggtcaagctgctggcaagtgatgcgggtctttaccgctgtgacgtcatgtacgggattgaagacacacaagacacggtgtcactgactgtggatggggttgtgtttcactacagggcggcaaccagcaggtacacactgaattttgaggctgctcagaaggcttgtttggacgttggggcagtcatagcaactccagagcagctctttgctgcctatgaagatggatttgagcagtgtgacgcaggctggctggctgatcagactgtcagatatcccatccgggctcccagagtaggctgttatggagataagatgggaaaggcaggagtcaggacttatggattccgttctccccaggaaacttacgatgtgtattgttatgtggatcatctggatggtgatgtgttccacctcactgtccccagtaaattcaccttcgaggaggctgcaaaagagtgtgaaaaccaggatgccaggctggcaacagtgggggaactccaggcggcatggaggaacggctttgaccagtgcgattacgggtggctgtcggatgccagcgtgcgccaccctgtgactgtggccagggcccagtgtggaggtggtctacttggggtgagaaccctgtatcgttttgagaaccagacaggcttccctccccctgatagcagatttgatgcctactgctttaaacctaaagaggctacaaccatcgatttgagtatcctcgcagaaactgcatcacccagtttatccaaagaaccacaaatggtttctgatagaactacaccaatcatccctttagttgatgaattacctgtcattccaacagagttccctcccgtgggaaatattgtcagttttgaacagaaagccacagtccaacctcaggctatcacagatagtttagccaccaaattacccacacctactggcagtaccaagaagccctgggatatggatgactactcaccttctgcttcaggacctcttggaaagctagacatatcagaaattaaggaagaagtgctccagagtacaactggcgtctctcattatgctacggattcatgggatggtgtcgtggaagataaacaaacacaagaatcggttacacagattgaacaaatagaagtgggtcctttggtaacatctatggaaatcttaaagcacattccttccaaggaattccctgtaactgaaacaccattggtaactgcaagaatgatcctggaatccaaaactgaaaagaaaatggtaagcactgtttctgaattggtaaccacaggtcactatggattcaccttgggagaagaggatgatgaagacagaacacttacagttggatctgatgagagcaccttgatctttgaccaaattcctgaagtcattacggtgtcaaagacttcagaagacaccatccacactcatttagaagacttggagtcagtctcagcatccacaactgtttcccctttaattatgcctgataataatggatcatccatggatgactgggaagagagacaaactagtggtaggataacggaagagtttcttggcaaatatctgtctactacaccttttccatcacagcatcgtacagaaatagaattgtttccttattctggtgataaaatattagtagagggaatttccacagttatttatccttctctacaaacagaaatgacacatagaagagaaagaacagaaacactaataccagagatgagaacagatacttatacagatgaaatacaagaagagatcactaaaagtccatttatgggaaaaacagaagaagaagtcttctctgggatgaaactctctacatctctctcagagccaattcatgttacagagtcttctgtggaaatgaccaagtcttttgatttcccaacattgataacaaagttaagtgcagagccaacagaagtaagagatatggaggaagactttacagcaactccaggtactacaaaatatgatgaaaatattacaacagtgcttttggcccatggtactttaagtgttgaagcagccactgtatcaaaatggtcatgggatgaagataatacaacatccaagcctttagagtctacagaaccttcagcctcttcaaaattgccccctgccttactcacaactgtggggatgaatggaaaggataaagacatcccaagtttcactgaagatggagcagatgaatttactcttattccagatagtactcaaaagcagttagaggaggttactgatgaagacatagcagcccatggaaaattcacaattagatttcagccaactacatcaactggtattgcagaaaagtcaactttgagagattctacaactgaagaaaaagttccacctatcacaagcactgaaggccaagtttatgcaaccatggaaggaagtgctttgggtgaagtagaagatgtggacctctctaagccagtatctactgttccccaatttgcacacacttcagaggtggaaggattagcatttgttagttatagtagcacccaagagcctactacttatgtagactcttcccataccattcctctttctgtaattcccaagacagactggggagtgttagtaccttctgttccatcagaagatgaagttctaggtgaaccctctcaagacatacttgtcattgatcagactcgccttgaagcgactatttctccagaaactatgagaacaacaaaaatcacagagggaacaactcaggaagaattcccttggaaagaacagactgcagagaaaccagttcctgctctcagttctacagcttggactcccaaggaggcagtaacaccactggatgaacaagagggcgatggatcagcatatacagtctctgaagatgaattgttgacaggttctgagagggtcccagttttagaaacaactccagttggaaaaattgatcacagtgtgtcttatccaccaggtgctgtaactgagcacaaagtgaaaacagatgaagtggtaacactaacaccacgcattgggccaaaagtatctttaagtccagggcctgaacaaaaatatgaaacagaaggtagtagtacaacaggatttacatcatctttgagtccttttagtacccacattacccagcttatggaagaaaccactactgagaaaacatccctagaggatattgatttaggctcaggattatttgaaaagcccaaagccacagaactcatagaattttcaacaatcaaagtcacagttccaagtgatattaccactgccttcagttcagtagacagacttcacacaacttcagcattcaagccatcttccgcgatcactaagaaaccacctctcatcgacagggaacctggtgaagaaacaaccagtgacatggtaatcattggagaatcaacatctcatgttcctcccactacccttgaagatattgtagccaaggaaacagaaaccgatattgatagagagtatttcacgacttcaagtcctcctgctacacagccaacaagaccacccactgtggaagacaaagaggcctttggacctcaggcgctttctacgccacagcccccagcaagcacaaaatttcaccctgacattaatgtttatattattgaggtcagagaaaataagacaggtcgaatgagtgatttgagtgtaattggtcatccaatagattcagaatctaaagaagatgaaccttgtagtgaagaaacagatccagtgcatgatctaatggctgaaattttacctgaattccctgacataattgaaatagacctataccacagtgaagaaaatgaagaagaagaagaagagtgtgcaaatgctactgatgtgacaaccaccccatctgtgcagtacataaatgggaagcatctcgttaccactgtgcccaaggacccagaagctgcagaagctaggcgtggccagtttgaaagtgttgcaccttctcagaatttctcggacagctctgaaagtgatactcatccatttgtaatagccaaaacggaattgtctactgctgtgcaacctaatgaatctacagaaacaactgagtctcttgaagttacatggaagcctgagacttaccctgaaacatcagaacatttttcaggtggtgagcctgatgttttccccacagtcccattccatgaggaatttgaaagtggaacagccaaaaaaggggcagaatcagtcacagagagagatactgaagttggtcatcaggcacatgaacatactgaacctgtatctctgtttcctgaagagtcttcaggagagattgccattgaccaagaatctcagaaaatagcctttgcaagggctacagaagtaacatttggtgaagaggtagaaaaaagtacttctgtcacatacactcccactatagttccaagttctgcatcagcatatgtttcagaggaagaagcagttaccctaataggaaatccttggccagatgacctgttgtctaccaaagaaagctgggtagaagcaactcctagacaagttgtagagctctcagggagttcttcgattccaattacagaaggctctggagaagcagaagaagatgaagatacaatgttcaccatggtaactgatttatcacagagaaatactactgatacactcattactttagacactagcaggataatcacagaaagcttttttgaggttcctgcaaccaccatttatccagtttctgaacaaccttctgcaaaagtggtgcctaccaagtttgtaagtgaaacagacacttctgagtggatttccagtaccactgttgaggaaaagaaaaggaaggaggaggagggaactacaggtacggcttctacatttgaggtatattcatctacacagagatcggatcaattaattttaccctttgaattagaaagtccaaatgtagctacatctagtgattcaggtaccaggaaaagttttatgtccttgacaacaccaacacagtctgaaagggaaatgacagattctactcctgtctttacagaaacaaatacattagaaaatttgggggcacagaccactgagcacagcagtatccatcaacctggggttcaggaagggctgaccactctcccacgtagtcctgcctctgtctttatggagcagggctctggagaagctgctgccgacccagaaaccaccactgtttcttcattttcattaaacgtagagtatgcaattcaagccgaaaaggaagtagctggcactttgtctccgcatgtggaaactacattctccactgagccaacaggactggttttgagtacagtaatggacagagtagttgctgaaaatataacccaaacatccagggaaatagtgatttcagagcgattaggagaaccaaattatggggcagaaataaggggcttttccacaggttttcctttggaggaagatttcagtggtgactttagagaatactcaacagtgtctcatcccatagcaaaagaagaaacggtaatgatggaaggctctggagatgcagcatttagggacacccagacttcaccatctacagtacctacttcagttcacatcagtcacatatctgactcagaaggacccagtagcaccatggtcagcacttcagccttcccctgggaagagtttacatcctcagctgagggctcaggtgagcaactggtcacagtcagcagctctgttgttccagtgcttcccagtgctgtgcaaaagttttctggtacagcttcctccattatcgacgaaggattgggagaagtgggtactgtcaatgaaattgatagaagatccaccattttaccaacagcagaagtggaaggtacgaaagctccagtagagaaggaggaagtaaaggtcagtggcacagtttcaacaaactttccccaaactatagagccagccaaattatggtctaggcaagaagtcaaccctgtaagacaagaaattgaaagtgaaacaacatcagaggaacaaattcaagaagaaaagtcatttgaatcccctcaaaactctcctgcaacagaacaaacaatctttgattcacagacatttactgaaactgaactcaaaaccacagattattctgtactaacaacaaagaaaacttacagtgatgataaagaaatgaaggaggaagacacttctttagttaacatgtctactccagatccagatgcaaatggcttggaatcttacacaactctccctgaagctactgaaaagtcacattttttcttagctactgcattagtaactgaatctataccagctgaacatgtagtcacagattcaccaatcaaaaaggaagaaagtacaaaacattttccgaaaggcatgagaccaacaattcaagagtcagatactgagctcttattctctggactgggatcaggagaagaagttttacctactctaccaacagagtcagtgaattttactgaagtggaacaaatcaataacacattatatccccacacttctcaagtggaaagtacctcaagtgacaaaattgaagactttaacagaatggaaaatgtggcaaaagaagttggaccactcgtatctcaaacagacatctttgaaggtagtgggtcagtaaccagcacaacattaatagaaattttaagtgacactggagcagaaggacccacggtggcacctctccctttctccacggacatcggacatcctcaaaatcagactgtcaggtgggcagaagaaatccagactagtagaccacaaaccataactgaacaagactctaacaagaattcttcaacagcagaaattaacgaaacaacaacctcatctactgattttctggctagagcttatggttttgaaatggccaaagaatttgttacatcagcaccaaaaccatctgacttgtattatgaaccttctggagaaggatctggagaagtggatattgttgattcatttcacacttctgcaactactcaggcaaccagacaagaaagcagcaccacatttgtttctgatgggtccctggaaaaacatcctgaggtgccaagcgctaaagctgttactgctgatggattcccaacagtttcagtgatgctgcctcttcattcagagcagaacaaaagctcccctgatccaactagcacactgtcaaatacagtgtcatatgagaggtccacagacggtagtttccaagaccgtttcagggaattcgaggattccaccttaaaacctaacagaaaaaaacccactgaaaatattatcatagacctggacaaagaggacaaggatttaatattgacaattacagagagtaccatccttgaaattctacctgagctgacatcggataaaaatactatcatagatattgatcatactaaacctgtgtatgaagacattcttggaatgcaaacagatatagatacagaggtaccatcagaaccacatgacagtaatgatgaaagtaatgatgacagcactcaagttcaagagatctatgaggcagctgtcaacctttctttaactgaggaaacatttgagggctctgctgatgttctggctagctacactcaggcaacacatgatgaatcaatgacttatgaagatagaagccaactagatcacatgggctttcacttcacaactgggatccctgctcctagcacagaaacagaattagacgttttacttcccacggcaacatccctgccaattcctcgtaagtctgccacagttattccagagattgaaggaataaaagctgaagcaaaagccctggatgacatgtttgaatcaagcactttgtctgatggtcaagctattgcagaccaaagtgaaataataccaacattgggccaatttgaaaggactcaggaggagtatgaagacaaaaaacatgctggtccttcttttcagccagaattctcttcaggagctgaggaggcattagtagaccatactccctatctaagtattgctactacccaccttatggatcagagtgtaacagaggtgcctgatgtgatggaaggatccaatcccccatattacactgatacaacattagcagtttcaacatttgcgaagttgtcttctcagacaccatcatctcccctcactatctactcaggcagtgaagcctctggacacacagagatcccccagcccagtgctctgccaggaatagacgtcggctcatctgtaatgtccccacaggattcttttaaggaaattcatgtaaatattgaagcaactttcaaaccatcaagtgaggaataccttcacataactgagcctccctctttatctcctgacacaaaattagaaccttcagaagatgatggtaaacctgagttattagaagaaatggaagcttctcccacagaacttattgctgtggaaggaactgagattctccaagatttccaaaacaaaaccgatggtcaagtttctggagaagcaatcaagatgtttcccaccattaaaacacctgaggctggaactgttattacaactgccgatgaaattgaattagaaggtgctacacagtggccacactctacttctgcttctgccacctatggggtcgaggcaggtgtggtgccttggctaagtccacagacttctgagaggcccacgctttcttcttctccagaaataaaccctgaaactcaagcagctttaatcagagggcaggattccacgatagcagcatcagaacagcaagtggcagcgagaattcttgattccaatgatcaggcaacagtaaaccctgtggaatttaatactgaggttgcaacaccaccattttcccttctggagacttctaatgaaacagatttcctgattggcattaatgaagagtcagtggaaggcacggcaatctatttaccaggacctgatcgctgcaaaatgaacccgtgccttaacggaggcacctgttatcctactgaaacttcctacgtatgcacctgtgtgccaggatacagcggagaccagtgtgaacttgattttgatgaatgtcactctaatccctgtcgtaatggagccacttgtgttgatggttttaacacattcaggtgcctctgccttccaagttatgttggtgcactttgtgagcaagataccgagacatgtgactatggctggcacaaattccaagggcagtgctacaaatactttgcccatcgacgcacatgggatgcagctgaacgggaatgccgtctgcagggtgcccatctcacaagcatcctgtctcacgaagaacaaatgtttgttaatcgtgtgggccatgattatcagtggataggcctcaatgacaagatgtttgagcatgacttccgttggactgatggcagcacactgcaatacgagaattggagacccaaccagccagacagcttcttttctgctggagaagactgtgttgtaatcatttggcatgagaatggccagtggaatgatgttccctgcaattaccatctcacctatacgtgcaagaaaggaacagttgcttgcggccagccccctgttgtagaaaatgccaagacctttggaaagatgaaacctcgttatgaaatcaactccctgattagataccactgcaaagatggtttcattcaacgtcaccttccaactatccggtgcttaggaaatggaagatgggctatacctaaaattacctgcatgaacccatctgcataccaaaggacttattctatgaaatactttaaaaattcctcatcagcaaaggacaattcaataaatacatccaaacatgatcatcgttggagccggaggtggcaggagtcgaggcgctgatccctaaaatggcgaacatgtgttttcatcatttcagccaaagtcctaacttcctgtgcctttcctatcacctcgagaagtaattatcagttggtttggatttttggaccaccgttcagtcattttgggttgccgtgctcccaaaacattttaaatgaaagtattggcattcaaaaagacagcagacaaaatgaaagaaaatgagagcagaaagtaagcatttccagcctatctaatttctttagttttctatttgcctccagtgcagtccatttcctaatgtataccagcctactgtactatttaaaatgctcaatttcagcaccgatggccatgtaaataagatgatttaatgttgattttaatcctgtatataaaataaaaagtcacaatgagtttgggcatatttaatgatgattatggagccttagaggtctttaatcattggttcggctgcttttatgtagtttaggctggaaatggtttcacttgctctttgactgtcagcaagactgaagatggcttttcctggacagctagaaaacacaaaatcttgtaggtcattgcacctatctcagccataggtgcagtttgcttctacatgatgctaaaggctgcgaatgggatcctgatggaactaaggactccaatgtcgaactcttctttgctgcattcctttttcttcacttacaagaaaggcctgaatggaggacttttctgtaaccagg

SEQ ID NO: 1040 - DNA, 2638 bp, Homo sapiens
gaggaaaggggaaatgcggcccgctccccactcagtgccactctgtgccactccgtgccaggccctgagggcacccggttgctgcttccttccgtctttccccaaggactatcagagatgccagcgtgacccctgacacgtgtgtgcagcagcctgcagctgccccaagccatggctgaacactgactcccagctgtgggcttcaccattacagactccccagggcttcaaagacttctcagcttcgagcatggcttttggctgtcagggcagctgtacaatagtggatgtttgagacggaggcagatgagaagagggagatggccttggaggaagggaaggggcctggtgccgaggattccccacccagcaaggagccctctcctggccaggagcttcctccaggacaagaccttccacccaacaaggactccccttctgggcaggaacccgctcccagccaagaaccactgtccagcaaagactcagctacctctgaaggatcccctccaggcccagatgctccgcccagcaaggatgtgccaccatgccaggaaccccctccagcccaagacctctcaccctgccaggacctacctgctggtcaagaacccctgcctcaccaggaccctctactcaccaaagacctccctgccatccaggaatcccccacccgggaccttccaccctgtcaagatctgcctcctagccaggtctccctgccagccaaggcccttactgaggacaccatgagctccggggacctactagcagctactggggacccacctgcggcccccaggccagccttcgtgatccctgaggtccggctggatagcacctacagccagaaggcaggggcagagcagggctgctcgggagatgaggaggatgcagaagaggccgaggaggtggaggagggggaggaaggggaggaggacgaggatgaggacaccagcgatgacaactacggagagcgcagtgaggccaagcgcagcagcatgatcgagacgggccagggggctgagggtggcctctcactgcgtgtgcagaactcgctgcggcgccggacgcacagcgagggcagcctgctgcaggagccccgagggccctgctttgcctccgacaccaccttgcactgctcagacggtgagggcgccgcctccacctggggcatgccttcgcccagcaccctcaagaaagagctgggccgcaatggtggctccatgcaccacctttccctcttcttcacaggacacaggaagatgagcggggctgacaccgttggggatgatgacgaagcctcccggaagagaaagagcaaaaacctagccaaggacatgaagaacaagctggggatcttcagacggcggaatgagtcccctggagcccctcccgcgggcaaggcagacaaaatgatgaagtcattcaagcccacctcagaggaagccctcaagtggggcgagtccttggagaagctgctggttcacaaatacgggttagcagtgttccaagccttccttcgcactgagttcagtgaggagaatctggagttctggttggcttgtgaggacttcaagaaggtcaagtcacagtccaagatggcatccaaggccaagaagatctttgctgaatacatcgcgatccaggcatgcaaggaggtcaacctggactcctacacgcgggagcacaccaaggacaacctgcagagcgtcacgcggggctgcttcgacctggcacagaagcgcatcttcgggctcatggaaaaggactcgtaccctcgctttctccgttctgacctctacctggaccttattaaccagaagaagatgagtcccccgctttaggggccactggagtcgagctcagcgttcacaccaggcgggctgggtcccctgcccacctgcctccctgccccctgtgacggagggggcaagcaagcccccagaggccgtgtctctggacagacggatagacatacggaagcgaggcctggaccaagagaggcccaggctactggaggagtagaaggatgggccccgtggggtccccactgccccggtacgagggggcccaagaccctggcaggtcaggggccctggccaagccagatctggagctgctgctccctgctgcggagaccgcggaggcttcgcgttgaccaagttccttaaagaactggctgatggggcaggaggtccaggcctgggctctcgggccctcctagagggccattggagcttgcagctcagacccccactttgagttttatttatttaaatagtagttggatgcttggcacgtcgtcctgtaataggaaacccttgcctcatcagttttcctgatttacaagtgcaatattttagccaatgccttgggagaagctgccatgcaaaggtggacaccattctccagcttcaggggatatgctcgtcccgggcaccggtggcaggcagctggccttctggactaaggcagcctggggggacactgcagtctggctacacacagagatctggcaccccctgggtggagtgtccctcgggggctttgggaaagcatggcaccctcagaccacacagtagccaagttctggagcaaataaaaggcctgtgttatttcttgttcttgaaaaaaa

SEQ ID NO: 1041 - DNA, 4098 bp, Homo sapiens
ggtggcctctgtggccgtccaggctagcggcggcccgcaggcggcggggagaaagactctctcacctggtcttgcggctgtggccaccgccggccaggggtgtggagggcgtgctgccggagacgtccgccgggctctgcagttccgccgggggtcgggcagctatggagccgcggcccacggcgccctcctccggcgccccgggactggccggggtcggggagacgccgtcagccgctgcgctggccgcagccagggtggaactgcccggcacggctgtgccctcggtgccggaggatgctgcgcccgcgagccgggacggcggcggggtccgcgatgagggccccgcggcggccggggacgggctgggcagacccttggggcccaccccgagccagagccgtttccaggtggacctggtttccgagaacgccgggcgggccgctgctgcggcggcggcggcggcggcggcagcggcggcggctggtgctggggcgggggccaagcagacccccgcggacggggaagccagcggcgagagcgagccagctaaaggcagcgaggaagccaagggccgcttccgcgtgaacttcgtggacccagctgcctcctcgtcggctgaagacagcctgtcagatgctgccggggtcggagtcgacgggcccaacgtgagcttccagaacggcggggacacggtgctgagcgagggcagcagcctgcactccggcggcggcggcggcagtgggcaccaccagcactactattatgatacccacaccaacacctactacctgcgcaccttcggccacaacaccatggacgctgtgcccaggatcgatcactaccggcacacagccgcgcagctgggcgagaagctgctccggcctagcctggcggagctccacgacgagctggaaaaggaaccttttgaggatggctttgcaaatggggaagaaagtactccaaccagagatgctgtggtcacgtatactgcagaaagtaaaggagtcgtgaagtttggctggatcaagggtgtattagtacgttgtatgttaaacatttggggtgtgatgcttttcattagattgtcatggattgtgggtcaagctggaataggtctatcagtccttgtaataatgatggccactgttgtgacaactatcacaggattgtctacttcagcaatagcaactaatggatttgtaagaggaggaggagcatattatttaatatctagaagtctagggccagaatttggtggtgcaattggtctaatcttcgcctttgccaacgctgttgcagttgctatgtatgtggttggatttgcagaaaccgtggtggagttgcttaaggaacattccatacttatgatagatgaaatcaatgatatccgaattattggagccattacagtcgtgattcttttaggtatctcagtagctggaatggagtgggaagcaaaagctcagattgttcttttggtgatcctacttcttgctattggtgatttcgtcataggaacatttatcccactggagagcaagaagccaaaagggttttttggttataaatctgaaatatttaatgagaactttgggcccgattttcgagaggaagagactttcttttctgtatttgccatcttttttcctgctgcaactggtattctggctggagcaaatatctcaggtgatcttgcagatcctcagtcagccatacccaaaggaacactcctagccattttaattactacattggtttacgtaggaattgcagtatctgtaggttcttgtgttgttcgagatgccactggaaacgttaatgacactatcgtaacagagctaacaaactgtacttctgcagcctgcaaattaaactttgatttttcatcttgtgaaagcagtccttgttcctatggcctaatgaacaacttccaggtaatgagtatggtgtcaggatttacaccactaatttctgcaggtatattttcagccactctttcttcagcattagcatccctagtgagtgctcccaaaatatttcaggctctatgtaaggacaacatctacccagctttccagatgtttgctaaaggttatgggaaaaataatgaacctcttcgtggctacatcttaacattcttaattgcacttggattcatcttaattgctgaactgaatgttattgcaccaattatctcaaacttcttccttgcatcatatgcattgatcaatttttcagtattccatgcatcacttgcaaaatctccaggatggcgtcctgcattcaaatactacaacatgtggatatcacttcttggagcaattctttgttgcatagtaatgttcgtcattaactggtgggctgcattgctaacatatgtgatagtccttgggctgtatatttatgttacctacaaaaaaccagatgtgaattggggatcctctacacaagccctgacttacctgaatgcactgcagcattcaattcgtctttctggagtggaagaccacgtgaaaaactttaggccacagtgtcttgttatgacaggtgctccaaactcacgtccagctttacttcatcttgttcatgatttcacaaaaaatgttggtttgatgatctgtggccatgtacatatgggtcctcgaagacaagccatgaaagagatgtccatcgatcaagccaaatatcagcgatggcttattaagaacaaaatgaaggcattttatgctccagtacatgcagatgacttgagagaaggtgcacagtatttgatgcaggctgctggtcttggtcgtatgaagccaaacacacttgtccttggatttaagaaagattggttgcaagcagatatgagggatgtggatatgtatataaacttatttcatgatgcttttgacatacaatatggagtagtggttattcgcctaaaagaaggtctggatatatctcatcttcaaggacaagaagaattattgtcatcacaagagaaatctcctggcaccaaggatgtggtagtaagtgtggaatatagtaaaaagtccgatttagatacttccaaaccactcagtgaaaaaccaattacacacaaagttgaggaagaggatggcaagactgcaactcaaccactgttgaaaaaagaatccaaaggccctattgtgcctttaaatgtagctgaccaaaagcttcttgaagctagtacacagtttcagaaaaaacaaggaaagaatactattgatgtctggtggctttttgatgatggaggtttgaccttattgataccttaccttctgacgaccaagaaaaaatggaaagactgtaagatcagagtattcattggtggaaagataaacagaatagaccatgaccggagagcgatggctactttgcttagcaagttccggatagacttttctgatatcatggttctaggagatatcaataccaaaccaaagaaagaaaatattatagcttttgaggaaatcattgagccatacagacttcatgaagatgataaagagcaagatattgcagataaaatgaaagaagatgaaccatggcgaataacagataatgagcttgaactttataagaccaagacataccggcagatcaggttaaatgagttattaaaggaacattcaagcacagctaatattattgtcatgagtctcccagttgcacgaaaaggtgctgtgtctagtgctctctacatggcatggttagaagctctatctaaggacctaccaccaatcctcctagttcgtgggaatcatcagagtgtccttaccttctattcataaatgttctatacagtggacagccctccagaatggtacttcagtgcctagtgtagtaacctgaaatcttcaatgacacattaacatcacaatggcgaatggtgacttttctttcacgatttcattaatttgaaagcacacaggaaagcttgctccattgataacgtgtatggagacttcggttttagtcaattccatatctcaatcttaatggtgattcttctctgttgaactgaagtttgtgagagtagttttcctttgctacttgaatagcaataaaagcgtgttaactttttgg

SEQ ID NO: 1042 - DNA, 3147 bp, Homo sapiens
gtcgcgccattttgccggggtttgaatgtgaggcggagcggcggcaggagcggatagtgccagctacggtccgcggctggggttccctcctccgtttctgtatccccacgagatcctatagcaatggaactcagcgatgcaaatctgcaaacactaacagaatatttaaagaaaacacttgatcctgatcctgccatccgacgtccagctgagaaatttcttgaatctgttgaaggaaatcagaattatccactgttgcttttgacattactggagaagtcccaggataatgttatcaaagtatgtgcttcagtaacattcaaaaactatattaaaaggaactggagaattgttgaagatgaaccaaacaaaatttgtgaagccgatcgagtggccattaaagccaacatagtgcacttgatgcttagcagcccagagcaaattcagaagcagttaagtgatgcaattagcattattggcagagaagattttccacagaaatggcctgacttgctgacagaaatggtgaatcgctttcagagtggagatttccatgttattaatggagtcctccgtacagcacattcattatttaaaagataccgtcatgaatttaagtcaaacgagttatggactgaaattaagcttgttctggatgcctttgctttgcctttgactaatctttttaaggccactattgaactctgcagtacccatgcaaatgatgcctctgccctgaggattctgttttcttccctgatcctgatctcaaaattgttctatagtttaaactttcaggatctccctgaattttgggaaggtaatatggaaacttggatgaataatttccatactctcttaacattggataataagcttttacaaactgatgatgaagaggaagccggcttattggagctcttaaaatcccagatttgtgataatgccgcactctatgcacaaaagtacgatgaagaattccagcgatacctgcctcgttttgttacagccatctggaatttactagttacaacgggtcaagaggttaaatatgatttgttggtaagtaatgcaattcaatttctggcttcagtttgtgagagacctcattataagaatctatttgaggaccagaacacgctgacaagtatctgtgaaaaggttattgtgcctaacatggaatttagagctgctgatgaagaagcatttgaagataattctgaggagtacataaggagagatttggaaggatctgatattgatactagacgcagggctgcttgtgatctggtacgaggattatgcaagttttttgagggacctgtgacaggaatcttctctggttatgttaattccatgctgcaggaatacgcaaaaaatccatctgtcaactggaaacacaaagatgcagccatctacctagtgacatctttggcatcaaaagcccaaacacagaagcatggaattacacaagcaaatgaacttgtaaacctaactgagttctttgtgaatcacatcctccctgatttaaaatcagctaatgtgaatgaatttcctgtccttaaagctgacggtatcaaatatattatgatttttagaaatcaagtgccaaaagaacatcttttagtctcgattcctctcttgattaatcatcttcaagctggaagtattgttgttcatacttacgcagctcatgctcttgaacggctctttactatgcgagggcctaacaatgccactctctttacagctgcagaaatcgcaccgtttgttgagattctgctaacaaaccttttcaaagctctcacacttcctggctcttcagaaaatgaatatattatgaaagctatcatgagaagtttttctctcctacaagaagccataatcccctacatccctactctcatcactcagcttacacagaagctattagctgttagtaagaacccaagcaaacctcactttaatcactacatgtttgaagcaatatgtttatccataagaataacttgcaaagctaaccctgctgctgttgtaaattttgaggaggctttgtttttggtgtttactgaaatcttacaaaatgatgtgcaagaatttattccatacgtctttcaagtgatgtctttgcttctggaaacacacaaaaatgacatcccgtcttcctatatggccttatttcctcatctccttcagccagtgctttgggaaagaacaggaaatattcctgctctagtgaggcttcttcaagcattcttagaacgcggttcaaacacaatagcaagtgctgcagctgacaaaattcctgggttactaggtgtctttcagaagctgattgcatccaaagcaaatgaccaccaaggtttttatcttctaaacagtataatagagcacatgcctcctgaatcagttgaccaatataggaaacaaatcttcattctgctattccagagacttcagaattccaaaacaaccaagtttatcaagagttttttagtctttattaatttgtattgcataaaatatggggcactagcactacaagaaatatttgatggtatacaaccaaaaatgtttggaatggttttggaaaaaattattattcctgaaattcagaaggtatctggaaatgtagagaaaaagatctgtgcggttggcataaccaacttactaacagaatgtcccccaatgatggacactgagtataccaaactgtggactccattattacagtctttgattggtctttttgagttacccgaagatgataccattcctgatgaggaacattttattgacatagaagatacaccaggatatcagactgccttctcacagttggcatttgctgggaaaaaagagcatgatcctgtaggtcaaatggtgaataaccccaaaattcacctggcacagtcacttcacatgttgtctaccgcctgtccaggaagggttccatcaatggtgagcaccagcctgaatgcagaagcgctccagtatctccaagggtaccttcaggcagccagtgtgacactgctttaaactgcatttttctaatgggctaaacccagatggtttcctaggaaatcacaggcttctgagcacagctgcattaaaacaaaggaagttttccttttgaacttgtcacga

SEQ ID NO: 1043 - DNA, 4233 bp, Homo sapiens
  misc_feature (1)..(4233): n=a,t,g or c
ccctcctcccagtcgaagcacctcctgtccgcccctcagcgcatgggtggcggtcacgtgcccagaacgtccggcgttcgccccgccctcccagtttccgcgcgcctctttggcagctggtcacatggtgagggtgggggtgagggggcctctctagcttgcggcctgtgtctatggtcgggccctctgcgtccagctgctccggaccgagctcgggtgtatggggccgtaggaaccggctccggggccccgataacgggccgcccccacagcaccccgggctggcgtgaggtaagtgcagtcccttcccaggaatgagaaccagtgcccgcccccctcacagctttccacgcgttcgtttcgcgagctggttatggaagggtcgctcaagggcgggaagtggggcctttgtggtcatgggaaagtataattttagggactgaggtgtaggatcttcgatgcaaggcatgtgtcatgtgtgatctttgtgcggggcgcgattgtcccaaaggaaaaagcgttttctattgcagggcctcacgtggctggaggggttggtattgagtcattgtgttatctctggggccggccccaaggaagactgggagcgggggatgggatgctggtggtgttctttgcgctttttttttgggagtccctttgttgctgcaggtcataccatcctaactctgtaagcgacttttggtgataggagtctgtgattgtagggtctcccttgatctgagaatggctacctctcgatatgagccagtggctgaaattggtgtcggtgcctatgggacagtgtacaaggcccgtgatccccacagtggccactttgtggccctcaagagtgtgagagtccccaatggaggaggaggtggaggaggccttcccatcagcacagttcgtgaggtggctttactgaggcgactggaggcttttgagcatcccaatgttgtccggtgagaaggtggtggagggttgggcgtggggagtaaagggaaaagacagcctataggtggggtgtgatgatctgtagagaagtggggaccctgaggaaataatgagaggccatgttgggttaaaggggattgaaaagtgagcatttactctggtcaggctgatggacgtctgtgccacatcccgaactgaccgggagatcaaggtaaccctggtgtttgagcatgtagaccaggacctaaggacatatctggacaaggcacccccaccaggcttgccagccgaaacgatcaaggtgagtggggttggtaggcattgagaggtggattgggacctttgtagtagaaccttctgggatttcaggtatggtgcctagtttccagtgcatctgtacctccccctttgaaactaggatctgatgcgccagtttctaagaggcctagatttccttcatgccaattgcatcgttcaccgagatctgaagccagagaacattctggtgacaagtggtggaacagtcaagctggctgactttggcctggccagaatctacagctaccagatggcacttacacccgtggtcagtagaaagatggtaccaaaatgggttctggttgggaataggagagtgattgcccgtagcaattgagaagtcatgtgcttcatgtgttcagtcaagcaagttgtgtttcatggtaacccatggggtccccatccattcttcctattccctttaggttgttacactctggtaccgagctcccgaagttcttctgcagtccacatatgcaacacctgtggacatgtggagtgttggctgtatctttgcagagatgtttcgtcgaaagtatgggacccacataccctggactaccttgaattccccaaatcgcttgttcataaaccacatccataccttgcccattctttttttttgagaccagggcttgctgtgttgcccaggctggattgcaatggcatgatcacagctcactgcagcttcaacctcctgggctcaagtgatcctcccatctcagcttcccaactagctgacactacaggcacgcacctccatgcttggctagtttgttaatatttttatagagatggggtctcagtatattgcccaggctggtcttgaactcttgcactcaagcaatcctcccacccctacctcccaaagtagcataagctactgcatctggccccattcttttacttgcgtactactaacttgcccatagcagaaagctctgaaatgttctggaattaggaacttcatatccctttattctctttattttttatttatttatttatttatttatttatttattgagataaggtttcactctgnnacccaggctggagtncagtggcccaattanagctcactgtancctctacctcctgggctaaagmaatcctcccatctcagccccttgagtanctgagactaaaggtgcacgccaccatgactggctttttttttttttagatggagtcttgctctgtcgccaggctggagtgcagtagtgcgatctctgctcactgcaacctccacctcccagattcaagcaattctcttgactcagcctcccaagtagctgggaccacaggtgcacgccaccatgctcagctaatttttgtacttttagtaatgacaggtttcaccatgttggccaggatggtctcgatctcttgacctcatgatccacccacatcagactcccaaagtgctaggattacaggcgtgagcnnnngcacctggcatttctttttttttaaaaaaagagacaaggtcttgcttgcccaggctgatctagaactcctgggctcaagcagtcctctcacctcagcatcccaaagtgctggaattgttggcctttattccctatacttcctattttgagccactaagcagtaaccattcaactaagatatctttgaaaatgactgctaccttatatcccttctcaccttaggcctctcttctgtggaaactctgaagccgaccagttgggcaaaatctttgagtaagtgaccaacatgggagaaaaagattttctattctgagtcctctttctgctgaacccaggatggcaactggctctgccatggggatgggaactggaggaccctcctgaccagagttctcctgtcccccacagcctgattgggctgcctccagaggatgactggcctcgagatgtatccctgccccgtggagcctttccccccagagggccccgcccagtgcagtcggtggtacctgagatggaggagtcgggagcacagctgctgctggtaactggagatggctgtgggcacagggaaagaaatagagactggggaaagaaatagagcagtatgcagggccctggccactgtggttaatgaaacttggttggtagatggtctgtagtttttattacagctgcaaatagccacccacagagaaggatatagaagagaacccatcctggctgggcacggtggctcacgcctgtaatcccagcactttgggaggccaaggtgggcgtatcacctgaggtcaggagttcgagaccagcctggccaacatggtgaaacctcgtctctactaaaagtacaaaaataagccgggggtggtggcacacgcctgtaatctcagctacttgggaggctgagataggagaatcacttcaactcaggaggcggaggttgcagtgagctgagatcataccattggcactccagcctgggtgatagagcgagactccgtctncaaaaaaaaaaaaaaagaaaaaagaagaaagctcatcccaggtattgttgtgggtggcagaagctgttttcttcatggttttctgacctttgcctctcccctcaggaaatgctgacttttaacccacacaagcgaatctctgcctttcgagctctgcagcactcttatctacataaggatgaaggtaatccggagtgagcaatggagtggctgccatggaaggaagaaaagctgccatttcccttctggacactgagagggcaatctttgcctttatctctgaggctatggagggtcctcctccatctttctacagagattactttgctgccttaatgacattcccctcccacctctccttttgaggcttctccttctccttcccatttctctacactaaggggtatgttccctcttgtccctttccctacctttatatttggggtccttttttatacaggaaaaacaaaaccaaaagaaawaatggcccttttttttttttt

SEQ ID NO: 1044 - DNA, 783 bp, Homo sapiens
ggcacgagcgagttcctgtctctctgccaacgccgcccggatggcttcccaaaaccgcgacccagccgccactagcgtcgccgccgcccgtaaaggagctgagccgagcgggggcgccgcccggggtccggtgggcaaaaggctacagcaggagctgatgaccctcatgatgtctggcgataaagggatttctgccttccctgaatcagacaaccttttcaaatgggtagggaccatccatggagcagctggaacagtatatgaagacctgaggtataagctctcgctagagttccccagtggctacccttacaatgcgcccacagtgaagttcctcacgccctgctatcaccccaacgtggacacccagggtaacatatgcctggacatcctgaaggaaaagtggtctgccctgtatgatgtcaggaccattctgctctccatccagagccttctaggagaacccaacattgatagtcccttgaacacacatgctgccgagctctggaaaaaccccacagcttttaagaagtacctgcaagaaacctactcaaagcaggtcaccagccaggagccctgacccaggctgcccagcctgtccttgtgtcgtctttttaatttttccttagatggtctgtcctttttgtgatttctgtataggactctttatcttgagctgtggtatttttgttttgtttttgtcttttaaattaagcctcggttgagcccttgtatattaaataaatgcatttttgtccttttttaaaaaaaaaaaaaaaaaaa

SEQ ID NO: 1045 - DNA, 518 bp, Homo sapiens
  misc_feature (1)..(518): n=a,t,g or c
cttgggatgacatggccactgttttcagtattttaccagtacctggagcaatcaaagtatcgtgttatgaacaaagatcaatggtacaatgtattagaattcagcagaacagtccatgctgatcttagtaactatgatgaagatggtgcttggcctgttcttcttgatgaatttgttgagtggcaaaaagtccgtcagacatcatagcaagaactatgtgaagaaaatgcaaacctttcaattcccacgtgtatacaagctaatgtgatgagggggaaaaaaatccaacgggtgcattttcattcatatgaaagacttctcatagtacttttttttcatttttttaaaggaggttttcttgttacatgtgatgggcattgagccacacctcttcttagactgaatattgaagtttttgttttgagttatgtttataacatttattncagaccaataaagatccagatttgtgccaaaggcaaaaaaaaaaaaaaaaaaattgcggcgnaagccttatn

SEQ ID NO: 1046 - DNA, 657 bp, Homo sapiens
  misc_feature (1)..(657): n=a,t,g or c
tnnnntatctaggatgtggttctgttcatgctgctttctgcgatgtgcgtgtctgttagaataggctctctacccagctagaacaccttcgcagacacttgctggacagctatcttccacatacttcccagtttacatttggtcttaatgatcttgaatagatcctctcttcattttactcagccaggtttggtactgatgtacaggtgtnaaattacttcaagcatttnggnaagaggtgtatataattcaataaaaaaggtaaaacatgaacggaattcagcttggacttaaccaggntgaacttgnnggggggggtnanncagnntganctngtannggggnnnnnnnnnnnnnnnnnnnnnnnnnnnnnnnnnnnnnnnnnnnnnnnnnnnnnnnnnnnnnnnnnnnnnnnnnnnnnnnnnnnnnnnnnnnnnnnnnnnnnnnnnnnnnnnnnnnnnnnnnnnnnnnnnnnnnnnnncnnnnnnnnnnnnnnnnnnnnnnnnnnnnnnnnnncnnnnnnnnnnnnnnnnnnnnnnnnnnnnnnnnnnnnnnnnnnnnnnnnnnnnnnnnnnnnnnnnnnnnnnnnnnnnnnnnnnnnnnnnnnnnnnnnnnncnnnnnnnnnnncnnnnnnnnnnnnnnnnnnnnnnnnnccc

SEQ ID NO: 1047 - DNA, 416 bp, Homo sapiens
cttggacacgaacaaagccacacttctaactgcttctggcgaactgattttatttttaatttttttcaataaagatattcttagatactgaaagaaatagttaatgagtttgcatttgtgcttgagaaaatttggctcaagtccatttggctgtagtgtcaacgatgtttccagtagtgtttagatttggtgtcttcaaaggtagttgattaaaaccaagtgtgtctttaatatcttgtatcagaataactttgtatgttaccaacttaaattgctagaataaggtaaattgatacacaactgctatttttaatttagaactttgacctaatttgggttttcaaaaccattttggctacttgtattctttatgctgttgtttatttcaataaaaaattcacacctaaaaaaaaaaa

SEQ ID NO: 1048 - DNA, 564 bp, Homo sapiens
  misc_feature (1)..(564): n=a,t,g or c
tgtagattgccagcttgctgatcgttaacaacattggaaaatacagatctgcaggagcatgtacagctgcagcattcctgaaagaattcgtaactcatcctaagtgggcacatttagacatagcaggcgtgatgaccaacaaagatgaagttccctatctacggaaaggcatgactgggaggcccacaaggactctcattgagttcttacttcgtttcagtcaagacaatgcttagttcagatactcaaaaatgtcttcactctgtcttaaattggacagttgaacttaaaaggtttttgaataaatggatgaaaatcttttaacggagacaaaggatggtatttaaaaatgtagaacacaatngaaatttgtatgccttgatttttttttcatttcacacaaagatttataaaggtaaagttaatatcttacttgataaggatttttaagatactctataaatggnttaaaatttttagaacttcctaatcacttttcagagtatatggttttccattgagaagccaaantggtacncagattggtgagccagggaancatgg

SEQ ID NO: 1049 - DNA, 470 bp, Homo sapiens
cgaaaaaaggaacaaagcgttactgaaaagaaggtaacctttgttggatgtgggccttagctccaggtccagactactactctatgttctccagaagggtgctaagtcacctactgaagagagaaccaactgactttcctattgactcatcaggaaccagtcctcagtctggtcaagttgtttcttatttgtgagcagttcaggctatctcctgatggggatgaggccaaggctttcttatcttttggttgtctctgcttaatggaggagcctggcctaggatggaggcctggcttagatctttcattccacctcaggaatgaggttgtgatctttcctgtcctgaccctctctgaattatgtttcaatagtactcttgattgtctgccatgttgttgaagcaaatgaattatttttaaatgttaagtaagtaaataaaccttagcccgtcaaaaaaaaaaaaaaaaaaa

SEQ ID NO: 1050 - DNA, 459 bp, Homo sapiens
ttttttattatgtaaatgcctttatttgaactactacattgctaccagattacatcacttttcagagttagagtaacataataccttggaaactatagcaaacagcttgacaaagcaagagtacattaattcctacatatatacttttatttttagtgaccacatttctttgtttcaggtgtaaaattaaaaaatatattgtacacttagcatacttggcctaccaaatcccgtctaagttctgagcacactctctcctcaaaagtatcatattcaacagcattttaaatttagagagagagtttgatgatacaggttttaaaacaaataagcatgtattgaaccaagtgatttaagacaaaatatttcaattgtttacagcttgggtatgagagggaagatgcaaatttaaggtacatttttcctctagctacgatggtatgttttacttacctggat

SEQ ID NO: 1051 - DNA, 304 bp, Homo sapiens
  misc_feature (1)..(304): n=a,t,g or c
cacttatagccaatatttaataatcccatattaactgatgtgtaaaaaatgtctttatgatctgttaccacccaaaagaatgcatcataactttcaagantatgttctttgacttctaacctctgctcttctttagaattacctttgctgcggccagtacatgctccttgttaatgactctacatttactcgcacaagcgtttgtcctggactcttctgctaatcgatgaacaaacagtaaacagttcagatggaccaataagtcaccacttttctccagaccgaagttggagggcttctttcc

SEQ ID NO: 1052 - DNA, 1295 bp, Homo sapiens
caatgaagctgaggaacccagaactgcatctgggctgcgcgcttgcgcttcgcttcctggccctcgtttcctgggacatccctggggctagagcactggacaatggattggcaaggacgtctaccatgggctggctgcactgggagcgcttcatgtgcaaccttgactgccaggaagagccagattcctgcatcagtgagaagctcttcatggagatggcagagctcatggtctcagaaggctggaaggatgcaggttatgagtacctctgcattgatgactgttggatggctccccaaagagattcagaaggcagacttcaggcagaccctcagcgctttcctcatgggattcgccagctagctaattatgttcacagcaaaggactgaagctagggatttatgcagatgttggaaataaaacctgcgcaggcttccctgggagttttggatactacgacattgatgcccagacctttgctgactggggagtagatctgctaaaatttgatggttgttactgtgacagtttggaaaatttggcagatggttataagcacatgtccttggccctgaataggactggcagaagcattgtgtactcctgtgagtggcctctttatatgtggccctttcaaaagcccaattatacagaaatccgacagtactgcaatcactggcgaaattttgctgacattgatgattcctggaaaagtataaagagtatcttggactggacatcttttaaccaggagagaattgttgatgttgctggaccagggggttggaatgacccagatatgttagtgattggcaactttggcctcagctggaatcagcaagtaactcagatggccctctgggctatcatggctgctcctttattcatgtctaatgacctccgacacatcagccctcaagccaaagctctccttcaggataaggacgtaattgccatcaatcaggaccccttgggcaagcaagggtaccagcttagacagggagacaactttgaagtgtgggaacgacctctctcaggcttagcctgggctgtagctatgataaaccggcaggagattggtggacctcgctcttataccatcgcagttgcttccctgggtaaaggagtggcctgtaatcctgcctgcttcatcacacagctcctccctgtgaaaaggaagctagggttctatgaatggacttcaaggttaagaagtcacataaatcccacaggcactgttttgcttcagctagaaaatacaatgcagatgtcattaaaagacttactttaaaaa

SEQ ID NO: 1053 - DNA, 732 bp, Homo sapiens
tgctgcgaaccacgtgggtcccgggcgcgtttcgggtgctggcggctgcagccggagttcaaacctaagcagctggaaggaaccatggccaactgtgagcgtaccttcattgcgatcaaaccagatggggtccagcggggtcttgtgggagagattatcaagcgttttgagcagaaaggattccgccttgttggtctgaaattcatgcaagcttccgaagatcttctcaaggaacactacgttgacctgaaggaccgtccattctttgccggcctggtgaaatacatgcactcagggccggtagttgccatggtctgggaggggctgaatgtggtgaagacgggccgagtcatgctcggggagaccaaccctgcagactccaagcctgggaccatccgtggagacttctgcatacaagttggcaggaacattatacatggcagtgattctgtggagagtgcagagaaggagatcggcttgtggtttcaccctgaggaactggtagattacacgagctgtgctcagaactggatctatgaatgacaggagggcagaccacattgcttttcacatccatttcccctccttcccatgggcagaggaccaggctgtaggaaatctagttatttacaggaacttcatcataatttggagggaagctcttggagctgtgagttctccctgtacagtgttaccatccccgaccatctgattaaaatgcttcctcccagc

SEQ ID NO: 1054 - DNA, 1895 bp, Homo sapiens; identical to SEQ ID NO: 515

SEQ ID NO: 1055 - DNA, 717 bp, Homo sapiens
agagcgatcatgtcgcacaaacaaatttactattcggacaaatacgacgacgaggagtttgagtatcgacatgtcatgctgcccaaggacatagccaagctggtccctaaaacccatctgatgtctgaatctgaatggaggaatcttggcgttcagcagagtcagggatgggtccattatatgatccatgaaccagaacctcacatcttgctgttccggcgcccactacccaagaaaccaaagaaatgaagctggcaagctacttttcagcctcaagctttacacagctgtccttacttcctaacatctttctgataacattattatgttgccttcttgtttctcactttgatatttaaaagatgttcaatacactgtttgaatgtgctggtaactgctttgcttcttgagtagagccaccaccaccatagcccagccagatgagtgctctgtggacccacagcctaagctgagtgtgaccccagaagccacgatgtgctctgtatccagaacacacttggcagatggaggaagcatctgagtttgagaccatggctgttacagggatcatgtaaacttgctgtttttgttttttctgccgggtgttgtatgtgtggtgacttgcggatttatgtttcagtgtactggaaactttccattttattcaagaaatctgttcatgttaaaagccttgattaaagaggaagtttttataat

SEQ ID NO: 1056 - DNA, 627 bp, Homo sapiens
agtctccggcgagttgttgcctgggctggacgtggttttgtctgctgcgcccgctcttcgcgctctcgtttcattttctgcagcgcgccacgaggatggcccacaagcagatctactactcggacaagtacttcgacgaacactacgagtaccggcatgttatgttacccagagaactttccaaacaagtacctaaaactcatctgatgtctgaagaggagtggaggagacttggtgtccaacagagtctaggctgggttcattacatgattcatgagccagaaccacatattcttctctttagacgacctcttccaaaagatcaacaaaaatgaagtttatctggggatcgtcaaatctttttcaaatttaatgtatatgtgtatataaggtagtattcagtgaatacttgagaaatgtacaaatctttcatccatacctgtgcatgagctgtattcttcacagcaacagagctcagttaaatgcaactgcaagtaggttactgtaagatgtttaagataaaagttcttccagtcagtttttctcttaagtgcctgtttgagtttactgaaacagtttacttttgttcaataaagtttgtatgttgcatttaaaaaaaaaaaaaaa

SEQ ID NO: 1057 - DNA, 2824 bp, Homo sapiens
gcggccgctttcgatttcgctttcccctaaatggctgagcttctcgccagcgcaggatcagcctgttcctgggactttccgagagccccgccctcgttccctcccccagccgccagtaggggaggactcggcggtacccggagcttcaggccccaccggggcgcggagagtcccagacccggccgggaccgggacggcgtccgagtgccaatggctagctctaggtgtcccgctccccgcgggtgccgctgcctccccggagcttctctcgcatggctggggacagtactgctacttctcgccgactgggtgctgctccggaccgcgctgccccgcatattctccctgctggtgcccaccgcgctgccactgctccgggtctgggcggtgggcctgagccgctgggccgtgctctggctgggggcctgcggggtcctcagggcaacggttggctccaagagcgaaaacgcaggtgcccagggctggctggctgctttgaagccattagctgcggcactgggcttggccctgccgggacttgccttgttccgagagctgatctcatggggagcccccgggtccgcggatagcaccaggctactgcactggggaagtcaccctaccgccttcgttgtcagttatgcagcggcactgcccgcagcagccctgtggcacaaactcgggagcctctgggtgcccggcggtcagggcggctctggaaaccctgtgcgtcggcttctaggctgcctgggctcggagacgcgccgcctctcgctgttcctggtcctggtggtcctctcctctcttggggagatggccattccattctttacgggccgcctcactgactggattctacaagatggctcagccgataccttcactcgaaacttaactctcatgtccattctcaccatagccagtgcagtgctggagttcgtgggtgacgggatctataacaacaccatgggccacgtgcacagccacttgcagggagaggtgtttggggctgtcctgcgccaggagacggagtttttccaacagaaccagacaggtaacatcatgtctcgggtaacagaggacacgtccaccctgagtgattctctgagtgagaatctgagcttatttctgtggtacctggtgcgaggcctatgtctcttggggatcatgctctggggatcagtgtccctcaccatggtcaccctgatcaccctgcctctgcttttccttctgcccaagaaggtgggaaaatggtaccagttgctggaagtgcaggtgcgggaatctctggcaaagtccagccaggtggccattgaggctctgtcggccatgcctacagttcgaagctttgccaacgaggagggcgaagcccagaagtttagggaaaagctgcaagaaataaagacactcaaccagaaggaggctgtggcctatgcagtcaactcctggaccactagtatttcaggtatgctgctgaaagtgggaatcctctacattggtgggcagctggtgaccagtggggctgtaagcagtgggaaccttgtcacatttgttctctaccagatgcagttcacccaggctgtggaggtactgctctccatctaccccagagtacagaaggctgtgggctcctcagagaaaatatttgagtacctggaccgcacccctcgctgcccacccagtggtctgttgactcccttacacttggagggccttgtccagttccaagatgtctcctttgcctacccaaaccgcccagatgtcttagtgctacaggggctgacattcaccctacgccctggcgaggtgacggcgctggtgggacccaatgggtctgggaagagcacagtggctgccctgctgcagaatctgtaccagcccaccgggggacagctgctgttggatgggaagccccttccccaatatgagcaccgctacctgcacaggcaggtggctgcagtgggacaagagccacaggtatttggaagaagtcttcaagaaaatattgcctatggcctgacccagaagccaactatggaggaaatcacagctgctgcagtaaagtctggggcccatagtttcatctctggactccctcagggctatgacacagaggtagacgaggctgggagccagctgtcagggggtcagcgacaggcagtggcgttggcccgagcattgatccggaaaccgtgtgtacttatcctggatgatgccaccagtgccctggatgcaaacagccagttacaggtggagcagctcctgtacgaaagccctgagcggtactcccgctcagtgcttctcatcacccagcacctcagcctggtggagcaggctgaccacatcctctttctggaaggaggcgctatccgggaggggggaacccaccagcagctcatggagaaaaaggggtgctactgggccatggtgcaggctcctgcagatgctccagaatgaaagccttctcagacctgcgcactccatctccctcccttttcttctctctgtggtggagaaccacagctgcagagtagcagctgcctccaggatgagttacttgaaatttgccttgagtgtgttacctcctttccaagctcctcgtgataatgcagacttcctggagtacaaacacaggatttgtaattcctactgtaacggagtttagagccagggctgatgctttggtgtggccagcactctgaaactgagaaatgttcagaatgtacggaaagatgatcagctattttcaacataactgaaggcatatgctggcccataaacaccctgtaggttcttgatatttataataaaattggtgttttgt

SEQ ID NO: 1058 - DNA, 439 bp, Homo sapiens
ggtgggtctgaatctagcaccatgacggaactagagacagccatgggcatgatcatagacgtcttttcccgatattcgggcagcgagggcagcacgcagaccctgaccaagggggagctcaaggtgctgatggagaaggagctaccaggcttcctgcagagtggaaaagacaaggatgccgtggataaattgctcaaggacctggacgccaatggagatgcccaggtggacttcagtgagttcatcgtgttcgtggctgcaatcacgtctgcctgtcacaagtactttgagaaggcaggactcaaatgatgccctggagatgtcacagattcctgcagagccatggtcccaggcttcccaaaagtgtttgttggcaattattcccctaggctgagcctgctcatgtacctctgattaataaatgcttatgaaaaaaaaa

SEQ ID NO: 1059 - DNA, 6004 bp, Homo sapiens
  misc_feature (1)..(6004): n=a,t,g or c
aagcttgggaaactgggcaactttttctttatttttgtttttatttattattattttggagatggagtttagctctttcgccccaggctacagtgaagtggcttgatcttggcctcactgcagcctctgcccatcccggttcaagtgattctctgccctcagcctcccgagtagctgggattataggtgcctgccacatgcccggctaatttttttgtatttttagtagagaggagtttctccatgttggtcaggctggttttgaactcctgacctcaggtgatccacctgtcttggcctcccaaagtactaagattacaggtgtgagccaccgtgcctggccaacttattttttttctgagttcagtcttctagactatcggttaatacttttgaagttttgtcagttaccagaatatcagatatattcatatgcaaccagtggttttggtatgctgccattttgttaatctgtaccacattccacatttgtgcttataaggatgcatatcctattttaaacccgtagaataagagaagtgagattttgacccagttgatttagttgatgtgactaatctagaattatattctgtattactacagaataaaaggattacagctccttaaagtatacccttagttcagtcgtagagaaaactgcccatcaagacaggaagagctgggctgccttggagaagaacaatgactttattcccaaatggaggcgtagaagaaggagggtagaagtcaaaggaaatttctattcagggaaaagaaaaagctaacagaaagatgtatttttctttccttaacaagatagtaaacgtgagagtgggaatcctctaattctattcagggaaaagaaaaagctaacagagaaagtagtatttctttcctaacaaagatagtacagtgagtggggaaatccctctaacacgattcattaaaaaatgtgaactacgcagctggaggccattatcctaagcgaattaacccaggaacagaaaaccaaatagcccacatgtctcacttgcaagtggaagctaaacatggagtacttatggatataaaaatggcagcaacagacactgaggacagagcgggagggagaagaggggggttgaaactgttgtatacatgctcgctaccttggtgatggctacaattgcaccagacctcagctacatatgaaccgtgtacaactgtgctgtaccttgattaataattgaccggccannnnnnnnnnnnnnnnnnnnnnnnnnnnnnnnnnnnnnnnnaaatccgctgctcgggagctaggcaggagaaatgctgacctgggagggcagaggttgcagtgacccgagatcatggcattgcaactccgccctggggccaccaagagtgaaactccgtcttcaaaagggcaaaaaaacgaaaaaaaaaaaaaaaaaaaaaaaaaaaaagttgaagttataaaaaacaaaaacgtgaattaaaattgtgaaacttagatccaggtgtcgcattctgatgttgtctaatttcttgggccctatgacaaatatattttaatacatgtaatataacatgttactgataattattgaaactctgttcatttgtgggtgttttttaggattttttttttttaataggggagttgctggaagccatcaaacgtgactttggttcctttgacaagtttaaggagaagctgacggctgcatctgttggtgtccaaggctcaggttggggttggcttggtttcaataaggaacggggacacttacaaattgctgcttgtccaaatcaggatccactgcaaggaacaacaggttagatttaaaaattgtgatttcatttgggagagatgctctactgtaaagcattcaactagaaataaggaaaactaacagtgttttaagaacatgtaataatttgcaaatcttaacagataacacccagagtcttgtgtaagaaaaatgttttagaagtctgatatttcataaaattaagtacacgtaattttataggtacattaacaaacatgtttatttttatttattttttttgagacagactctactgttggcccccaggctggagtgcagtggtgcgatctcggnnnnnnnnnnnnnnnnnnnnnnnnnngttaattttcccagtctattttattgttagtatttgtcacattttctttgtaaacagtgaattaaaatattttataggtattcattcttatctagatttcctacttatataaaaaaacaagtgaatgagattgttacaaagggtaattttgtgtgagtagaataataaaagttgaaattgagaagatgcaatgttttagactgaaactgtggttggtttgttttccccttctttctaacaggccttattccactgctgggaattgatgtgtgggagcacgcttactaccttcagtataaaaatgtcaggcctgattatctaaaagctatttggaatgtaatcaactgggagaatgtaactgaaagatacatggcttgcaaaaagtaaaccacgatcgttatgctgagtatgttaagctgctctttatgactgtttttgtagtggtatagagtactgcagaatacagtaagctgctctattgtagcatttcttgatgttgcttagtcacttatttcataaaccaacttaatgttctgaataatttcttactaaacattttgttattgggcaagtgattgaaaatagtaaatgctttggtggattgaatctgattgggacatttcttcagagagctaaattacaattgcatttataaaaccatcaaaaatattccatccatatacttntggggacttgtagggatgcctttctagtcctatttattgagttatagaaaatctagtcttttgccccagttacttaaaaataaaatattaacactttcccaagggaaacactcggcttttctatagaaaattgcactttttgtcataatcctctgcagtgatacttctggtagatgtcacccagtggtttttgttaggtcaatgttcctgtatatagtttttgcaaatagagctgtatactgtttaaatgtagcaggtgaactgaactggggtttgcctcacctgcacagtaaaggcaaacttcaacagcaaaactgcaaaaaggtggtttttgcagtaggagaaaggaggatgtttatttgcagggcgccaagcaaggagaattgggcagctcatgcttgagcccaatctccatgatgcctacaagctagagtatttaaaggcagtggtaaatttcaggaaagcagaagttaaaggcaaaattgtaaatcagtcgagatcgggtgccttcagggtggtatggctagtataccaaaattgtaaatcactacatgaagcttatatattggtttggcctgaaaggtgaagtgggtaggcagggggcgggcttacaggttatggtggattcaaagactccctgatttgtgattggttaaggaagcaagctttgtctaaaaacttggggtccgcagaaaggaacattaaggtctggccaggcccctcaggaaagaaactgagagcaaagaatggaggtcagatttagtccctggtgttcccccttatctgacgtctgtgtgaatccatttggtgggggtctgggtttctgaaaagtagctcaggggcacgtgttaaggatgtctctaggtgactctaacttccctggctattgtttgaaactgttatgaccttcttgcttatcagcttgctggtttccttctcggggcgagctgggtgcctggagttttcggtgaaggaaactcaagattctcctttatttctgtgcttgtgggaatccccctgctcccaaagaggggtccctgactccgtctcacagggatctttttgtatatttggcttagcatcatacatttgccatgttgtttcatcatcttgcctaatttactgtttttgaatatttcatttgtttctaattgttactacagataatgctggggtgagcaactctgtgtacataggtttatctcctattggaatattttctttatataggcgttttttttttttctttttttttggagacagagcttgctctgttgcccaggctggagtgcaggtggccgcgacctggagctccactgcaacctccacttcccgggtccaagtgatgtcccaacctcagcctcctgaatagctgggattataggtgcatgctaccatgcctggctactttttgtatttttagcagagacagggtttcaccatgttggccagggtggtctcgaactcctgacctcaagtgatccgtctggctcagcctcccaaagtgctgggattacaggtgtgagccactgcacctggcctatataggcttttttcttaaacctatttagtaatgttttccaagtttcccaagttattttttattttaattttccccagttatttttctatttttttttcatggaaaaatggggtaacttagcagtttcaatattgaagactgaagtttaaaaaaatttaaattcaaggtacttttaaaattcagttagaaaagtaggctttaaaaattattagagacaagagtaccaaagcggtgtgtgtatgtgtgtgtgtgtatgcatgcttgtggattggaaaaactttggagactgattacttttcattatatatgtgtcacagtgaaacagcttttatgtgtcatgtaagattactgcttgcctctctaaggaaggtcgtgactgtttaaatagacgggcaaggtggaaccttttgaaagatgagcttttgaatataagttgtctgctagatcatggtttgtattgaactaacaaggtttgcagatctgctgacttatataaagctttttgattcctactaagctttaagatttaaaaaatgttcaatgttgaaatttctgtggggctctatttttgctttggctttctggtgagagagtgaggaagcattctttccttcactaagttttgtctttcttgtcttctggatagattgaattttaagagactaagggaatttacaaactaaggaatttagtcatctggtggaaaaggagactttaagattgttagggctgggcggggtgactcacatctgttaatcccctttgggcggccaaggcggcagaacacttgaaggagttcaagaccagcgtggccaacgtggtgaaaccctgtctctactaaaaaatacaaaattgtttagctctgtttttcataatagaaatagaaaaggtaaaattgcttttcttctgaaaagaacaagtattgttcatccaagaagggtttttgtgactgaatcagcagtgcctgcccatgtcatagctgtgcttcaaaaacctcagcatgattagttgtttggagcaaacaaggaagcaaagcaatacgtttttgaaattctatctgttgcttgactatattgtaataattaacattgaagttgagaaattcacaactttaattgtacacttcattgcaacttgaaattcatggtcttaaagtgagatttgaatttctattgagcgcctttaaaaaagtaataccaaaccataaagttaaaatctatgtatattgagtcatatctaaaaccacgtataaacataaattgtatttcctgttttaattccaggggaagtactgtttgggaaagctattattaggtaaatgttttacaaattactgtttctcactttcagtcaataccctaatgatcccagcaagataatgtcctgtcttctaagaggtgcatcaagcctggtacatactgaaaaccctataaggtcctggataatttttgtttgattattcattgaagaaacatttattttccaattgtgtgagtttttgactgttaataaaagaatctgtcaaccatcaaagaggtctgcattatgcttgcatgtcaaaaacattaaaaatcctataaatctactgtcattttcactgaagtttccaagggaaaggaattgtaattttgggctgttg

SEQ ID NO: 1060 - DNA, 66109 bp, Homo sapiens
  misc_feature (1)..(66109): n=a,t,g or c
tcgacgggatcacgaggtcaggagatcgagaccatcctgactaccacggtgaaaccccgtctctactaaaaaaaatacaaaaaactagccaggcatggtggcgggcgcctgtagttccagctactcgggaggctgaggagggagaatggcgtgaacccgggaggcggagcttgcagtgagccgagattgtgccactgcactccagcctgggcgacagagcgagactccgtctcaaaaaaaaaaaaaaaaaaaaaaaaaaaaaaaaaaaaaaagaaaaggattgtaagagttactgttacattttctggcctactacctttaaaattcctgttgcatttctttgtatttacaaggaaaagactgaactttttctcatcaaaactagcttttttctcacaggttaaacttgcaccaatgtctgctctttttttttaatgtttttggtactctgggcagacttcagttttttaaaaaataaagattctaatgcagctatcttggcattccctttaaatacctgtcttaacctcctacttttatttcctactcctttccacacacatgcatacaatcctttaccttttaaagaatcattaagactgtcacacattaggaactctttcgctcactcttctgtcatttgctgcaatattgaaattcttattttgaccatcaatgcctattaattcttctaatacatgaagaaaatgattgagtagcagcagtactataggtgggaaatacagtttaactgctgaatttttatacctctctgatttatagcttgctaattaaattgctattaatagtttgtttggcttaattagacttaagaaaacaacaggttttttttttttgaggtttttttttttttttttgcatgaggagagaattgtatgtaaccagtgatatgattattcctgaatgtacagacagaagtaagcctggacattgtttaatttaaaaactttagtccctgctttaagggaatatgataatgtatactatgacaaatgtactttattcttctaacacagtaagaattacttggaactttttcctgaaactaagtgcaggaaagccctgtgtgtcttggtttagtgatggtttcatttctagccatacaactgatggattgtatacaatttttgttagtgccaaaataatctgttatatgaacagacttctaaaataatttctgtatattatatatgtaagaaggcttttattgaacagcttattttccacttgcaagtttatggaaatatcaatatgtcaaaataaaaagtgggacaattctttgctgttagaagaatgtgcttattattttgatttcttaaatggtacataatcaaagtactgctgaactataggtgcagtattctactaaacatttcagctagtaataccactgatttagaaacaaaactgtttatttttgctttctgaatttagaatgctgggattacctgtttaaatatgttttagggaatatagagattaaatctgtacatacctgtgcacatatattcatgcaccctctgattttggttttctcgtttttgagttcttagaaagtatccacatactcttcttttagtagaagtagctgttttagagagaagaaaaggatgagactttaaatagttgattctttttgtgttttctacaaacttttttgaattttaaatcacaagcaaactaattttctggtttttagaaagtagatgatgatttcagaggagtaagacatgccaaacagcgtgctcggtaggattttaggtagtcaaatgcagctgagaaaaagtattttcaagtcataagttgctaattgatatgctatgaactagtcaaaataggaaccatatgattcatgttagattttcctctagagatggatctgaatgttcagttccagccaaggtagattttactttcaactttttaatcaatatcactttctgtgcttaatctctttggtgttaccttgtccattttcatttgtctaaaattctgcagggatgactacaatttggcataatggtataaatgaattgttaagggtaactttaagttgaagattaaagcaagatgccattttccccatgtctttcattttgtttacattttttccctttaagttagtatacactacacatactacaataaaatataataatatgaaaaaagaatattttagatattctagtccctttgcctttccatgtaaattttagagtaatcctacctataattaacaaatcttgcaaagattttgattggaattgtgttaaacttgtatattggtttggggagaattgacatatttactatattgaatcttccaatccatgaacagtatttctctccacatagatagagactgaatagatcttctttgatatcgttcaccagcattacatagtttttagcttgcaagtcttgcatgttttgttagatttacacataagtgtttcatgtatttgagtaattgtaaataatatatttatatttttgggccaggcgcggtggctcacgcctgtaatcccagcactttgggaggccaaggtgggcggatcacaaggtcaggagatcgagaccatcctggctaacacggtgaaaccccgtctctactaaaaatacaaaaaattagccgggcatggtggtaggcgtctgtagtcccagctactccggaggcaggagaatggcgtgaaccccggaggcggagcttgtggtgagccgagatcgtgccactgcactccagcctgggcgacagagtgagactccgtctcaaaaaaaaaaaaaaaaaaagaaaaaaaaaaaatatatatatatgtatcatttgttcattgtgagtatgtagaaatacaattgatactggtttatcctgtattctgttaatttgctgaaatcacatatctagaagtttttctgtagcttccttgtgattttctacatagacaatcatgtcacttacaaatgggagctgtttatttcttacttcacaatctgtatgcctttaatctcctttttcatgcctattgcactgtctagaacttccaacactgtgaataagagtggtgagagtggacattcttgccttgttcctgattttaggtagaaactattcagtctttcagaatcaagtatgttcaccataggatttttgtagacgatctttatcaagtaaagaaagatctcctctactcctatatttctgagattaaaaaaaaataatgaatgggtgttaaagtgggttaaatactttttcttcatcaattgatatgaacaagtaaattttcctcttcagcctataatatgatggattacattaattaattgtgaatatccaaccagctttgcatccctgggataactctcacgtggtcattgtatataattctttttatatgttggtaaattccacttgctaatattttgttaaagattgctgcatcatgaggaatattagtctacagttttcttttcttcccattgtcattgtttggttttggtattgaggtaattctagctttataaaataaactgggaaatgcttcctctgcttctattttctggaagagattaattggtgttaattcttctttaaatctttggtagaattcttcattgaaactatttgttcctaaatatttccttttgtgagtttttaaattatgaattcaatttcctcaataggtgtagacatttttgaattattttatatttagtgagttgtggcactttatattttttgagaaaatgatccatttaatttaagtgtcaaatttatgtgtgtagaattgttcatagtattcttttgttatccttttgatgtctgtagaatctttgatgatatcccatttcatttctgatgttggtagcttctatcttctgtcgtctttttttctgagtcttgctagtggtttgccaattttattaatctttcaaagagccagctctttgcttcattgatttttttttgcttttgtttttctgttttcagtttcattgttctgcttgctttttattttgttattcttttactagattcttgaggtgagagtttagattattggtttgagacttttcctcttttccaatgtatgcagttagtgctttaaatttacttctcaaatgcaaatcaaaaccacaatgaaatgccatctcacgccagtcagaatggtgattattaaaactcaagaaacaacagatgctgacaaggttgtggagaaatagaaatgcttttacattgttgatggaatgtaaattagttcaaccattgtggaagacagtgtggcaattcctcaaagatctagaaccagaaataccatttgacccagcaatcccattactgagtatatacccaaaggaatacaaatcattctattataaagatacatgcacttgtatgttcattgcagtactattcacaatagcaaagacatggaatcaacccaactgcccatcaatgacagactggataaggaaaatgtacatatgcaccatggaatactatacagccataaaaaggaatgagatcctgttatttgcagagacatggatgaagctggaagccattatcctcatcaaactaatgcaggaacagaaaaccaaacaccacatgttctcacttataagtgggagctgaacaatgagaacacaaggacacagggaggggaaaaacacacactggggtctgtctggggcgaggttggagggagggagagcatcaggaaaaatagctaatgcatgcttgtcttaatacctaggtgatgggttgatatgtgcagcaaaccaccatggcacatgtttacctatgtaacaaacctgcacatcctgtacatgtatcctggaacttaaatttacctcttataactactataactgtatcccacaaattctgatatggcatattttcatttttgtttagttgtgtttattgtgtgtatttttaaaaaatttccttgagacttcctccttgacccatgtatttctaagtgtgttgttttgtctccaaatgtttagatattttcctgttgttgatttctggtttggttccattgtggtaggagaacactttctttatgattttatttaaaaaatttgttggtcttttattgtcttagatatggtctatcttggcatatattctgtgggcacttaaaaaaatgttattctggctgggtgcagtggctcatgcctgcaatcccagcactttgggaggctgaggtgggtggatcacctgaggtcaggagtttgagaccagcctgatcaacatggtgaaacctcatctatacaaaaaataaataaataaataaataaataaataaataaataaaaaattagccaggcatggtggtgtgtgcctgtaatctcagctactcaggaggctgaggcaggagaattgcttgaacctgggaggcagaggttgcaatgagccgagattgtgccattgtactccagtgtgggcaataagagtgaaactccatctcaaaaaaaaaaaaaaaaaaagtgtattctgccatggaatactatgcagccataaaaataatgagatcacgtcttttgcagggacatggatggagctggaggccattatccttagcaaactattgcaggtacagaaaaccaaatactgcatgttctcataagtgggggctaaatgatggacacatggacacaaagaggaaaaacacatactggggcctattggagggtggaggttgggaggaggcagagggtcaggaaaaataactaatgggtactagacttaattcctggatgatgaaataatctgtacaacaaacctccatgacactgtttacctatgtaacagacctgcacatgtacccctgaacttaaaataaaaggaaaaaaaagaaaaaagaaaaaggaaaatctcgtggaatctactaaaagcaacgaaaaagaaaataatgtatcttctgttgttgggtggtgtgttctataaatgttgattagatcttatggtttgatgttgtttattcttctatgttttttctcaatttttgtctatttgtttaatcaattgttgagagaaaactattgaagtcttcaactatcattgttgacttgcctattttcttttcagttctatcagtttttgctttacataatttgcagccctgttgtttggtgcatacatatttaagattgctatgtctttttggtagatttacccttttattattacatagtgttcctatccatttctagtaattttctttgttctaagtttatttgatattaatatagcctccctttattattttttgtctgatatatgtttttctatcctttaacttataaaccgcctatatcattatatttgaagtgagtttatcataaacagcaaataattgagtctttttttttttttttttgagacggagtctcgctctgttgcccaggctggagtgcagcggtgtgaagtggtgtgatctcagctcactgcaacctccacctcccgggttcaagagattctcctgcttcagcctcccgagtagctggggctacaggcttgtgccaccacagctggctaatttttgtacctttagtaaagatggagtttcaccatgttagccaggatggtcatctcctgaccttgtgatccacctgccttggcctcccaaagtgttgggattacaggcgtgagccaccgcacctgacagagtcatatttttaaatctattctgccaagctctgtctcttaaaattgatgtatttaggcgatttatatttcctataatattgttatgtccaggcttaagtctgacattttattttctgttttctgtttgttctctctgtttttcatttctttgttttctttttcattgcttcctaaataattttaaaattccattttaatttatctatagctgtgtgtgtgtatgtgtgtgtacctctttggatagctcttttagtggttgttctaggtattacattatatttatgtaacttatttattgtcattaattaccagtctgagtgatgtgtagaaatttcttctctctttgtttaccctccctcatttataattgcctgtaatattttctctatatacatttataaccatatgatacagtattatacgtttttcttcaatcctataatttaaataactcaagagaagaagtaaagtccattttttaacccatattttttcttgccatgttctttcttccttcctgatgttccaactgtcctcaatttaactttttgtttttttagggtagacctgttagtgacaaattctgttagttttccctcatctctgtatgtcttaatttccctggatatttttgctgatatagtgttctaagttgatatttttttttcctttcagcactggaaaaaggtggtgacctccttcgggcttacacagtttctgatgaaaattttgctctgtcatttttttcacctgttagatgtcatttatctcactgctttcaagattctttttatctttaatttttagttaattactatgattttggtgtggctttctttgggtttgtcctatttggggttcactcaccttcttaaatcactaggtttatgtcttctgccaaatttgggaagttttcaaccatatttatttgataatttttttcagcttcactctctttttcctctcattttgggactctgagtacatgaacattaaatcttttgttatagccccatgggtccctgaggctttgtccattttttccagtgtattttctttctttcttttgttcagattaagtgattgctattgctgtgtcttcaaggtagctaattctttcctctgttctctccttctgctgctgagcttatttactgggctttttattttggctattgcacttttcagttctaaaatttccacgttttcttccgtatatatcctatttttatgctgaaacatcctatttttttcttttctgctcttttcttcttctttctttttttaaaccactgaactggacatcctatttttttcattcttttaagtgttaattgctcatcaaagcattttaataatggtggctttaaaatcttcatcaggcttttctttccgttttggcatctattttattgtcttttaaaaattcaatttgagatattcctggttcctgatatgacaaataatttccaattgaaacttggacatttcaggcattatgttataaggctattggtcttatttaaactgttttagctggcttcttttaacacctctccagcaggtaggcaggtgagcttcatgacgccaggtaggggtaggagtccaggcttctcactctgccttcattgacacctcagataggtccccattattactgagtggggacagaaattctggctccctattaggtgcccactaatacctccctggttggttgggagaggagtgccacttactatccctcacatgacctttattgacaccaagatgggacagtggagtggaggagtgagtggtaggtatcagggagtggttgctggattaactctgggtggtgatgaaaatcctgactctccattaggcattgtctgacatcaccctagaggagaggggaagagatgcttcattactgttgggtgaggaatggaagtctaggtttccattgacatttcaggggcttggggaaaggagtacattttcaccaagagggcatgaccatcctgactccctattcactttctctgacaccatcctggtgtgtgtgcatgtgtgtgttgaagtgttgggttccttatgacagcctggtgagggtgaaagtctaggctcctcatttgaccttagctggtgggggtggagtcgcagttttttctgtggtgtttggctggccccattacccaagatggagtgtagtggtgcgatcatagctcactgtaacctcgaactcctgggctcaagtgatcctcctgcctcagccttcagagtatctaggactatgacacatcgaactatgcctgactaattttattattattattcatagagacagggtctcattatgttgcccagggctggtcttgaactcctggcctcaagcgatcctcctgcctggcctccttcccaaaattactttaaatgatataatagctgacagcttgaataggtcctctttattttgttggaggcagagtgttagaagtgacctaacaaaaaggatttgtttcttgtcactagactcattcactgtgtcaatgagtgtgtcagtggtttgtgggaagcaaacttaaatgaaaatgtatatttttaattaaatgttatgagatgctttttttaaactattggctcttgtgaatttcagaaaaatattgcaagtcatttgacttagctacttagcttgcactctatgtaaaaattttagaattttacctctttgaaaaactcctaatatcaatagtgatattgttgttttgcagcctcaaatgattttgttactttggactaattttcactgagctagttaataagtgactttttattgtctaaaaaattcttaagtgtatcatagagagaaagattattgggtcactaagtggctttctatatatatacctttgtccatatttaatttttgcaaaactcaaattaaggtggtaaacttagtgtggatatacattcatgtattgtattgataagattaactacgttttaaaactaaagtggaaagttttaaacaaaattgtcattcaactatatatgtatttctgtaaaacacacacgtaatgatgaattcgaattaataagcaaaaaaggagaggatttgtaatttaaaattgatcttggaatatacactctacacttaagacagagaaaaaactttttctttccctttagcataatctgcccagctagcggtggtttcttatcagaatgctctcacttaataccttgataacttttagtgctttgtgctgatagcatcaagtttttaaattattttaaaaacaaacaacaacaaaaaaccatttgcttctgaaacacctaaagtttcttataattgttaccttctttatgtttattttcaaatgttttattgtcactctggttattgagatatcaaagttataacaattgctcactctcaggtacctatgcacttaagtgaccagtttctctgaaaattcttttttgttgttgccttcttccaacctcataccctgaattcagaatactaacactgtcaagctatttttcacgcccccaaatctttgttttttctcactagacagccactacccatttggccactaggtggcgcaaaaggcttaatttttcaccttcctccgcctactgtgaaggaagctaaaagtaattagatgtgtttggcatgatttttatattttaaattaacgctgtactatcaaaagaactacctgtgtctcaaacccacaatgtggtaaaagctgacaaataaaaaacagtagctcaattttctagattaattttgtccaggttaaaaatattattgatatatgttttagtgaccacataggtttcagtaagggtaaaaggatgctcttgttcgtactccaagtctggcatggtgactgtcaatacattcattttgaagaagattttgcttctgggtttagccctaaaacaggccaaatagagacgataaaatgagtggaactgaattagagcatttctgaaaagttttatttggttaattctgccccttaaggtcagaaattgtgtaggaaaagtgtttcaaaattataaataaggcaaaattgtacgtgcttgattattttatatcacacttgaacctttgctcataattctgcctgatcaaaaccagagtgtttcagggattgtaatttgcctaagacgaacccggccagccctgtgcgattagaggttaatcagcagagagctgataagggatgctggctttctctttttctccggtaaagaagataacaccaaggttatgattttattgccctctagcacgttagccattttgaatctctagcctagaaattatttcctcacagagagatacagctctgtttttcaaatactctttggatcaaggctcttgtattcttgctggttccctctttgagtttgataaaactttgaaaagtctaccaaagaaatttctctcagaactagactttagagaggaaatgctggaactacggatgagaggcacatgtatgtacagggtcagaccacgcagagagcaggtctgatgagccacaccactgctgctgccccatggcttctagacgctgctgttggttctgttgttaggacctggaggttgctgcagccaccactgaagacacctcctaaaccacttctgtttcaggaacttcacttaaaaaaaaaaaaaaaaaaggaaaaaacccaccgcttccccaaaagacagttgcttcttctgtcacctttgccagagaaataaatacagtaaaaggtgctctgcaacccccacaccctggttcctcctgtggcccctttgtaactgaagtcttaggtggatgaatttaattggtggaacttaggtgctctagcttcaaagaaggctaggggaagtgagctttctggtttccactttagggaggcaggactcaaaaggtaggggaaatttcacagtactctaaaggtgttcaaatcccatgggcagccagtaaacatcacaggtgtgaggtgctgggtggagtggctgccgtgaatatgtgttttggttcatggactacatcagtggctcttaaagtccagtaattcacagattcatgagagataataaaatgattatttttgttttaagccattaagtttggagttggtgtgctgcccagcaatagataatggaaacatacagtatgtatttctgcaagtctggcttcttcacttaatattgtttctatgagattcgtccatgttgttacattttcagtagttgatgaagtttcattgtttacatagtactgtgttgcacgaatagactacgttttgtttatccatttactgttgaagaaccattttgttaaacaatttgagagtaatctgtggaaattatgccacttgacccctaaatattttgtcatgtataatttaagaataaggacatttctcctgcaaaaccctaatactgtcatcacccccaagatacttaaaattgataccatattatcaaacacacaatccatattaaaaaatcccctattgtcccagtaacaccttatagtaaatgtctgttattttaagcgggtgtcattcattacatggcaataggtaactaatacggtgagtctgcttcttccagcaaggaccctcagggggtgcggtgattcatagttctcactcagacttctctgtgtctgctcatatgtccctatttcatatctcagggtccggtctatcccaaccaggggtcttgccttatcacaacagctgctgttggatgatgcaacaaacatttctacaacttcataacctttatcataagcccccgggcttgaccctcagccatatctgtgctgggttgcaggagaaaagatagcctttaaaactgctatagaggcatttacagtttttcattcatgtcttgagtttggattaaaggcttttaatttgtctttttttcctttgtatgctcttgagggcagtctgacgcagccagtctctgaaggttggcacaaaagcctccatcgagtcacccagcttttgcctggtacctatcctaacctaaaaccttgccacatgttaccttggcgaaaggccagtgccacacttcagtgatgattcggctgtcctacttggttagaaccgagttcacttccttcctcaacactcctgccacattgatctggaagtttcaccttgagccaagtgatagttaattttatgtgttaacttggctaggctatggtttctagacatttgaataccagtctagatattgcagtgaaggtattttttagatgagatttacatttaaatcaatagattttgggtaaagcagattaccctccataatgtaagtggcccttccaatcagttgaaggtcttaggggcaaagactgaggtcctccaaggaagagggaattctgcctctggaccaccttcagactcaagccgcaacatcagctcttcctgggtctccagcctacctgcagatttcgaccgtgccagctcccacagtagtatgagccaattacttaaaataaatctctctctgccaacatcctattggttctgcttctctggagaatcccgactcatacaagccactttctatagaaggctgtttcttcgagaaatccaccctcttctatgtcaacagagtttagaatctccatactttatctcttcatttttgagaacataaattctgtattacacatacttatactatactatatatgaaactttcataaacattgctgggcaaagttgaatattgctgaaccaatttccgatgcttctgaataagttcaatggagttaaaacatttttcttcttacatggtatgtccagtgccccagagccagcagagttaagaacttggtaaggaagaccaaagataatccatatattctagtttgttatataatataaaacatgtttattagattctaaaagacataaaaagaaaataatacatatgtatcagtgagagaggtgcaaattaggaagagaactaaggattattcttaattcctgccttcctttctaaatcccaatcctcaattgaactctttaattatatttcctgtttattttattgaatggaaaaaatggaaaattatctaacatttgtcatggaaatataggagaaattactctcagagatatgatgttatttaagtcattgacatattgttaacctcagatgcaaatggtggaattaataatattcctcagttcatggtacatagtcactgttggtctagtgctagtttgtagttgtatttgtattttttattttttagaaatacggtcttcctttgtcacccaggctggagtgcagtggtgtgatcacagctcacagtaagctcaaactcctgggctcaagcaatcttcctgccttggcctcccaagtaggtaggactacaggtgcatgccaccatgccagctaattaaaatgttttaaatttatttttggtaaatggggtcttgttatgttgcccatagtttttagtgctatgataagctagtaattatagtgaacattcttgtcttggatacccaaggtttttccgttatgtatactagtggttacagattttttggattataacctttgccaaaataggaaagttttgattcctgcttccttaactgtttttcaaaaatcacaaatggatatactttaccaaatgtcttttattaatagactgagcaaaggaaatgacttttctatgaatatggtaaattatagcaacaatatgttttattatattgaaccaccctagtattccaaggattccctatttgatcttgatgtatcattattagcataatcattattattattgttattattatacatatttttagagacagggccttgctctgttgcacaggccgaaatgcagtggtgcaatcatagcttactgcagcctcaaactcctgggctcaaatgatcttcctgcctcagcctccctagtagctgagactacaggtgctcaccatcacacctggctaattttttaattttttgtagagacaggatctcacaggatctcagtatgttgacaatgctggtcttgaactcctggcctcaggcgatcctcccacctcggcctcccagtattattatttgtaatattgttgaattcggttcataaataattatttttttctcccatctgtgttcaaggtgaaatgggtctattatttttttttccttgagttttccacaactcaatttggagtcaagattacactcggctgataaaattagctaatcaggtttagtttttttctgttttctggaaaaagtatataatatagaagtttcatgttccttgaatgtttgatagaactcatctgtgaaaccatctgggcattttcaaaaatatatttttttattagatgccattgataactttaaaaattgctttaatactcattggtatagtcaagttttgtatttctttttgtgctaattttgatagattaaatgtttctaggaatttgcttatctcacctaggttttcaaatttattagcatatacttgttcataacactctatgctttatatctgtgtcatatctgtagctgttccccctttttcattatgtatttgtttattcattttttctccctttatccataatcggccttgttgtaactctgaatatcttacaaatatttttaagtaagcagcttttggaatcaaaagtatgttaattttcactacctagttttttgttctctatttctgtttcattgctttctattcttatctttataactccttttcttcgtatttctttaggtttgctcaacttctctttttccaaatttttgagtagaatttctaggtcctttattttaacttttcttgttctaataaatgtatttgaaattataatattattttatatgtatattttatgtgtaacatttttaacacctggttctaaaagagttaattttctttataactgctgtttatttatttgacacagggtcccactctattgctgaggctggagtgcagtgacgcaatcatgcctcactgcagcctccatcttctggactccagcgatgctcccatccacgactgccttttaaatccatgttactgataaatatatttgttcacttacaattttaagtatattttagttatcaagttctaattttattacagtatggttgcagaatatagtttctttctttctttttctttttttttttttttttttaagacagtgtcttactctgttgcccaggctggagggcagtggcacaatctcagctcactgcaacctctgcctcctgggttcaagcgatcctcccgtctagccttctgactagttgggattacaggtgcaccccatccagctaaattttttgtagagacggggttttgccatgttgcccaggctggtctcaaactcctgggctctagggatctgcccaccttgacctcccaaaatgttgggattacaggcatgagccactgctcctggcctagaatatagatagtttctaagataccgatactctggaatttattggcgttacctttatggaatgatgcatgtcctatttgagtaaatgttctgtgtggcttgaactattatatataatttttggttttctggcaacttttaaaaaatgaattttatgaatcttgtacctcattttatttccttctttgctttcactatcctatggcctggagccaattattttttatccatttatagttggctgataaatatgtgtcctgttaaaccggctctctgaagaaaaacaatgcttctgacttgtagcattgctgatttctatagtataaatacttccatagtggtcaatatcaagttaccaatagttaacaactgtcttcaaaaatcctgaatactttgcagtctgctcttgctagccagtataagacagcgcaccacttttttttttttttaagatattcacgttgtccattagtttccattagtttcactccttggcttcacttacttttcttaaccatattttctctctgacccagtgttgttttcttcttttaaaaattgttttaaattatctctgtaagctgctacaaaccttttattggaatgaagggcattagaacagttatttggccaatacagaaaaatgaagtcttctaattttttttttttttttttttttgagatggaatttctctcttgtcgtccaggtggagtgcaatggcgcaatcttggctcactgccacctttgcctcccgggttcaagcgattctccctgcctcagcctcccgagtagctgggattacaggcaccatgcccagctaatttttgtattttaagtagagatgaggtttcaccatgttggccagactggtcacgaactcctgacctcaggtgaaccacccgccttggcctcccaaagtgctggaattacaggcacgagccaccgcgcctggccgaagtcttccaattttaaaagatctaatcttcattcagttctcaaagtctttgctgtgcccttaaggcatgtcacacgcatgtgcagctcaggggtaacctggtactcctgagggttcagactcagaattagggaatttccgcctgtactctcagtttggagattcccctacacattcctgcccgcaggggccctttttcttcattcctctggccagaaagccggtatttctcttgttaactcagggcttgtgctaccacgcagtgcagctctgcacctgaggcctgacgtcagggcagagctgggaggaaaaaaggggaaaacattgaaaacccactccccaggaggggcccctctcccagttttgaccctcttcacaatccacctgcttttgtttactttttggagtccttgagtacttgctttttgtatactgcccagaatttctacttgtgatcagtgggaaaaatgggctatttaaaatctcaaataagttaaatatcatggctagaaacaactccaggcatttgtaattttagatttttttctttacactccagggggatgtgattgttttagagttttgaattcgtatgtttagcctgagatcctactagtatttctgttgaatatgcctgttgactgcccacttgttagcaaaatggcattgaatgttggaactgtaaactaccttagaaatcattcagcaccatcttttgacagaaaaggatatgagagttcactcctgtcactcaggaagtgcaaggcaaagatagaagcagaattaaatttgttttaatacagttactcagccatctggtaacagtttcctaagtgccaacgaatgtatggggctatttattgcagattttaagatgatatatggggattgagggaatgagaagttttagggagtggtagaggaagggcatataataagactgaatcccagatcccagcctcagaacttattttgtgaccttggtcaagtgatttaatctttccaaacctctatgtgtcctatagaagtaataataatacctatatagggttgggtgttttttttgtttgttttttctttttcttttcttttttttttcttaagatagggtctttctctgtcacccacgctagagtgcagtggcgcaatcacagctcactgtagcctcaaactcccaggcctaagcgatcctcccactcagcctcccaggcagctgggactacaggcatgcaccaccgcacccgactaatttttaaatttttttgtagagatggggttctcactatgttgcccaggctggtcactaactcctgggctcaagcaatcctcccgccttgacctcccaaagtgctgggattacaggtgtgaatacagggggttttttggtttgaattttaagagataaaatttataaaacatttagccaatgccacaaatgtagcttcttttggttattgtcattattctttgaaattcacaagtgccccaaaatatttaagcatttttcatgtattgccctttaatatgaatgaatgcattatgaaaggaattcttttacatgcgagtttgctgatagtcttagctaattctcatgtgtgtaggtgtcttgcctatctgtcagtcttagccttaaaggaaagagtcccatcacctcacttgcggcctcatcatcatggaccgcatgatgatgcggaatgagaatttttattgtttgtactacttcaaaatcattcagtacgtgatcacctgtcatgtatagggctctttatatttctagtttagtcccttttgttttctctaggaaagatgttttagacctgggacaaaagaagaaagagtgtatgctgacatctaggagggaagcacccacctcccctaagctccatctccctgagcactcatttcccaatgaccataccaggttttggccctagagagtttattacaaaataagaaagagaagtctggggaaggttcactcatcatagaattttggcagttcattgcccaagatgactcgatggtccacaccggcagctgtaatagtgaccaggtagatgacacccccgcttgagccatcccggctcatggccagagcaatagctgcagagggtttcaagttggagagagggagagagaggatggcttagcttcaaaaatctttttactccccctccatccatatgcctactaccactttcacctcaaaactcatcttccaggaaggcatatttagtggtgtgctggtaaatcagtttttttacaaaaaggcttccatatgtggcatctgctgatgtccgtggtgtaaatgctcccgctatgatgaattgcaagttacaaatagctaagcagttcacaaatccttgactatttaacagtccgctctcatgagtggtcccaagccagcctcagcacacctcagcacaccactggttctttttttttttttttttctccagacagggtctctctctgtcacctaggctgcagcgcagtggtgcaatcaccgctcactacagccttgatctccccggctcagatgatctttccacctcagcctcctgagtagctgggactacaggtgtgcaccactatgcccagttcatttttttttttacttttttttattgttttttgtggagacagggtttcaccatcttgcctaggctggcctcaaactcctgggctcaagtaatcctcctgcctcagcctcccaaattgttggcattacaggtgtgagccactgtgcttagcacaccactggttctcacagtgactgtgtatcctcatttgatttactcagaacagccctggtttatccgtattgcccaagaaccccattgagctttgcatttgtcctgccccttttcactcttaaaagtgtaccaggcccggcattaacttaaatggccacccctgtatttctcttcctgttcctcataatctacttccttcccatgtttcaaagccctccccaggtacccttccacttggctggttaccgtctgtggtgaagcgcctgcactcctcgggagacatgcctggcttatatgctgcatccacataaccatagataaaggtgctgccggagccaccaatggcaaaaggctgtcgagtcagcattcctcccagggttccatatacctgggaaagggatcctcaggttaaagaatcatcaagcccttccttcccactgagacattaagtggtctctgcaccctgcaatgaagccctggtatctcatatccccaaagtactatgctttcagaggtagtgtccttggaactcattgctagaatgacataggacttccatcttcctctgcaggagagtggggaagcccagaggagagagtgctttgggagaaactcacctgacctccttcacgttggtcccagccagctaccatgagatgtgcagacaagtcctctcgatatttatagctgatatttctcaccacatttgcagcagccaaaacaagtggaggttcctccagttctatcctgagggaaatattaggaataaaggttgatagaattttaagtctcattctcctatactgttaccatcatccctgctaaacgacccctgaaaactgtaactgcaatagctcaaactgcagcctccctcccacatgtacaggggaaccagagtcccacaccaccaactggtaagaagctttcaattgctcactcttttgctcagccccacccacataactttcttttggctgcaaggaccctgctcttatggggaaaagcagataaggttacttccgtcccaacgaccttgatttctcgtatggtaactgcctgatattatggtgggtcacaatatcaccttcttcctgattatttatatcaggatagtgatttacagcttttaaactgtgttcacatatagaatgtggttctcaaaataaccgtctcatgaggtactatattatctccactttacagatgcagaaactgacagattcaagtgccagcaagagccgaaacaagacttttccatttcccagtgtccagctcctggaacagcacactgtacagggattcatgcaggttgggggagctctagtgggtggggagtcagaactccagagcttcatacccatggagctccagctggtaggcggccatgtcggccacggcttgggcatcagcagctgaaccagagagtgcacagtagatgcgctcgtgcagcggggacagcttgtcaaacactcggttcaccaccgcctcgctgtcaggagggagtcaacagtcaccaagttaaaactcaggttttttttttttttttttttttttgagacagtctcactctgtcacccaggctggagtgcagtggatcaatcttgggctcactgcaaacttcgcctccctggttcaagtgattctcctgcctcagcctcccgaatagctgggattacaggcacccaccaccaagcccagctaatgtttgtattttcagtagagacaaggtcccaacatgttggccaggctggtctcaaactcctgacctcaaatatctgcccacctcggcatcccaaagtgctgagattatagatgtgagccactgcacccaaccagaactcaggaatttttgagggtgatcattcaatgtctctcaaatttctttgacaagagaatagcatgaagtttaatgcttggattaaagcaggaggcaaataatcatctcagatattattaatcactgcagatgttaatcaaaattaggcttatttttcaggcttagattttataacaaagcaaaaaatgctaaggtaagaaaaatatgcctcatcaattttctttgctattaacaatcttgagagagttatgttctatggaacataatgtcagtaatattgacctaaccccatatactcattttgcatgtgaggaaattggttaggagtgggagaagagacaaaatagttcaatatatggtaaatgagaaaccaggtatctgcttgacagaatcatctttttgatccctaagcacagatggaaagaagaccctcaaaaatctatctcctgtccccctctcagaccctattcctttactcatccctgtacactactgggacaggtcacatacacattcagaccccagatcctcctccacaaattcagagacccaagcacccaccaaatagcttatcatagtggcttttggggaaggtcaactccattcctccaaggctccagtttgccagtcttttcatgaatgggtaaggaaagtgtgtatttgaggccattagcttctttccaaatgcatacatcttcacttttactcaccctgcagacactcgggaatcagaacccatcacaacgcccccgtcaaactccactgccatgatggtggtctgcagagacacagaatatggaatgtcagggcaagaacagccttgatgccctcatgttagagaagaagaaacattcccagagaggcgaagtgactggctcaaagattacacagtaacaggccagagctgactgtcagtacaggctttttttcccttcatctttccactttctctattgcttcatccggctgcaggggaatgccacagcccagctgtgatacaacacagaaagaactgtgtccctaagttccaacttgcctagtggaatcctctccactgtagagaggtggagatgaggctcctacaggtagaagtgaagcagctccgcaagtgaaaattatctccaacggaagggctcatagtatgtgcagatgtggtgtagacccaacacagagtaattgactatgatcttgggaaacaaggtcagtctatttttttttttttggtccacaatcctccactctcaccccccatttcatcagaagtgagctcttccaatttactgaacattggaaaaaatcgaggagggcagtggttagcatggccaggggcaaggcaggagagaagcagcaaggaacacatacagatggttgaaaataaaagtttcagttatggaatttccgatcaagaggtaaatacatatctcagcagccagggaggtaaatttgtaccaagagataatttgactgagaagtttaagctgacttttccaggtcaagaaaagaatcaagaagaagtgagggaagataaagctacatttattctactattgagttggaaggagccttaaagatcctcggttcaaatgaggaaaccaagtcacagaaaatgcaaacgacttatgcaaagtcacacagagttaatagtagacctgggactaaaattcaggtctaactcttatcccttgtttccacttctacttcctacttgccactgctcatttggcagtgaggggagatttcccaaattataagtggtttcactgtgtctttcttaccaggccgtaagttactctggccccaaaggacgctcctctgagtatgctttccgacggaccgacttatcatgaatagagggtcaaagaacagggttaacttcaagttagaggctattcctctctaacaaagccgcccccaagccacgagtggtggcagtagtccagagcagaagccagccagccagtcttggggctgccatctgccccaggcgcccatcctaagcaaagtccccccagtgggcacatgggagtgggcagggaagacacagggaagggagtaaggcagcatctgggccaaggagaggccttcctgggtcaagctagggaagggcatcactagttaacacagaacgcccattatcagtgcttgggctaagagttgcccagtggcaagtttatcaaaagtctgtgtgatgagttggtccttctcaataagtgcctatatttccttctcccaagtgctgttctacttcacccagggcaccatttcctcatctctttgcaccatccccaaccccctttcttgatttaaccagcccccactgtccgggaccagagtgaaagcgaaagcgctttagagtagcttcccgttgacgcttccagctaagagtcaaagcacccgctttttccaccagcctcgcgtgcctgttcccttcacggacactctagacgacccccctcagaaaagaaatactctatgctcattgcgggttgcaagcgctggctgctacaggcgacctccctgcgctcccgttggtctctgcattcacttctccgcgcgcgcttccagggtcccctggccgctgcatctcctccacccctctgccaaccctcaagcccagacccattaccccggtgtggacttctcccgcccggggtaagtccccggttggtgctcccgcccgcagcatccctgcaaggcaccgctctcctcgccgcctggggcactggtttccaacctgggacagcgcacaacgcgcagccgacagccccgccccttcgcggcgccgccaggaggcgcctgggtgctgcggggctgctttgcgcgcggcgctaacgtgtgtagggcagatctgccccgagacaagtgacgaggcagccccgccctgaggctggggtgggaaaactggtgcaagtggaaaggcaggaggcagggagaggcgagaagggtgtgcgtgatggagaaaattgggcaccagggctgctcccgagattctcagatctgatttccacgcttgctaccaaaatagtctgggcaggccacttttggaagtaggcgttatctagtgagcaggcggccgctttcgatttcgctttcccctaaatggctgagcttctcgccagcgcaggatcagcctgttcctgggactttccgagagccccgccctcgttccctcccccagccgccagtaggggaggactcggcggtacccggagcttcaggccccaccggggcgcggagagtcccaggcccggccgggaccgggacggcgtccgagtgccaatggctagctctaggtgtcccgctccccgcgggtgccgctgcctccccggagcttctctcgcatggctggggacagtactgctacttctcgccgactgggtgctgctccggaccgcgctgccccgcatattctccctgctggtgcccaccgcgctgccactgctccgggtctgggcggtgggcctgagccgctgggccgtgctctggctgggggcctgcggggtcctcagggcaacggttggctccaagagcgaaaacgcaggtgcccagggctggctggctgctttgaagccattagctgcggcactgggcttggccctgccgggacttgccttgttccgagagctgatctcatggggagcccccgggtccgcggatagcaccaggctactgcactggggaagtcaccctaccgccttcgttgtcagttatgcagcggcactgcccgcagcagccctgtggcacaaactcgggagcctctgggtgcccggcggtcagggcggctctggaaaccctgtgcgtcggcttctaggctgcctgggctcggagacgcgccgcctctcgctgttcctggtcctggtggtcctctcctctcttggtaaggggaacgcagggcaagaggggaggacacaaggggactgggacaggaatcaaaggtaattgtcagtaaggtagagtagcgtgggttctgggaaatgtggagcgggagaaggactcctagcgtgggtcttggaacaccacttcggtgtagaagaaacggcactggactggcgggggccagaggttctgggctccattgctgaccgggtcttgattctttgggccacgccggaagcggggaaatcctttgctctggggccgaagggcggggcatcctcatctctaacaggaggcttttctacttcatgatctccagccttcctaataaaatcctgaaagttctggtagagcaaccacagggtagtgagttccagggcagcctatttaggttcgggattgagacgtcagtgtttcctttctgctgatgccctccaggataatggtgagggggaggaggcgtggtggggccagtctgactggaactgacctacttagacttaatatttgtgcgtgacctctcttctctttctccaggggagatggccattccattctttacgggccgcctcactgactggattctacaagatggctcagccgataccttcactcgaaacttaactctcatgtccattctcaccatagccaggtctgggggctgaaaatggggcaccctgcaaatgagggagttggaagttggggctgctgtccgaaatgcacttatatggggatacctgggaccttcagtctgttccctgaacacaccctgatcccctttttttccgggttctttatagtgcagtgctggagttcgtgggtgacgggatctataacaacaccatgggccacgtgcacagccacttgcagggagaggtgtttggggctgtcctgcgccaggagacggagtttttccaacagaaccagacaggtttctcctgaaactctttcattatacgccatgtactgttcatatcctcatacatctgctttgatctcccccctccccgctctctctctctcacacacacatacacacattgttccttctcattcttgatataccctctccctgtctctctctctctgtctctgtctctctctctctctctctcacacacacacacacacaattgtttttctcattcttgatatacctcaggagcaaaatattgtcctccttaccttaagaaaaacctagagttttcatctagcattttcttataaatctattcctatgtatccttagatagaaaccatagaatttcaaacctggaaattttgagctcatagagaccaactgcctcatctgacagagaaggaaactgaggccaagaccctaaatgctgaaactgcacagttacatatggctagagacacacttggggttagaaccctggtctcttgagtgctccacagacttcggcatgctttctagcagcactagaagctgtacagttacatatggctagagatagacctggggttagaaccctagtcccagtgagtgctccacagactttggcatgcttcctagcagcaccctcctcctccatctctgttatgtgaccagtttaagctcttcctgcctgtgtgtatagcatgggacatacaggttctctagggaacagaaagctttcaggaaaatggaaattcacatgtgcattaatgactttataattaaaatgaaggtcaggcctttcctctttaacactcatcttccctgcactgagatttgcagacctctggagaaccctaaccttgtttcctgcagcctccttagaaccccatgttgacacccctgaccctggcatcctggctcattgttagttcgtctcatcacttggaacctgtctgattcacctcactctcttctccccaaccctgcaggtaacatcatgtctcgggtaacagaggacacgtccaccctgagtgattctctgagtgagaatctgagcttatttctgtggtacctggtgcgaggcctatgtctcttggggatcatgctctggggatcagtgtccctcaccatggtcaccctgatcaccctgcctctgcttttccttctgcccaagaaggtgggaaaatggtaccaggtatgttcatggagttggcccgctctacacagaccctcatctcccagacttggcagactcagttcctctcacattgctttcagtccagctttcctggcacccttactgattctccatcttcatggaacaccctgtccctgtggtccatgttcccaggttgctcaacattaacctccatactctctgggtcttcttttctagcttctccccacaatctgtctttaagaatttgatccccaacccgttctgagtcattttcctcttcctcgtatttctttagcatccaaggggcatagctgtgtctctttctcttttctccttttcctctgtctcttctcacctttaatttccaaataggtaactcaggtattagtgtccctgatggtttgccaacccgtgtgacatctcttgtccatgtatccacagttgctggaagtgcaggtgcgggaatctctggcaaagtccagccaggtggccattgaggctctgtcggccatgcctacagttcgaagctttgccaacgaggagggcgaagcccagaagtttagggaaaagctgcaagaaataaagacactcaaccagaaggaggctgtggcctatgcagtcaactcctggaccactagtgtgagcacctgaagatgaatacccattcccttgtccttaagatgccgtgactccattcccattcctatgaccctgctcccactccttctttactgggaaatggttggttcagtattttcgtcctagcaacctgaggctcaatgactctactcagtgtccctagccccctccctctctttaaagatgctaggtggcttcctttcagtatggtacataaaatccacccaaccatgtggattggagagatgcgtgtcttccagtcctagggccttcctttgcctctcaggggaagtgcagggcgccataaattcttgcacctgggactgcttcatgctggtaccttgtagatttgttagtgagagtgatgggaatagtggaagccagggatgagggacatctgtgatgcactggaaagagagctacgccagtgatccgaagatcctggcttgatgatgcaatttacttgtcttgtgatcatgacaacaaatttaccttctctgagactgtttcctctttatttatttatttgtttgtttgtttgtttatttttacttattattattatttttgagctggagtctcgctttgtcgcccaggctggagtgcagtggcgcgatctgggctcactgcaagctccgcctcccgggttcacgccgttctcccgcctcagcctcctgagtagctgggactacaggcacccgccaccacgcccggctaattttttttttttttttgtatttttagtagagacgaggtttctccgtgttagccaggatggtctcaatctcctgaccttgtgatccgcccacttcggcctcccaaagtgctggaattgcaggcatgagccactgcgcccgactggttgtttcctcatttttcaaaaatggagtgatataaccttctttataaggctcttcatgtattagctgacatcacatgaatgaaagccttttgtgaagagtaaaatgctccccagacaaggtgatagtggtgatggtggtgaagataactgtgacttgcatgatgtgcattgagtcagactccatggggtctctggttcattctcctgtctgcctattgagcctgccgatgtcacttaggagacagggacttgatatttccttcaggttaatgactgtggttctttgtgtcccctccagatttctctacctcagtccctttttttgtggtctctttatagatttcaggtatgctgctgaaagtgggaatcctctacattggtgggcagctggtgaccagtggggctgtaagcagtgggaaccttgtcacatttgttctctaccagatgcagttcacccaggctgtggaggtgaggtccctccaccttcactccccagtgtgattccttcctctggcccagcaccatctgtgtgatgtccttccattctttacccttcttgcttcacataatgctggcaagcagactacctcactttcactattcttacctccctctaggtactgctctccatctaccccagagtacagaaggctgtgggctcctcagagaaaatatttgagtacctggaccgcacccctcgctgcccacccagtggtctgttgactcccttacacttggagggccttgtccagttccaagatgtctcctttgcctacccaaaccgcccagatgtcttagtgctacaggtacaacctaccactccctgtattccactggccccaactgcaattctgccatcctaaattttcttcctgccttcagcctgcttactgccaagcatatatcctccctaaccctttaaaggcaatggtaggcatcatctgttccataaatcttccccaaactcaagaacccagtttgggcttccaaagagaatgagagaagaggtttcgaagagagtgctctcacgttccaaggaattgctgcagcaaaatctgtgtcttcggtcttccatctttccttttcctttgtaatttggaatgtgatttttccctttcctggtggtatctgacatcaagtgtgtggcatagtggtgctgggtctctgcccttgtctttgccgcttcttctatctctactccttggggaggcatcacccagaaatctgtgcatgtgggagggtaggagtttctatatttccctgtttttcttctggggtaagacatcatgctatgtaacaaggcaatgacactctcaaggttagaggccttggtagcctcttatcgtgtgcttctctggcctctaggggctgacattcaccctacgccctggcgaggtgacggcgctggtgggacccaatgggtctgggaagagcacagtggctgccctgctgcagaatctgtaccagcccaccgggggacagctgctgttggatgggaagccccttccccaatatgagcaccgctacctgcacaggcaggtatggaagcaggtggcttgaaggagggcagggagcatcaaatacgaagagcattcttactgagcactctgaaagaggggttagggaatgataagagaccttgggtggagatggtggtgtagtcaggagggaggtagtatgattttgtgacatgttctcaataaagattttgagtcttcgatctctagataaccatactcccatgtgccttgttctatgactcttcatcatatttcatctcaggtggctgcagtgggacaagagccacaggtatttggaagaagtcttcaagaaaatattgcctatggcctgacccagaagccaactatggaggaaatcacagctgctgcagtaaagtctggggcccatagtttcatctctggactccctcagggctatgacacaggtactctctccactcatctcaccacccagccatctttacctttgctgaaaccccagtagtcttgcctttatccttcagttcctccttactcatggacatcaatttgaagttgtaagatcatgctcctatggcttcttcatcctgacatcctcaggattctgttcatcttcccagaatctcccctatccagctacaaccgtcagatcttggtgtgtgtgagtgcgtgaatgcatgagtgtgtctgtgtgcatgtacatgcgtgcacacatgtggctataccgttctcatcttggccctttgctctgcagaggtagacgaggctgggagccagctgtcagggggtcagcgacaggcagtggcgttggcccgagcattgatccggaaaccgtgtgtacttatcctggatgatgccaccagtgccctggatgcaaacagccagttacaggtgaggcagtcatcttcttaatggctatatcccacccaatcttgcttcttttatacatcttctgttagttttactaacatcataattatacaaaccagtccttgcagttctcagttcccaaatccagttccattggatgcctccccaaggagtagagatagaagacgaggcaaagacacctagaatcagttaaaagagactatctacaaactacagactgaatttctttctttctttccttttttttttttaagacagtgtctcactcagttgcccaggctggagcgcagtggcacaatcttggctcactgcagcttcaacctgctgggctcaagcgattctcccctcagcctcccgagtagctgggactacaggtgtacaccactatgcctggttgacttttatatttttagtagagatgggtttcaccatgttgcccaggctggccttgaattcctgagctcaggtaatctgcccccctcagcctcccaaagggctggggttataggtgtgagccactgcgcccagtcctatagactgaatttctaaagcgaaacataaggaaaagaccatcctcataatatcgtttatttaaaaaaattattttttgtacagacagcgtcccgctatgttgcccaggctggccttgaactcctgggcccaagtgatcctccctccttgacctcccaaagtgctaggattataggcatgagccaccgggcccagcccatcctaatcatattaatattaattaagctagtctgtttacatgcactgtcactcatttattcattaggaatccttctgagctaggcatttatcatcattctacagatgacaaaatggaggttaaaagaggttgaataagctgctcatatagaggtcatatagcttttgagtggcgcagccttgacccaaattcaggtctgcctgacttgaatgctcatctctttactactaagttatatttccttaaaatcgaatataaaaatgccaagtccatgggtagagaagaggactattcaatagtctttattcttctgtcacgtgtttcaccctagggttctcatttttatcctacttttgcacccttcatgtaaaacagtccttaatgaaacaaagggtttgcggagaagtactcagaatgggaaacgttggtgtccttggggttgttagcagagccagcagtgatcctgtgaggtcagtcccagccctggaaacacaggtgtctccctgggctgagggtagtccccggctctgacggtccgatgtctttcctcaggtggagcagctcctgtacgaaagccctgagcggtactcccgctcagtgcttctcatcacccagcacctcagcctggtggagcaggctgaccacatcctctttctggaaggaggcgctatccgggaggggggaacccaccagcagctcatggagaaaaaggggtgctactgggccatggtgcaggctcctgcagatgctccagaatgaaagccttctcagacctgcgcactccatctccctcccttttcttctctctgtggtggagaaccacagctgcagagtaggcagctgcctccaggatgagttacttgaaatttgccttgagtgtgttacctcctttccaagctcctcgtgataatgcagacttcctggagtacaaacacaggatttgtaattccttactgtaacggagtttagagccagggctgatgctttggtgtggccagcactctgaaactgagaaatgttcagaatgtacggaaagatgatcagctattttcaacataactgaaggcatatgctggcccataaacaccctgtaggttcttgatatttataataaaattggtgttttgtactgtggtttcttatgtttccggcacaccaaacggcccactgccttttgcagcgcacttttcagctgcggatgtctcctcttttatcatcctcaatgttttaccccctaactgcatcaccttttcccttaagctttttaattcctatgaggccccttccacttcccctatccccttaggcccacccccaagaatgtgcaagaccccagccacagggcccatcagggcactagcggccgcagctcagagccgtggcctctccgaagtggcagatggggcgggcgcggccagagcaagtgccaggcgggaacagagggactgggcgcgcctcacaactcaccacctcgcccgctggtccttcctggctcgcctggctctgaagctgcacctggaggggaaacctcagaacagtaggcgggattgcctagtaaatatctcccattcagggaggcccaggtcgtgtgacgtcgacagttgctgggtagatgaggccaacacaggttgcaagaagaggcggggtttagaggcgtgaaactccgcagtgctcagccaagcagggagcaacgctaggaagggcgggcagaaagggcacgctcttgtgggtgactacaggttaggagaccgttgaacctggaggggccctaggatggaccccgtggaaagattcagagactgcgccctctccctggcgccgccttcccctacacgcggcgggtatattctgttgcagttggcccaggacctgtttccaagactctgccccctcgcacttccgtccctcctggttttgtaaagtgatgctcataggaacccccaccccgcgtgacactactcccagctcctggctgacttctagtcttctggttgaagctgcgcctttagatgacacgaccctacccacccctgtttccagcggatgcccgggcctggaggtacctcttactgtaacccatcgccaagtgggcttttgaaggcgcctgttcctttctcgctttcttcggaagacccttgacccatcattcccccgacccccataacgggagagcagagaagccggtccccagtgtgatggtcctggtccaggcactaactgtccttttctcggaaaaggcagggggatgtggaaaagagtcttgttccctccccttcgatctgtggctttcgctttcacttcctcctccgagagcggacagatctctgggtgctgggcggtcatggcgctactagatgtatgcggagccccccgagggcagcggccggaatcggctctcccggttgcgggaagcgggcgtcgctcggacccaggacactacagtttctctatgcgatctccagagctcgctttaccccggggaatgcaggtcggggcagtagggaagcccctagggatgcagggaggcgggcgctgaggagtggagggtcgcctgagaggaggaggcgagagcgggagcgcggggtacagggtcgggggtagccttcagtcccggagagcgccagacccaaagaagaggccacatggggatggggcctgagaggaggaagtgcaagttaggacaaagagttacaggtgaggtgggggctcccaaaggaagacaagagaactttcctgcccttgtccacacacaaatggtggagcctttttcatggggttatcacatgatataggaggtgtgtggtgtcttgggaaacctatgaaatttgcctgctggcctcctctcagcaactcactgttgcgcgacttagaacaagtcacttagtctaggtcccaagcccctcttctgtaaagtgaggatactgttactaaacgtgttttgtgagggttgaatgctttatgcatggaagaaaccctttaagtcactctcaaaattttttagtaatggtaacatgtgcttgctttcatttctgttgtgctggaaaatggaaaaggttgatactggcatgcctcttcttttccttctcccaagccatttccttctagagattggttattaactgtttcatttattgatggttagatcatttctgcatatctcctcaccctcatactccctaaaaccttttcctggagcctcttactacagaatttttcattgcctttctcaacctcttttctcttatcagcccacagaattcttccagtccctgggtggggacggagaaaggaacgttcagattgagatggcccatggcaccaccacgctcgccttcaagttccagcatggagtgattgcagcagtggattctcgggcctcagctgggtcctacattagtgagtgtatacgctccagcaggcagaatctggggagctgggctctcctttccacaggaggccaactctgcaacaaagtggaagtggatattgatttaggacacactgggggatctatggggtcatcccttctctcccaaagctccatcttcttccaggtgccttacgggtgaacaaggtgattgagattaacccttacctgcttggcaccatgtctggctgtgcagcagactgtcagtactgggagcgcctgctggccaaggaatgcaggtaagcgaggcctctcatcttcctttcttagcctagtggttaatccctggatctctcagatcattgctccttactcttgtcctatgtggtccatcttagtgctaatagtatatttcacaaaacagctttttggtgataagacccttctcccaaatctcagcctgtgctccactcataagccagatagtacgtcaggtatttagcactgacacatccaccctggcgggacagtatcatttactaggctgcctttgtatgtttcagatactttaaattccaaatctttctctgatctttagatcctacaaaataattcctttccaatgcttatctctttaatcatttcctgccccatcaagttggaaagagctaacctctctttcctcactccaccttgtcctcacccaggctgtactatctgcgaaatggagaacgtatttcagtgtcggcagcctccaagctgctgtccaacatgatgtgccagtaccggggcatgggcctctctatgggcagtatgatctgtggctgggataagaaggtgggtgctctccattcttcatgttcccccaccatgttccctatggatgacagatctgtttcccatcatatactcctactccctccctgacaagatgcatggcatatagagtgcttggttatagaactgtttcagtatatccatggactatttattggcccagatatgaatcattgcatgtgttttgtaagcttgtcccttttgttaaacagttgatttcaagtttgtttttcctttttcatttctaaagttcgatgactttaccaaagtggtttcctaattccaatgttcttgtggtaatattaattcttttgttcactttttatgtctcatatttgaacccccatgttaccaacatcttcctctccaatttcagcctgaaatctttcatcttatagggtcctggactctactacgtggatgaacatgggactcggctctcaggaaatatgttctccacgggtagtgggaacacttatgcctacggggtcatggacagtggctatcggcctaatcttagccctgaagaggcctatgaccttggccgcagggctattgcttatgccactcacagagacagctattctggaggcgttgtcaatagtaagagaccaatgctcccaccaccatgcctgggaggagtcggcgggtggtggggggggtgatttaagattgagaaaccagcctggccaacatggcgaaaccccgtctctactaaaactacaaaaattagccggacgtggtgacgggtgcctgtagtcccagctacttgggaggctgaggcaggagaatcacttgaacctgggaggtggagcttgcagtgagccaagatggcgccactgcattccagtctgggccacagagtgagactccttctcaaaagaaaaaaaagaaaatgattgagagactcaaaggagggagagtagtagggaggaaattttcagagtcagaagaagggcattaaaggcccagtcatatggttttaagcttgcgcatgtgtcttgttgctgccttcaacataacatcagtgacaggaacttgctgaggtgaaaggtgactccatgttcttttctcatttgtccacagtgtaccacatgaaggaagatggttgggtgaaagtagaaagtacagatgtcagtgacctgctgcaccagtaccgggaagccaatcaataatggtggtggtggcagctgggcaggtctcctctgggaggtcttggccgactcagggacctaagccacgttaagtccaaggagaagaagaggcctagcctgagccaaagagagagtacgggctcagcagccagaggaggccggtgaagtgcatcttctgcgtgttctctatttgaacaagcatttcccccagggaagtttctgggtgccccactaagtagaataaagaaaaacggttataaatacctctgtcttgtggctgaatggggttgggcctgtggttgttgggtggggcagaaagtaaagagacgctttttctggagaaggggctcagacccctatctaagaaatgtggcctcaccacatagttcttcctggggtttccttccacactcatctctccaagacctcaggaaggctgctcattgctgtccatggacacttgtttgcaatttcacataggttagggtcctttccatagagaggcacctggggactcctgtgtgttccattgttaatggtttgaggaacagggagtagggcacctaggataactgtttttgactttatagagtaggatgaaaaagcttccacttcactttaatatggtaatcatataaacaccataccatttatcccaaataacactttggagatattggatattgaatataaagacagacattaagggtctaatttcatgatgtgtcatgctgaattgcaagatggcaggactataattttagaggaagaagagatcaggaggactcccctaagtgaggagtgtggggaaaatgtaaaagatccaggttagaagaaagagacacacatcatgagattttcggaatcatgctggaactatggaccatgtcactttccagaaaataaaggaaacaaatgcttgaaagtaggagcatgagcttgagcatggagcttttttcattagagagagattcttaaaatgccagaatgaatagagttgtaaaactttagcgagcccctacttaaaatccctcctccccaccaccactattttaaactttaagtgactccttggtagtcacacaggtaacatttcaaaatggtgatctggaatccaagcgacccttcctttggggaatttgtttgtttgtttgtttttagtttgggaggtggtttcaatctgaagagtcctttctggaataaacgaatctttctgttgcataggaaggctctgggtcaggaaggatatttaaaaacctaattactgttctaaacagtgttaaaatagaacaagaaccaaagctcagtacggggcatttccctcataggctgaaggtgcgcccaacataatttggagtacagactcagaggcacctgaacacgcgccagctcaaggtgctccggctgagaaggacggatgaagatgaacgctcagggcctactaaattcaaagtctgtacgtgaaaatcccctttggcctggtgagattggttggaaccttctatttaggagagcccggctcgctcgcctaaaactggagcttgcatggaagagggcacttttttttttttagacgaagtctcactcttgtcgcccaggctggagtgcaatgacccgatctcggctcactgaaacctctgcctcctgagttcaagcgattcccctgcctcagcctcccgagtagctgggattacaggcgtccgccaccacgccctggctaatttttgtatttttagtagagacagggtttcaccatgttggccaggctggtctcgaacccctgacctcaggcgatccgcccgcctcggcctcccaaagtgctgtgattacaggcgtgagccaccgcgccggaccagaaagaaggcacttcttaatagtaggctcagagcttgaagtagtaactttgagaaaattcagtgattctccaattacaaagcattctccaattacaaagcaaggacaacagataaagttgcccttgagacaactgtattttacttaatgataaagaaacatttttgcagttttatatcccagagtaaccgccactaaaggcgagtgagactcattgcaggcctgtacagtgcgaaccagagttcgggctccagttccgctgtctgcgggtctcgcgcgccccctcccggcggcccagcccagaatgaaggccttggctggggaagcgaaagcgaaagctgcccgagccctgacgcccgccctggccgagcgtagctggcggaccagagccggtagcgaggttgggagagacggagcggacctcagcgctgaagcagaagtccccggagctgcggtctccccgccgcggctggtgagttggtgcggaggggaacctggagcgccaacagggacgcagcccaagtgactacccactccacgctcctgcttcccagtccctctgcacccggcgataggagggagcggagcccggaccacttagctcgccgcggcaggcgggggtgggggtgggggtccggggattttttttttttttttttttaagcacgaggctcctgatggtcatgcttccagctccccagaaggccgaaagctgtctgtcgtaggaggggtgtacggatgagcaccggttactcaggagagctctcagggttgaataggataaaatgagaagccgatggacgggttaggcggagccgggcgggtaggagggcagggacaaggattgggactccacccccatgatttctcatctcgtatccgttgacagagccatgcggctccctgacctgagaccctggacctccctgctgctggtggacgcggctttactgtggctgcttcagggccctctggggactttgcttcctcaagggctgccaggactatggctggaggggaccctgcggctgggagggctgtgggggctgctaaagctaagagggctgctgggatttgtggggacactgctgctcccgctctgtctggccacccccctgactgtctccctgagagccctggtcgcgggggcctcacgtgctcccccagccagagtcgcttcagccccttggagctggctgctggtggggtacggggctgcggggctcagctggtcactgtgggctgttctgagccctcctggagcccaggagaaggagcaggaccaggtgaacaacaaagtcttgatgtggaggctgctgaagctctccaggccggacctgcctctcctcgttgccgccttcttcttccttgtccttgctgttttgggtgagtcaggagaggacgttgtgagttggaggtggtaaaagggcctgggcaccagcacattcttgtgttatttttcatgcctctttcaggtgagacattaatccctcactattctggtcgtgtgattgacatcctgggaggtgattttgacccccatgcctttgccagtgccatcttcttcatgtgcctcttctcctttggcaggtaggtggtgggcagctgggtccatttgctagccccaaatctttataggggtcttcacttccctaactccatttctaggccctttcaggcgcaaaacacaaaaatacttaaactaaaatatggtgaatgtagtcaccattctgtttcatctatccattcatttcttccttcgttcatattcatccaatatcttcaaagtttatctgatcttattataggaacaagttatgagtgaaggtagtacaaaaggaatttaagtctcagatggaatgtctctcagttgtctctcaacattcctaggtccatgaaattccatttctttctgcctcctacctcctacccctaagtctgtctccaaagtatctctccagggtcactctctcaggatgggtatgcttctccctctcactcttctttcccagctcatcttgctaatccctgaagatcttactctgaggcttatcacctttctttccagaatcattactcttttcccttcacttgctttcctttctctttctagacatactcaaacaaacaaactgtttgataaggctgggactgggatgaggtgagcgaggcacctggggtgcaaagtttaaggaggtgtgcactcaccttacccaaatcccagccggcctgattgtctctatttttatggtcatacttaatttagagtaccctcgaaaaccatttcattgtgccttcattccatcctggctgctttctgctgaaactacagtcgtgcactgcataacgatgtttaggtcaatgatgggccacatataagatggtggacccacaagattataataccatatttttactgtaccttttctatgtttagatacacaaatacttacttctgtgttacagtcgcccacagtgttaggtgcagtcatatgttgtacagatttgtagcctaggagcaataggctaaactacatggcctaggtgtgcagtaggctatgacatctaggtttgtgtaagtacactctatgatgttcatacaacgatgaaaccatctaacgacacatttctcagaacacatccctgtcattaaagtacaaaccctcattatatcatgtctgactattccaaacgcctcttcaatatggtaactaaatttgtattagaaacatatattttgtaaaatacatgcttttatgctttatattttttcctctaagtgttactgtagcatgtagttggtctaagagggattttccaactcgaaggatgacagatgggaatcacatgactctggggctccagagaattgtgggggcagggaatttattattgcagttcccatgatgaagtatctatgatgacagagaagggctttgggtatggggcaggaaggagaccaaggcggaggagacgcacagagggacaagcctgagggacgctgggacagaagcaagcactgggatacttgttttcacaatatcttttcccttctattgtagttttctattgtgtctagtacagagtgcactccataaatacttgtaaatttgtacatgttatgattttgttctcacatctagctcaccatgtctcctctttcttcttcctctgtgtattccttacctcttctctctctgtgtgtctgtctctcatttctttctcttttgcccctcctggcatgctttcccctgactttgcgcttctctgcactcctggcttgctcctctgtttcacccgctggcttgctccttctctgcatctccctcccctcttattctcctaccccacagctcactgtctgcaggctgccgaggaggctgcttcacctacaccatgtctcgaatcaacttgcggatccgggagcagcttttctcctccctgctgcgccaggacctcggtttcttccaggagactaagacaggtggggcctggagtccaggtctgagattcccatggacatcccttgcccctcagtgaccttccacccacagcctctcctcctgccttcacccgtatgccaggacctggggatgcttttctcttgtttgggacagggtggagaagcagcctccactgtccctctgcaagtgaaggaggatgttcagaggagggggctgtgtcagagggaacggtcaggagggagtttctgggggccctgcagtacacatggtttcctttttcctcacctgctctgtccttcttaggggagctgaactcacggctgagctcggataccaccctgatgagtaactggcttcctttaaatgccaatgtgctcttgcgaagcctggtgaaagtggtggggctgtatggcttcatgctcagcatatcgcctcgactcaccctcctttctctgctgcacatgcccttcacaatagcagcggagaaggtgtacaacacccgccatcaggtgagcgtgcatgtaagggaaccccaaagggagaataaaactgacaggtgaggaggcttccacatttgtggctagaggatcccctagagagagatgttctcttctcagccattaggggagaaggtatattgtagtatatactacattttgtttgtccagccatccaacaatggatatttgacttcagaagattcatgattctccagaactgtaaacaaaaatgtaaagtgtatgtgaaggtatgggggagggaataggaaggggagatgataggcgatgataacttttcattagcttctcaaaggagtctgtacatcccccgcccccactgcgaagattaaaaatggtttcttagaggcttttaggcagggagattttccctttaaaatcagcagaagaagtctggatgcagcatagggaaaggaggcgtcatcaggaagtcctaagtctgaatgtcagctccaccttctctttttctcttatattgtggtaaaacatacataacataaaatttaccatttcaaccatttgaagtgtacagttcagtgacatttaggaaacccacattgttattgggtagccatcatcaccatccatctccagaacttttttcatcttcctaaaatgaaactctgtacccactaaatagtaactgcctactacccccaacccctggccgctggcaacctccattgtaccttctgtctccatgaattgtgatgactcccggtgcggtacgtaagtggaaccatacagtatttgtctttttgtgactggcatattttacttagcgtaatgtcttcaggcctcatccatattgtagcatgtgttagaatttcctcccttttaaggctgaataatattctgttgtgtgcatatatcacattttgattatccattcatctgtcaatggacatttgcgttgtttccaccttttggctgttgtgaattatgctgctgtggacatgagtgtacacctgtttgaaaccctgcttttggttcttttgggtatatacttagaagtggagctgctggatcatatggcaattctatttaacaatttttgaggaaccatgtattagtccatttttacgctgctgataaagacatacccaagattgggcaatttacaaaagaaagaggtttattggacttacagttccatgtggctgggaagacctcaaatcatggcggaaggtgaaagacacatttcacatggcagcagacaagagaaaagacagcttgtgcaggggaattcccctttttaaaaccattatatctcgtgagacttattcaatatcacaagaacagcatgggaaagacttgccctcatgattcaattacctcctacccagtccctcccacaacacatgggaattcaagatcagatatgggtagggacacagccagatcgtatcaaaccaccatacagttttccatagcggcagcaccattttaaattcccaccagcagtgcataaggtttccaatttctccacatcctcatcaacaccactttctgttgtctttttttttaatagccattctaatggtgattaggtgattaggattatctcattgtggttttgatttgcatttccctaatgattagtaaatattgagcatcttttcgtgtgattttggccacttatgtttctttcttgaaagaatgtctgcaagttctttgcccattttctgatttttttttaagttgtgggagttcactatatgttttgcctattaatttcctatcagatatatgattcacaaatattttcttgtatttcatggttgctttttcactctgttgctagagttctttgatgcacaaacgttttaaattctgatgaagtctgatttatctattttttgttgcctgtgcgtttggtgttatatccaagaaatcactgccaaatctagtggcatgaggcttttcttctacattttcctaggagttttatagtgttagctcttatgtttaggcctctgatccatttggaattacatctccacctttcttaactatctgtggctccttgggaaaactacccttctttcctgattcagacactggggatgggaaaattacctcaaatgaaggttaaaaaaattgcatgtatctcctatactacctaacactgagagctcaataatattttgttcccttgctccttcactcttattccttctggaaagaagagtaaggaagagggagagaaacagtttggtatttttaggtagactagggagcatctcactggctggagtaagatgtgggggcctgctgtctttgcacatcagccctggtgtttgctggccctcttttccaggaagtgcttcgggagatccaggatgcagtggccagggcggggcaggtggtgcgggaagccgttggagggctgcagaccgttcgcagttttggggccgaggagcatgaagtctgtcgctataaagaggcccttgaacaatgtcggcagctgtattggcggagagacctggaacgcgccttgtacctgctcgtaaggagggtaagataccagagtggttgtgaaaggagcccaggaaagggggagggcaagggaagaggaaactacagctggttctagaggcctttgcagctcagtctcatagaggcagagagggggaaagaatgggaagattcccagcctcatctctttcttctcctcttccaggtgctgcacttgggggtgcagatgctgatgctgagctgtgggctgcagcagatgcaggatggggagctcacccagggcagcctgctttcctttatgatctaccaggagagcgtggggagctatgtgcaggtgagcgagaagccaagcctgctctccttttttccctctctttttctttgtggactcctgggccttgggctttatttgttctttttaacaatacaatacaaaaccaaaacccgcaagtaattttgctatggagaattttaaacatatgccaaaaatgagacaaaataatattacaaactcacatgtatacatcctgtgctttaacaatgatcaactcatgcccaatcttgttggatctgtatccccagccacttccccccacccatattattctgaagcaaatccaagatattgtatactttcatctgtaaatatttcagtatgtttcttaaaaatacaaacatctttaaaagtgtataacaacaaagccattatcacaccaaaaaattaacagtagttcttaaaatttatcaaatagtcaattgtcaaatttccacttgtggtatccatgtagtatatgtgtatgagtgtgtttattatactttgcttaaatcaggatccagaaatggtccacatattgtgactggttgatacatcttttaagtctgtctgtctatctatctatccatccatctatccatccatccacccatcaatccatgtatctgtctaaaagtttcccttgcacagtttatttgttgaagaaataggttgtttgtcctgtggagtttcttagggtctggattttgttgactgaatccctgtggtattatatgctcttctgcctctgtacttcctgtctattgatagataaacctagaagcttgtgagattgaggggttttttttggtctttttccagcaacagtactttttaggtggtgatgcattcttcctccaagaggcacacaatgtctggttctctatttgtggcaacatcagccactgatgagcagtacctacatccatgacagaattagggctgcaaaagggagatactctatcattcttcatgtattagctgaagtagtctatgaagggagacttcccctcatctaccatttcattacccggtggtacagtttgatgaggaaaggcagagtgagcatttagatctcttcctacatttaccagttctcaaaaacagctacttcatccagggctttatttaaacattttcctagacacttgataaacatcttttttgtgtagagaactgcgctgggcactctgacggctacaaaggtgagttgggcacagtgcctgcatttaaggagctccccgtctaatcaagcaagacagaactgggcacaagtaataggaagcagtaactgaaaagatctggggctagaggcaatgctgtatggtaggagaagggactgtatatcctttatattgcaaattggaacactggggtattggtgccacttttaaattccgtccaaattgtacatttaaaagtggagaatctcttttgagtatggaggaggagcagtgcagttgtgagtggagtgtgtgaggagttgggagggtggtttctggtagaagtgtgtttaattagccggctctcccattcctgttttccagaccctggtatacatatatggggatatgctcagcaacgtgggagctgcagagaaggttttctcctacatggaccgacagccaaatctgccttcacctggcacgcttgcccccaccactctgcagggggttgtgaaattccaagacgtctcctttgcatatcccaatcgccctgacaggcctgtgctcaaggtgcctgaaagagggaggaaacctggacccttgctctctgctgctaatgcataattggacatcacagcctatagttcatttgcctctgagaacctggtcttgcctctgctaagaagagaaatggagggattttgagggagaaggggcaggcccttaactctttttctggttttctaggggctgacgtttaccctacgtcctggtgaggtgacggcgctggtgggacccaatgggtctgggaagagcacagtggctgccctgctgcagaatctgtaccagcccacagggggacaggtgctgctggatgaaaagcccatctcacagtatgaacactgctacctgcacagccaggtgggtgaggagggagaagacaggggacaggagaggggagcatgtacagagagaggatgggagatccacgggaaggcgcaccaggtgttcattctgagggaggtaggtggggaggacaaaagggcccctgccttgggggtttacacatagtcctctgcccctgtccctgctgcacaggtggtttcagttgggcaggagcctgtgctgttctccggttctgtgaggaacaacattgcttatgggctgcagagctgcgaagatgataaggtgatggcggctgcccaggctgcccacgcagatgacttcatccaggaaatggagcatggaatatacacaggtatcttctacaaattgtaagcttgctccttcagtaaaaaagagaaaatcagacttactcttagtggtgaaggtcgtgtccctgtagcttgatgtttgctgttcctctgccctttcctccattcctacgtctccttccccacacactgaattcttcagcctccctcttgatcaagagtctttgtttgcagagagcaatgcagcagtggtgctccctccatgggcagccccgtcaggtccccaccccatggccctcctcccactgggccctccccgcactgggccctcccacctcccgaggtcctactggaagtacctgctgtgcacttgtccctccttgtgtgttgtctgtgtcacttgtatctgaggaagggaatttctctgatttcctcagatgtaggggagaagggaagccagctggctgcgggacagaaacaacgtctggccattgcccgggcccttgtacgagacccgcgggtcctcatcctggatgaggctactagtgccctagatgtgcagtgcgagcaggccgtgagtaccgtgagagggcaggggacagtggggcctgggaggggcatgctgggaggatcagactgtgcagaattgggcagagggaggacgaaggacctactagtggaaacagtctgtgccttcttggggttggggaatggaatccggtggtgtgagggcagccccagttccctcctgggcttccattcctccagctgtggcagtacagccgggagagaagggcagtccaggcctttatctactgccctttcctaccttcttttatttcacaccttctttaccctaaatcataagagatggtgcccaggtggatgtggtgtccatctcattcctgtctttctgaggcactgtgatcaccccttcagctgcaggactggaattcccgtggggatcgcacagtgctggtgattgctcacaggctgcagacagttcagcgcgcccaccagatcctggtgctccaggagggcaagctgcagaagcttgcccagctctaggagggacaggacctctattcccgcctggtgcagcagcggctgatggactgaggccccagggatactgggccctcttctcaggggcgtctccaggacccagagctgttcctgctttgagtttccctagagctgtgcggccagatagctgttcctgagttgcaggcacgatggagatttggacactgtgtgcttttggtggggtagagaggtggggtggggtggggtgggggctgtctgtgtccaggaaacttaattccctggtgactagagctttgcctggtgatgaggagtattttgtggcataatacatatattttaaaatattttccttcttacatgaactgtatacattcatatagaaaatttagacaatataaaaaagtacaaagaagaaaagtaaaagtacccattgtttcacttcctggagataaccatagttgctattttgctgcctgtcccatcagtcgtttatctgttgtttgagatagaaattaaccaaaaatgacataaatattcatgagattgccttcctatatccttccttgttcctaccagtgtctgctattttgaagaagctagggtctggagggacagagaacagttccctgattaacagtattaatagcgacattggtaacagctaccatttatagagttttaatgggagtaggagctatgctaagtgtttttcatgtattatcgtttttaatcattatccccaaccctatgaggttggttattatccccattttacagatgaggaaactgaagctcaaagaggctcaatgactttcccaaggtggtcgtagtggtggagttggagtttgaacacaggcctgaccctagagtccacaccctgacccaatcaattatattgcatcttgggtccataaaccctaatccataatcccatcaagaaaagctctgctgctcttagctctaaataattcagaatctattctcttctctccagtcccgttgttatagtcttcactcatagacttaagatgatcccatcaccagagaggtttctctaccattagcttccctcttccggccattcttcacaaagtcatttttctaaattctgtgtcacatacgatgatggcatttctggaaattccttcaggtgctctcaagccctgctgcagagatccttttcagagcacacactgttccagcccatctgtctcaccctctcctgttgtatccagctccacgacaaactttctgccttccccaacacctttgtgcctttgcatatggtgttttcttgcccattttctgctcgactcgcccctgattttcaagttcaagacttaactcagggttcaggtcttccaggaggccttacttatgtcgtcagtctggggaactctccatgtgcttctatcactgtgcggttacctctttcacagcccttttaaagttctatcttccctttcccaccttttttgaccttccactagaccatgagcacctgggcggaaagccatatatcttattaagctttatatctgctacctggccgagggctaattcatagtggagaataaatagtcaattgaataaatgaataaatatctccaccatcgtactaatcttaatcctccctgcccactcccaccactgaaaatgcaacattgtacacatcactggttgttgggagggacttaccttggaaagttgctattctaggaaagagaaaccttcatattcctggaaacagcaggtagtttccagtgctggcaatgaattccccagaactgctgttttggattttttcttgcctggcagctgttgggagcagggtgcagtgaggatggagtgagagtgggcagtttcttgtgcagatttgcctttctttcatcctggggctgacttgcagctccacacccatccatctctcaaatttcacagagggtaaaataggcatttggagagaaagaactctggcctgattcctttctctcccacaaatgtcctttattcataaaacaggaataataattcctgtatctcccaactacatggaagctgcagccctcacagaagaagatgatctgagaaattctttgatttcctcagtacagttatacccatgcatcataatactttaagcctggaaggcatcttaaaaataatgcaacagtcaaacctaattttacagagaaactgacatgaaatcacgcagctaatcatgataaagctgggtggaaaacttatcttgatgggcagtacaggaagatgcagtagaccttaagatgtcctgaaagtttcttatctcaggggaaactcccaggtaggctttatgtcagggacacagaaaaatgctccctgaaagtcaaaatattcgggctagacagacaaattcctgtaagtgtggtttgtctgggaaccacagatgtcactaatcctggtttgctccagagttctttttgttcactcctaccccccatcaccatttgattgatctccttaccctgtaatttccccttcttgtcgcttacctgcagtatctttcccacccaggcatgccttattctttctaaaggaaagtatgaatggagaggggaaagcttgggaaactgatagatttccttggatgccaaaacacctccatagcctgtctgcccggccctatgtggaaacagcattgagtttcaagtcctttatgcctccacccagggatagccacttggaatccacatggcaattgtgaaacaagcaggaaatgcgtaattgtcagaattttgtggggaaaggactagggaataaggaaaacaaagatcttccttgtgttttagagctgtcagctagaggagcacctgcttgagtctgatgccatctaatggtcccagaagaaactgggttttgaacctagagttccatggactcttaggaattagactcctactactactaagcattcactggtgcttactatgtgctattgctgtgccaagtatctgaaacctgtcttcttaccttatttttcaagataattctatgtggcaggtattactatctcaattctaagagtgagaaaatggagttttagaaacatttactaacttgcctgggtcacatagctaaggaagaggtggacttgcccagctttgcataaaactcctcaaaagagttgcctatactccctgactccacttatcttcctactatcctctttttaaaatatattatttatttatttaaataagcaatatatgaatgtggtttgaaattcaaaagacacaaagaagtatacagaggaaagcctcactctcaatccttctcaaggtttgctaattcctcttgcataggcaatccgttcttccagctttgtgtttatctttccagagaagtttactgtgtattaagcaaatatgtatatctttattcttgctcagtattttcgcaaacagcagctgtctaagttcactgttctgaactttattttttaaattaaaaatatatggctatgtagtattctattttatggaagttccatatttcatttatcctgtttccttctactgatggctagttaggttattggaagtcttttgctgttgctagttagtcttgtatagacattgtaatgcacatgtgcaaaaatacaagtatgatacaatcttaaaggggagttgctgagtccaatatatacattacaaatattgatagatattgcaaaattgccttcatagaggctgtattaatttatagttccagcagcaacatatgagtttatctgtttctccatatatatatatatgtatataaccaacagacagtgttaatttttaaaattttgacaatcttctgggtgaaagtagcattgtattgtagttatcatttgctttttaatattatcatgtaagtaacagagatactaaacccagaaggataagggagcaaagatgagaaaaataaacacacacacaaacaacaataacaaatctgtctaaaatattggaaaatcagaatgagaaatgaaatatgactgtaacgataaaaatcagtaataaaaatgactattaaatttaaaaataaggcagagcaaccacaagtgacatgagaatgaggcagacaaagttaaagcacctaaagtctttgtcttgtttgaaaggagggtagagatattgattaccttcagatgctgccacatttggtaaacatgttaaaaatataagactgacttttaactaatataattagaatttaaaattcctaaatcagtaaggggaaattaaataatactttaaataaaaatgtaattgatttaatataagtgatgcaaggaaaacaaaagaagcaaagtaagacatagcaaatacagagcaccatatattgtaacagaaacgaatgtaaatagcacagtgatcacaagtataaatagcttaaatatgggagttaaaggaaagttctcagattagattaacaatatcgcaaaatccagttatatgcccttcataagatcacaagaaacctaaaaacatgaaaatgttaaatcaaaaccagatataagatacacaaagcaaacactaacagaagacagaaagacagcttatgtaattacagaaatatctaaacatatagtctaaaaccaaaggcattagtaaaaacaaagacagccattacatagtgataatgaagtcaccagaacattatactaaaactgaatcagtttgcacctagcaataaaactacaaaatatgtaagaaatataggagaattataggaagaaattaattgagaaattgaaacacatttctcaatgattatagaataagtggaaaaatgaataaggatatcaaataagcctgttgatgttcttgtctgtaacatctaggaatcaaaatatattctttaaaactaataaatcaagtgctcgtatttacacatttaagactacaaaggtagacacacacacagaaagaggaagggagaggatatgagctagttttgtgattgttcattatttaaaactaataggaattatctaaaggaagagggaactaagtgtattatatacaaataaacttatcaaagcaaccttgaaatatacaccttccttaatatctgaaaaggtaaaatttttaaaatgcacaataaagacatagtgaaagatttttaaaaatactcatgtaaacattatacttaacagaagttaatatctctgaattagactgaatctatttgctgtatgaataattataaatgggcttcttaactgaactaaataaatgaaaatatttttaaattagattaagataaaaactctattatttgcaatatgcaaaagacacctaacataaagccactcagaaagatgtattcattattttcaacaaataagatgatgggcaaagacataacaagagaaggcaaacaaaagggaagcagaggtcacattcgtcttaccaaacaagatgaaattcagacactcctcaccaaaaaaaaaaaaaaaaaaaaaaaattgagtgtgacagaggcacttataatgtaaagtataaaattcatatgaatatatgagacatgtgtttaagttctaaataccaaataggtagctcttataaagcagaaattaaggtagatacaaggaaaatattcagaaatgtactaccaatagaacactttaattccctttccctggactagaccagttaagtggacaaaaaaataggctgggcctggtgattcatgcctgtaatctcagcactttggtaggccaaggcgggtggatcacctgaggtcaggatttcgagggcagcctggccaacatggtgaaaccctgtctctaccaaaaatacaaaaattagctgggtgtggtggtgggcgcctgtaatcccagctacttgggaggccgaggcaggagaattgcttgaatctgggaggcaaaggttgtagcgagccaagatcgcaccactgcactccagcctgggcggcacagtgagactctgcctcaaaaaaaaaaaaaaaaaaaagtatgaacacagaagatagaagatattactatcaataaaaaaatagatatgctacatctatatcaaacttttaaaattgaaaatagaggccgggtgcagtggctcacacctataatcccagcactttgggaggcctaagcagtcggattgcttgaactcaggagctcaagaccagtgtgggcaacagcgaaaacccgtctctacaaaaaatacaaaaattagccagatgtggtggctcgtgcctgtggtttcaactacttggctgaggtgggaggatcgcttgggcccagttcaaggctgcagtgagctatgattgtgccactgcactccagcctgggcaacagagtgaggccttgtctctaaaacaaacaaacaaacaaacaaaaattaaatggctcaatggcatagaagaaaatttttttatgaagcaagtataatattgatgttaaactatgacaatgcacaaatataaaaattgtagatgaatttacttattatactgacacaaaaatcctaaataaaacattgcaaacagattctagcacagattaaaaaacacccattaagatcaaggggttttttttgttttttttttctagaaaaccctttggaagttcatgatattttgaatttcagtggatatttcctgggaataatgagttcaaatgaacgaatatgtggaacaaagcatcaccaacatttattttttcaggatgaggtgatggacaaaaccatcacagggaaattgaggcaaatagtacatgtaaaacaatacttcgggtgagtccacctatcccaaagtcgtatcaaagaagtggctgcagattggagcccaaagcctttggttcctcagtttccaaatggattctcactaggtgggatcatgagtttgctttggacaccccaaattctaactatttcttttgtttcttacatcctttccctcttccccagccccttcccctcatgttacacctcttgctggtttgagacgtcaatcaccactgagaaagaattaaaccagtattttgagctggcaaaattcttagcctagtacaattccttcaattaaactgtagctcaacaatgtgttctctaaaagtatgatttaatattctacctagaaactcagaatatttttcataactcctccagggcagtgtggattatgttgatgtgttaggaggaagtagaaggaagaaaatgaattgagatgtacgttttacttccatgtcaaagtcaccaaaatagcagttgaagggatatttgtgtcaggcaatagggagaataataattttatgccaccctcaaaaaacaaccacacatacacccaaattctctcactcctcagagaaaggggaaggaaagaaaagagagaagcaaaatatgagcttgagtgaaaaatcacagaggagcctgtagctatttagggagggctgctggctgaagtcaggcaggaaaaaaagatcaaaacaccctgccctatttttcaggctcgttcaagtagaagacaaaaacataaatacaggagaaaggaagaaaaccacatctttttcctcttgtctccccagaactgaacagtgtctctgataagcccaggcccttctatcgtagacactgacactatgcacagaaaatgactcaaaaacgcttctaatgggggtgaatctgatgcttcagtttatttaagatgtaccagaggccatctaaggagatccatagcttgctaactgaagcttattgctttctcttcttagttcccatgccaggctctatgccattccttgcttgtcatgtgagatcactgatttcctttggttaggtaggatatgatttccttacagagatctgtcctgacaccaaacagctatgatgaaattccttggttattttccctttttgtgtaccttatcattaccggaatgctaaagctgtaggaataaagtttccctggcttcccaagaaatacagtgtgacagaaaaagtatagcctagggacttactagttatgtgaactttggttcattccatccttacctcatctgtaaaagggagatcatgatagtatctactgcaaagggttttgtgtgatgattctctctctttctctctctctcatacacacacacgcacacatttatataatgcttagaaaatgaactcataataagcaattgacaaacattagctattattatgtaggcaagtcagattttagagtttgtgagccttagacacatttacagagaagaaagagcagccctcctaactttctggtccagcgccatatcctccacttcctccccatccccacatcccttgccatttatcaaccccctctctcctctaaatctaaatacaggcccccgtttgatccatattgtctaggcccttcctctcctctccacatggcccttccttcagctctgagggaagctgcagaagccagccatggtgctgtctacaaagaaggggacacacgcctcttccacccgctcatgctgttactgcatctgatcatctccgtgccgtgtccttgttcacttagcctgtgttgagtgtttgtctccatttccaaatgcaataaaacatctgggaaagactaaggtaggtgtgggcaggaagaagggaggaagttagacccagtggcttgagtgccctctgatgcctccttatcctcggctccacacaagccctcgccagtgtgagctccacagccatccacctggaggaggagtactcaaaaccagggtcaaatgccttgtactcgggggtctaccagtaagcctgtggccagccttccacttcatgaatcgtcacatttacatgagagatgtggagggagaggggtcagcctcctagctcctgtcctgtagcagttaagtcaagtcaggccaggctgtggtaaccaagccagtaccttctttaaagaacagttgtttctcattcatacagagtgtgttgtaggtgtgagtgattccctggggcagctgctcttcatggtgactcagctaattagactgcttttctactgggattgtgccatctcaacacaaggctgtcttggttgacttggtaggggaggaggagaagagtcatgcacgaggagttaaattctttgaccaggaaccttttgttcactttccattggtgagaacgagtcacacagctccaggagagtaggaagtctagtttctcgttttccatgggcctaggaattagaggatgaacactagcgatgtcttccacgtcttgctctctttttctttacctgttataatctcccatggagaagaaattatttttctgattggtctgatccaggcctctaaccaagggcatttactaagggtcatagaacagtaaaaggttgcacaattgcatctcacctctcttttctgaatcctgcttaattaaaactttaaaaactcacttacagaccacttcttgctcttcttagttatcaaatatattttcttccaactcctttttgacagatcttgccttgttctcagctgactcccttgcaaccatctaaatggaacttcctcattcccctttatcccctgctaatcgtcctgtctttattcttttatctgaagaagtgtacccttcttcccccaagccttatgctctctgtcttagtccatttgtgttagtgtaacaagatacacgagatagggtaatttatgaagaacagaaatttatttctcacagttctggaagctagaagttcaaggtcatggccctggaagatttgatgccttggccatcgacttgaaaaaagtcactgaagtgaacttgtggttaccatgataccctgggttcattcttaacatgcacagtataggcaaatcaggggcacatttcatgctgaaagatgatgtgaaatgatgagtaaacattgccctttaaataataataacatagatggtgaattacaatttgcacttttggttttatttgcttaaagatagtgttttactgtctaggttttactgaaagaatacttaactaaacacttgagtcaaatcattccagtgtaacagtcctcacaaggaggaaggcagaagggcaaaagtgccaagctattgcctccagcccttctatttttattgattgactgattgattgattgagacagggcctcgttctgttacccatgctggagtacagtggtgcattcatggttcactgcaactttgaacttctgggctcaagtagtcttcccacctcagcctccaaagtaactaagaccacaggtgcatgccaccatgtttatttctttaattttttaaattttatttggacatgggggtctcactatgttttccaggcaggtctctaactcctagcctcaagcaatcttcctcctcagcctcccaaagtgctgggattacaggcatgagccatcatccctgctctctctagccctttttaaagtctctaatcccattcaggaggcctctgcattcatgacttaatcacctcctaaagggcccaccttttgatactatcacattggtgattaaattgcaacacttgaattttgagtgacattcagaccacagcattttggagaaaatgtcccctttcttctcttttttctcttcagtttctcctttctacagataccttgcacttcacttgcaaccttgttgaagtctctcctgtcttaaaagtttcttttcccaaaacaccagaactcattccttctgtctaactgtaactttgtacttgttaccaacctctacccatttctacccctgactccccagcctctggtaactcctaacgtactctttacttcgatgaggtcaacttttttagattccacatatgagtgaaatcacgtaatatagtccttctgttcttggcttatttcacttaacatagagccctccaggttcacccatgttgttgaaaatgacaggatttcatgcttttttatggcggaatagtattccatcatgtatatatatcacatactaattaccctgatttgatcaatacacaatgtataggtgtgttggaacatcatgctgtaccccataaatatgtacaattattacgtgtcaatttaaaaaacccaagaaaagtattttttcttagtgttgtttttttctaaagtgtatcccattttttcctttgttttcactttcaaaattcttgaaagactattttaatctgcggcctttgttttcttgtttccaattcattcttttgaaatatggcttctacctttaacactctgctgtcctcttgaaggttattggtgccctactaaccataaaacacaataatgctctcttagattgtatcctggtgagcctttttgcaaaattttattctttgagaattctctttccatgttttcttttcttttctttttttgtggtcattttggcttataggaaatcgtactctccaaatgttctctatgtcttctatttcttctctgataatccctttactaaatcttcttgaggcatatgcttcagaatgcttaatttacatactcttaattccttcttaatttacacactgcctgtcggcaatgtcaacacccaataagaagggagacctattggtcagaacaggccagggaatagaagaatacataataaacagtctgcctagttcttctagggccccataatatgtcaaacatatatttttacttcttctcccagcccatttttagtatacctaaattactgtcagtgattctgcaggcaaacaatggttgagttgtatgacacaactttgtgaaagtatcctacccagtacctgatgatgcaaaactcttctatcttgattggttgtcaatctgaggagtttccaatcctggggaagccagaaaaacagcgatttatactcttaatgggtactttctgactgaattttatgagctcattctgaagaggctgacgattttactatctcatttttttcctttctccagaatgggttctgggtgggtcccctgggtggtggctctgctagtgaatctgacccgactggattcctccatgactcaaggcacagactctccaggtaagaacagagcaattgtttttttccagtgtgtatgcaagaattggcatgggggagtgatgcctttctttgtaagtccaggccacagaccagactggaagtggcttttggtttcaaagaacagtgttcttccctttggcagaaaggtacgccttgcctctttacatgggatggacttcatataccagagccacctattcaaggggtagggaggcaggaagagggaaacattgtgtcttgtttaggatccttattgtgtatcaacctcagtcagtacctaggcgtgttgaaggcctggcttgggttcgagcctgctgggagaaacaacctgcagtaggctgggtcacagaggcaatctgtgattttttggtcaggacacggaaacaaatctcagttggggtatatgtggacaaatgaaactggaaacaaaggttgctccttctgtcatttattaagccactattatattgtcagaattgtactaaacagttttgagaagtaagagaagttgaatagaatacattgtccttgtcctccgcacnaggtacaagttacttgtcactgttatttttcagcacaggtgacagaatatgcagccatgagcaatgtgagatgaagcacatattaatgagcagaaacaggatgtaatgtgctaagaacagaatcccctttgcatgttagtttcattaaatacaaaagaggaatcaaacctggccaggagagatcattattcttagagaatagaaaccgccctgagtttataatgtccattaaacaatacaactgaaaaaaaaatcagcacagatgttaaatgatgatgaaaaattcagatttcccccctagtttagactactagaggaaatagagaagagtatacatgctgagaaattacaggctggaacttcatctgaaattagctactgagtgagggataagtggggttcacctaggaaggtcattcttatggctcagttggaggcttcgaacttagaaaggaaaggtaaattacaacccaacattaatagcaattatctttcaagtcttgacttagatgcaatgtcttcaggacgtccttcctgacttacctacattattaactccatttgaatttccatttttattgtagttggtgtggccgcctaaccagtcttgggggtctggctggtttggtttaatttacccaagtgttcacagcacattgtaattattggcagtagtgcaagactctctcatctcttctcttgcctccgttctcattctctcccctccctggagaatccattctaaacgtgtctggtatgtctctaagtatgagagtggcttttagaaatatgtagcattattgctctttatgtgtttttaaaatttaataaatgtcatttctctggttgaatcccattctgtttcttttctcacttgacactgtgctttttgagcatactgaggtcaaggcctcttagatccatgtggtctgacgtaatttaccaggcatgggttttcccagaggagggggctggttcatggttttggttttggttttccagaagattttgtgattcaggcaaaggctgactgttacttcaccaacgggacagaaaaggtgcagtttgtggtcagattcatctttaacttggaggagtatgtacgtttcgacagtgatgtggggatgtttgtggcattgaccaagctggggcagccagatgctgagcagtggaacagccggctggatctcttggagaggagcagacaggccgtggatggggtctgtagacacaactacaggctgggcgcacccttcactgtggggagaaaaggtgagctggaagctgaggtctggcggggctcaggaatgtcccccatgtgaaccatggctcttctttcttacaagcaattttctgcttttaggataaatggttgtctgtgtagatgttctggccccagctgtgatatattatcctcacaagtcagccactgtgatcttggtctcagacccccaaggttctcagggacttcgagggctattgtaccctcaaagagaagcagtaattgtgggagtacctcagaaagtctaaatcctcctgacaggcattgacataccctgttactgatcttgggggctgagacttgcctatactttgtgttcacttgggtgacctgggaaagagattagacatagtgatagtccctaaagaatctcctgtcccagcttggtggttttctttcacggtgtctcatttttcctcccttcctagtgcaaccagaggtgacagtgtacccagagaggaccccactcctgcaccagcataatctgctgcactgctctgtgacaggcttctatccaggggatatcaagatcaagtggttcctgaatgggcaggaggagagagctggggtcatgtccactggccctatcaggaatggagactggacctttcagactgtggtgatgctagaaatgactcctgaacttggacatgtctacacctgccttgtcgatcactccagcctgctgagccctgtttctgtggagtggagtgagaattagtttctagtactctctgggcctgactcaggactatactgactcaatacagagcctgtgtcacttctgcgtttatcttggtcacaacatgaattattctttcccttgatctgggaacagtcacgaaaccagagtccttgggttagggtgggagaaaacatggcagatatctatcctcatatcttccaagaaatgaggagatctaatcacctcattatgtgcttccaaccctatgaactggtgtcctctaattctttggtcttagtatttaggaggcattcttatgggctgtgagaatctgtaaccgatgggtggtaactccatgggtgccactttggtttcgaagaaccttttctaaatttatttatttttctctagctagcattggatttggtgtctagtacagattctgggattccaagaaagtgctttaaatattgggatatttttactaatttaaagacctgtttcccataggagctcagtctgaatattcttggagaaagatgctgagtggcattgcagccttcctacttgggctaatcttccttctggtgggaatcgtcatccagctaagggctcagaaaggtaatgagcctgtgaggagtgccctgccacctgtcccagaccttccccactcccaccttccctaacgtcaatgatctgaggcaaggaaagctgattgtgcctctcagggatcaccgggataatttttttctgaagctagaaatgggataagcagagagagtgctgaccttgccagccatttgttcttccctcgggataatcatattgggtcctaattggggcaatccattcttttctcgatttctttccaggatatgtgaggacgcagatgtctggtaatgaggtaatgtctctttttccttgtctttgagtggcagatcattctcccggttctttggccagagggagatgacatgggggtagggaggagtaaggttgctgctgtctagatgggactgtcccctgagtctctggaacggctgtggggggtggtgaggctgcctcctgagaccttcatcactgtgcctccaggtctcaagagctgttctgctccctcagtcatgctaaggtcctcactgaagcttctctctctggagcctgaagtagtgatgagtagtctgggccctgggtgaggtaaaggacattcatgaggtcaatgttctgggaataactctcttccctgatccttggaggagcccgaactgattctggagctctgtgttctgagatcatgcatctcccacccatctgcccttctcccttctacgtgtacatcattaatccccattgccaagggcattgtccagaaactcccctgagaccttactccttccagtcccaaatcatttacttttctgtggtccagccctactcctataagtcatgatctccaaagctttctgtcttccaactgcagtctccacagtcttcagaagacaaatgctcaggtagtcactgtttccttttcactgtttttaaaaaccttttattgtcaaataaaatggagatacaaaaaatgtacattttagtgaattatttaagaaaaacccctgtaatcaagtcaaggaacaggactttgccagctccagcagaagtctctgtacgtcaggccaatcaaagcctctccttcccctcgaaagtgaccatatcctgattttattgtaacctctttcatgtctttgtagtctagtcccccaggtatgtgttctggacgccacagcttagttgctttacgcctaactca

SEQ ID NO: 1061 - DNA, 2797 bp, Homo sapiens
ttccccagcattcgagaaactcctctctactttagcacggtctccagactcagccgagagacagcaaactgcagcgcggtgagagagcgagagagagggagagagagactctccagcctgggaactataactcctctgcgagaggcggagaactccttccccaaatcttttggggacttttctctctttacccacctccgcccctgcgaggagttgaggggccagttcggccgccgcgcgcgtcttcccgttcggcgtgtgcttggcccggggaaccgggagggcccggcgatcgcgcggcggccgccgcgagggtgtgagcgcgcgtgggcgcccgccgagccgaggccatggtgcagcaaaccaacaatgccgagaacacggaagcgctgctggccggcgagagctcggactcgggcgccggcctcgagctgggaatcgcctcctcccccacgcccggctccaccgcctccacgggcggcaaggccgacgacccgagctggtgcaagaccccgagtgggcacatcaagcgacccatgaacgccttcatggtgtggtcgcagatcgagcggcgcaagatcatggagcagtcgcccgacatgcacaacgccgagatctccaagcggctgggcaaacgctggaagctgctcaaagacagcgacaagatccctttcattcgagaggcggagcggctgcgcctcaagcacatggctgactaccccgactacaagtaccggcccaggaagaaggtgaagtccggcaacgccaactccagctcctcggccgccgcctcctccaagccgggggagaagggagacaaggtcggtggcagtggcgggggcggccatgggggcggcggcggcggcgggagcagcaacgcggggggaggaggcggcggtgcgagtggcggcggcgccaactccaaaccggcgcagaaaaagagctgcggctccaaagtggcgggcggcgcgggcggtggggttagcaaaccgcacgccaagctcatcctggcaggcggcggcggcggcgggaaagcagcggctgccgccgccgcctccttcgccgccgaacaggcgggggccgccgccctgctgcccctgggcgccgccgccgaccaccactcgctgtacaaggcgcggactcccagcgcctcggcctccgcctcctcggcagcctcggcctccgcagcgctcgcggccccgggcaagcacctggcggagaagaaggtgaagcgcgtctacctgttcggcggcctgggcacgtcgtcgtcgcccgtgggcggcgtgggcgcgggagccgaccccagcgaccccctgggcctgtacgaggaggagggcgcgggctgctcgcccgacgcgcccagcctgagcggccgcagcagcgccgcctcgtcccccgccgccggccgctcgcccgccgaccaccgcggctacgccagcctgcgcgccgcctcgcccgccccgtccagcgcgccctcgcacgcgtcctcctcggcctcgtcccactcctcctcttcctcctcctcgggctcctcgtcctccgacgacgagttcgaagacgacctgctcgacctgaaccccagctcaaactttgagagcatgtccctgggcagcttcagttcgtcgtcggcgctcgaccgggacctggattttaacttcgagcccggctccggctcgcacttcgagttcccggactactgcacgcccgaggtgagcgagatgatctcgggagactggctcgagtccagcatctccaacctggttttcacctactgaagggcgcgcaggcagggagaagggccggggggggtaggagaggagaaaaaaaaagtgaaaaaaagaaacgaaaaggacagacgaagagtttaaagagaaaagggaaaaaagaaagaaaaagtaagcagggctcgttcgcccgcgttctcgtcgtcggatcaaggagcgcggcggcgttttggacccgcgctcccatcccccaccttcccgggccggggacccactctgcccagccggagggacgcggaggaggaagagggtagacaggggcgacctgtgattgttgttattgatgttgttgttgatggcaaaaaaaaaaagcgacttcgagtttgctcccctttgcttgaagagaccccctcccccttccaacgagcttccggacttgtctgcacccccagcaagaaggcgagttagttttctagagacttgaaggagtctcccccttcctgcatcaccaccttggttttgttttattttgcttcttggtcaagaaaggaggggagaacccagcgcacccctccccccctttttttaaacgcgtgatgaagacagaaggctccggggtgacgaatttggccgatggcagatgttttgggggaacgccgggactgagagactccacgcaggcgaattcccgtttggggcctttttttcctccctcttttccccttgccccctctgcagccggaggaggagatgttgaggggaggaggccagccagtgtgaccggcgctaggaaatgacccgagaaccccgttggaagcgcagcagcgggagctaggggcgggggcggaggaggacacgaactggaagggggttcacggtcaaactgaaatggatttgcacgttggggagctggcggcggcggctgctgggcctccgccttcttttctacgtgaaatcagtgaggtgagacttcccagaccccggaggcgtggaggagaggagactgtttgatgtggtacaggggcagtcagtggagggcgagtggtttcggaaaaaaaaaaagaaaaaaaggg

SEQ ID NO: 1062 - DNA, 1901 bp, Homo sapiens
atggggcatcggccggtgctcgtgctcagccagaacacaaagcgtgaatccggaagaaaagttcaatctggaaacatcaatgctgccaagactattgcagatatcatccgaacatgtttgggacccaagtccatgatgaagatgcttttggacccaatgggaggcattgtgatgaccaatgatggcaatgccattcttcgagagattcaagtccagcatccagcggccaagtccatgatcgaaattagccggacccaggatgaagaagttggagatgggaccacatcagtaattattcttgcaggggaaatgctgtctgtagctgagcacttcctggagcagcagatgcacccaacagtggtgatcagtgcttaccgcaaggcattggatgatatgatcagcaccctaaagaaaataagtatcccagtcgacatcagtgacagtgatatgatgctgaacatcatcaacagctctattactaccaaagccatcagccggtggtcatctttggcttgcaacattgccctggatgctgtcaagatggtacagtttgaggagaatggtcggaaagagattgacataaaaaaatatgcaagagtggaaaagatacctggaggcatcattgaagactcctgtgtcttgcgtggagtcatgattaacaaggatgtgacccatccacgtatgcggcgctatatcaagaaccctcgcattgtgctgctggattcttctctggaatacaagaaaggaggaagccagactgacattgagattacacgagaggaggacttcacccgaattctccagatggaggaagagtacatccagcagctctgtgaggacattatccaactgaagcccgatgtggtcatcactgaaaagggcatctcagatttagctcagcactaccttatgcgggccaatatcacagccatccgcagagtccggaagacagacaataatcgcattgctagagcctgtggggcccggatagtcagccgaccagaggaactgagagaagatgatgttggaacaggagcaggcctgttggaaatcaagaaaattggagatgaatactttactttcatcactgactgcaaagaccccaaggcctgcaccattctcctccggggggctagcaaagagattctctcggaagtagaacgcaacctccaggatgccatgcaagtgtgtcgcaatgttctcctggaccctcagctggtgccagggggtggggcctccgagatggctgtcgcccatgccttgacagaaaaatccaaggccatgactggtgtggaacaatggccatacagggctgttgcccaggccctagaggtcattcctcgtaccctgatccagaactgtggggccagcaccatccgtctacttacctcccttcgggccaagcacacccaggagaactgtgagacctggggtgtaaatggtgagacgggtactttggtggacatgaaggaactgggcatatgggagccattggctgtgaagctgcagacttataagacagcagtggagacggcagttctgctactgcgaattgatgacatcgtttcaggccacaaaaagaaaggcgatgaccagagccggcaaggcggggctcctgatgctggccaggagtgagtgctaggcaaggctacttcaatgcacagaaccagcagagtctccccttttcctgagccagagtgccaggaacactgtggacgtctttgttcagaagggatcaggttggggggcagcccccagtccctttctgtcccagctcagttttccaaaagacactgacatgtaattcttctctattgtaaggtttccatttagtttgcttccgatgattaaatctaagtcatttgaaaaaaaaaaaaaaaaaaaaaaaaaaaaaaaaaaaa

SEQ ID NO: 1063 - DNA, 5869 bp, Homo sapiens; identical to SEQ ID NO: 517

SEQ ID NO: 1064 - DNA, 1973 bp, Homo sapiens; identical to SEQ ID NO: 518

SEQ ID NO: 1065 - DNA, 1999 bp, Homo sapiens
acccttcgaccactgcctccctcggcccagccagctgtgccggcgtttgttggctacgctgcgcccgaccctccagccagccttctgccggccccgccgcgatggaggtgccccagccggagcccgcgccaggctcggctctcagtccagcaggcgtgtgcggtggcgcccagcgtccgggccacctcccgggcctcctgctgggatctcatggcctcctggggtccccggtgcgggcggccgcttcctcgccggtcaccaccctcacccagaccatgcacgacctcgccgggctcggcagcgaaaccccaaagagtcaggtagggaccctgctcttccgcagccgcagccgcctgacgcacctatccctgtctcgacgggcatccgaatcctccctgtcgtctgaatcctccgaatcttctgatgcaggtctctgcatggattcccccagccctatggacccccacatggcggagcagacgtttgaacaggccatccaggcagccagccggatcattcgaaacgagcagtttgccatcagacgcttccagtctatgccggatggatttgtcttcaagatgccatggaagcccacacatcccagctccacccatgctctggcagagtgggccagccgcagggaagcctttgcccagagacccagctcggcccccgacctgatgtgtctcagtcctgaccggaagatggaagtggaggagctcagccccctggccctaggtcgcttctctctgacccctgcagagggggatactgaggaagatgatggatttgtggacatcctagagagtgacttaaaggatgatgatgcagttcccccaggcatggagagtctcattagtgccccactggtcaagaccttggaaaaggaagaggaaaaggacctcgtcatgtacagcaagtgccagcggctcttccgctctccgtccatgccctgcagcgtgatccggcccatcctcaagaggctggagcggccccaggacagggacacgcccgtgcagaataagcggaggcggagcgtgacccctcctgaggagcagcaggaggctgaggaacctaaagcccgcgtcctccgctcaaaatcactgtgtcacgatgagatcgagaacctcctggacagtgaccaccgagagctgattggagattactctaaggccttcctcctacagacagtagacggaaagcaccaagacctcaagtacatctcaccagaaacgatggtggccctattgacgggcaagttcagcaacatcgtggataagtttgtgattgtagactgcagatacccctatgaatatgaaggcgggcacatcaagactgcggtgaacttgcccctggaacgcgacgccgagagcttcctactgaagagccccatcgcgccctgtagcctggacaagagagtcatcctcattttccactgtgaattctcatctgagcgtgggccccgcatgtgccgtttcatcagggaacgagaccgtgctgtcaacgactaccccagcctctactaccctgagatgtatatcctgaaaggcggctacaaggagttcttccctcagcacccgaacttctgtgaaccccaggactaccggcccatgaaccacgaggccttcaaggatgagctaaagaccttccgcctcaagactcgcagctgggctggggagcggagccggcgggagctctgtagccggctgcaggaccagtgaggggcctgcgccagtcctgctacctcccttgcctttcgaggcctgaagccagctgccctatgggcctgccgggctgagggcctgctggaggcctcaggtgctgtccatgggaaagatggtgtggtgtcctgcctgtctgccccagcccagattcccctgtgtcatcccatcattttccatatcctggtgccccccacccctggaagagcccagtctgttgagttagttaagttgggttaaaaccagcttaaaggcaaaaaaaaaaaaaaaaaaaaaaa

SEQ ID NO: 1066 - DNA, 6728 bp, Homo sapiens; identical to SEQ ID NO: 521

SEQ ID NO: 1067 - DNA, 5086 bp, Homo sapiens; identical to SEQ ID NO: 522
  misc_feature (1)..(5086): n=a,t,g or c

SEQ ID NO: 1068 - DNA, 326 bp, Homo sapiens
gcgcacccggttcagctcgcctttcttggccagagggcccggttggactcacgggcggggcatgatggtggtgggtacgggcacctcgctggcgctctcctccctcctgtccctgctgctctttgctgggatgcagatgtacagccgtcagctggcctccaccgagtggctcaccatccagggcggcctgcttggttcgggtctcttcgtgttctcgctcactgccttcaataatctggagaatcttgtctttggcaaaggattccaagcaaagatcttccctgagattctcctgtgcctcctgttggctctctttgcatctggcc

SEQ ID NO: 1069 - DNA, 335 bp, Homo sapiens
acagaaaatatagccatgattgaaatcaaatagtaaaggctgttctggctttttatcttcttagctcatcttaaataagtagtacactttggatgcagttcgttctgaagtgctaatcagttgtaacaatagcacaaatcgaacttaggatttgtttcttctcttctgtgtttcgatttttgatcaattctttaattttgtaagcctataatacagtttctattctttgagataaaaattaaatgatcactgatattttagtcattcttgcttctcatctaaatatttccatattctgtattaggagaaaattaccctcccagcaccagtcttcc

SEQ ID NO: 1070 - DNA, 235 bp, Homo sapiens
cccagtgcattcgcatgcgtggacgctgtgtggagagtccaggatgacgggatcccgcacaagctcccttcagtccttcagggctgggcatgtggttgatttttctaaagctggagaaaggaagaattgtgccttgcatattacttgagcttaaactgacaacctggatgtaaataggagcctttctactggtttatttaataaagttctatgtgattttttaaaaaagaaaaaa

SEQ ID NO: 1071 - DNA, 308 bp, Homo sapiens
accagttggacattgtttttttctggttatcctgtcctgccttactatgagatttacggatgtttggggacacaggtctctgggctcatttctttttctgaggattcatataattgcctagtttttggcttagaggttggtccttccctggtttaatgatgcttttgttcagactgtcctctaggacttgaatttgaagcagaaacagaacagcacctgatcctcagttatactgcaaagcagggcctcagaaagggtaactccaattactgactttcacctaaggtgaaaaagcatccggcttcttt

SEQ ID NO: 1072 - DNA, 486 bp, Homo sapiens
ttttttttttgctgtaggcaccattctgcatcttgaacccagactgaagtgtgcctctcacagatggaaggtgcacacgctcctgtctcctcctcactctgccacgttcacttggctttttcattggtacctaggaatttaagaatatcgaagcgagacacgtaacaaaccatagatgagcagactcccacaccgggttttcttgcccgtctttaaggcactgtttctaaattttgaacttagctctgaatccccaagaacttgagcacagcaagggttgctgagctgctgtcgccgcagccctggcccctggtgctggagctgcagcacctttgggagaggtcctgcgtcgtcctcagctgcgtcgctgtgaactcccgctctccactgtgttcctcagtgtctgcttttcaggaagtctgctgtgacctttgcccaacttctgagctcctcagggactaggaacaatttcagtagctttgccct

SEQ ID NO: 1073 - DNA, 379 bp, Homo sapiens; identical to SEQ ID NO: 393

SEQ ID NO: 1074 - DNA, 456 bp, Homo sapiens
catatatacatgcagtctgcttgattatcagcaaaatggtcagcctttatcagatagtttcttcatgtggagttcatctgcatgtggcccttactctgaagcctcttcctgatctggagccacagtctgtctgtcttccagttcatctcagtcctcgagaaaggccctttaaatatgtcactttcccattttcctttaaccatgggttgtgtgagccagaaagagctttgagaaagatggctgcttccaccagggtggaggcttctaggtctgcatgatgatggggcccgtttctggccagagggtggctctgggagcagttgtgctgcgggcttgctgggggagaactctaactgttgcagaaacagagcttcatggcttgcttaaattacttagctggaatattttaaagtgtcagataatgtgatgtacaaagagagtatgccgatgcatttc

SEQ ID NO: 1075 - DNA, 303 bp, Homo sapiens
  misc_feature (1)..(303): n=a,t,g or c
gatccagcggcagtgacagaatccaaagagggaacagaggcatcagcatcgaaggggctggagaagaaagagaaatgatgcagctggtgcccgagcctctcagggccagaccagacagatgggggctgggcccacacaggcgtgcaccgggtagagngcacaggtaggccaaggggnagctcccaggacagggcaagggggcagcanggatacctgcnagccagggnctctntggcctntnttttcctantccntttttttggcccttcttttttntntgccgtacancntgcaggcaaaagn

SEQ ID NO: 1076 - DNA, 297 bp, Homo sapiens
  misc_feature (1)..(297): n=a,t,g or c
ctttttttcaggttaaatatataattncaagtgcttttaatgaacttatttttaattggctagggagcaaaaaataagtnagtnctgcttttagttagttaaccttgttcttttcttaaatagtacactgcatggtatttaatattccaggaagcatgggatttnattttgcttgatttgggcacatgaaataatagctctaggaaaatgcgcatcttaatgactctttgtaaagagaggcatttcttacaactgtgatgtttgcttacataaaagttacctcataagttaattcta

SEQ ID NO: 1077 - DNA, 363 bp, Homo sapiens
  misc_feature (1)..(363): n=a,t,g or c
attttctccacctttgtttatatggtaaaggaatccttttcagctgccagttttgaataatgaatatcatattgtatcatcaatgctgatattttaactgagttggtctttaggtttaagatggataaatgaatatcactacttgttctgaaaacaggtttgttgcttttnatctcgctgcctagattgaaatattttgctatttcttctgcataagtgacagtgaaccaattcatcatgagtaagctcccttctgtcattttcattgatttaatttgtgtatcatcaataaaattgtatgttaatgctggaaagaaaaaaagaagaaagaaagaaaccatccctgtccttcagtttataatc

SEQ ID NO: 1078 - DNA, 335 bp, Homo sapiens
  misc_feature (1)..(335): n=a,t,g or c
ctagaataaaggggttgattagtctgaacagtactaattaactacaaaataaacgttagtgantcagcctcttcctctataaacaatgaccaattagacgtttccgtaattccatgtattatgtatagtacactctataaatgtaaatgtaatgcttgtctaaaaagtgcaatttattgtacattgtcccaacaaatgtttacttttataatcgttatgaacttgaattggattagtatcttgtttttatgtgtgaatgaagccttgtgaaataacaaatgcaactgagaaggtacaaggtgactgtttttgtgagccagtgatgttttcaatgc

SEQ ID NO: 1079 - DNA, 1522 bp, Homo sapiens
aaaagaggaaaccaacccctaagatgagctttccatgtaaatttgtagccagcttccttctgattttcaatgtttcttccaaaggtgcagtctccaaagagattacgaatgccttggaaacctggggtgccttgggtcaggacatcaacttggacattcctagttttcaaatgagtgatgatattgacgatataaaatgggaaaaaacttcagacaagaaaaagattgcacaattcagaaaagagaaagagactttcaaggaaaaagatacatataagctatttaaaaatggaactctgaaaattaagcatctgaagaccgatgatcaggatatctataaggtatcaatatatgatacaaaaggaaaaaatgtgttggaaaaaatatttgatttgaagattcaagagagggtctcaaaaccaaagatctcctggacttgtatcaacacaaccctgacctgtgaggtaatgaatggaactgaccccgaattaaacctgtatcaagatgggaaacatctaaaactttctcagagggtcatcacacacaagtggaccaccagcctgagtgcaaaattcaagtgcacagcagggaacaaagtcagcaaggaatccagtgtcgagcctgtcagctgtccagagaaaggtctggacatctatctcatcattggcatatgtggaggaggcagcctcttgatggtctttgtggcactgctcgttttctatatcaccaaaaggaaaaaacagaggagtcggagaaatgatgaggagctggagacaagagcccacagagtagctactgaagaaaggggccggaagccccaccaaattccagcttcaacccctcagaatccagcaacttcccaacatcctcctccaccacctggtcatcgttcccaggcacctagtcatcgtcccccgcctcctggacaccgtgttcagcaccagcctcagaagaggcctcctgctccgtcgggcacacaagttcaccagcagaaaggcccgcccctccccagacctcgagttcagccaaaacctcccatggggcagcagaaaactcattgtccccttcctctaattaaaaaagatagaaactgtctttttcaataaaaagcactgtggatttctgccctcctgatgtgcatatccgtacttccatgaggtgttttctgtgtgcagaacattgtcacctcctgaggctgtgggccacagccacctctgcatcttcgaactcagccatgtggtcaacatctggagtttttggtctcctcagagagctccatcacaccagtaaggagaagcaatataagtgtgattgcaagaagtgtagaggaccgagccagaaatcttagagatttcttgtcccctctcaggtcatgtgtagatgcgataaatcaagtgattggtgtgcctgggtctcactacaagcagcctatctgcttaagagactctggagtttcttatgtgccctggtggacacttgcccaccatcctgtgagtaaaagtgaaataaaagctttgactag

SEQ ID NO: 1080 - DNA, 531 bp, Homo sapiens
  misc_feature (1)..(531): n=a,t,g or c
ttaaagattggcaatgtatgtgagagtatgcatatgtatgggtgtgtgtgtgtgcgcgcaatcaaactgtggtgtaaatagattctcagtgaattctggtattcagactctattccactagtgaaagaaccattttttaaacttcccttgccttttttatttatttaattttcttggtttggagatgtcagtcccaaacaccagagtctgtacttttctataacacagctcagattaaggtagggcatatgcaacggaggttctcacctccctaaagaagggacttgaattttagggactttaattcacccctccttcaatacaactttcccccttcttgtttgcacatgccaagataactgcttttatgcaggctgtacccccttgaaaaatcctttctacagtgctggtcacaaaagagcccaagttcggcctcctacccggnattgctgacttgaattcanagtcgccgagtctacctagctttcttggaagcagtctcgcaaaatntctatttgtncgtcactaatg

SEQ ID NO: 1081 - DNA, 381 bp, Homo sapiens
gatatttgaatttagcaggtggagtttcatagtaaaaacagcttttgactcagctttgatttatcctcatttgatttggccagaaagtaggtaatatgcattgattggcttctgattccaattcagtatagcaaggtgctaggttttttcctttccccacctgtctcttagcctggggaattaaatgagaagccttagaatgggtggcccttgtgacctgaaacacttcccacataagctacttaacaagattgtcatgggagctgcagattccattgcccaccaaagactaggaacacacacatatccatacaccaaagggaaaggacaatttctggaaatgctgtttcttctgggtgggttccctcttctgggcttgct

SEQ ID NO: 1082 - DNA, 2894 bp, Homo sapiens
  misc_feature (1)..(2894): n=a,t,g or c
gggcggacaggcacagagggagggagcgagcgagcagtgagtaagccagcaagggcggtcgggtcccgaggtcagccgagatttctcaggtccctccggccccctccctggagtccacagcgcctccggtgtccagaggatcggacacggcccggcccggccatggcctcgttgctgaaggtggatcaggaagtgaagctcaaggttgattctttcagggagcggatcacaagtaaggcagaagacttggtggcaaattttttcccaaagaagttattagaacttgatagttttctgaaggaaccaatcttaaacatccatgacctaactcagatccactctgacatgaatctcccagtccctgaccccattcttctcaccaatagccatgatggactggatggtcccacttataagaagcgaaggttggatgagtgtgaagaagccttccaaggaaccaaggtgtttgtgatgcccaatgggatgctgaaaagcaaccagcagctggtggacattattgagaaagtgaaacctgagatccggctgttgattgagaaatgtaacacgccttcaggcaaaggtcctcatatatgttttgacctccaggtcaaaatgtgggtacagctcctgattcccaggatagaagatggaaacaactttggggtgtccattcaggaggaaacagttgcagagctaagaactgttgagagtgaagctgcatcttatctggaccagatttctagatattatattacaagagccaaattggtttctaaaatagctaaatatccccatgtggaggactatcgccgcaccgtgacagagattgatgagaaagaatatatcagccttcggctcatcatatcagagctgaggaatcaatatgtcactctacatgacatgatcctgaaaaatatcgagaagatcaaacggccccggagcagcaatgcagagactctgtactgaggccagggccagggccaggggactctgtgagtctggctcaagaccgacattgccttggtttgttacatgactatcgtgatggggaaactggctggaaatagtaatcacacctctctgtttttagttagagtctaatgaaactctcatctagttctgtgatgtgtttacctcttttttcaggcctcaggaactcttctatttccttccctaataccccacacccaacctgtcgtaatttctggagaactccaggtttgtgtgtgcaggatgttggcacaaaaatacctgtgttttcattctccccctctctccctcctgtgtctggcgctttatgttttcttccgtttgataattagttggttaaaagctgagggaaccggaaggaaagtgctaggtgttttttaggaactagggtggaggggggacgaacttctcttcctcacatgaggttactgtttctttcctctgtggggcattggatcctcccacagttgccctggtgatgacttaggacttcccatctgtgacatcccactttgaatcttgatcgtgacaagaaataccttaggccttcagtcaattccgaagctccttcagttgtttttataatgggcgtttcacatgcacatatgtgtatgcatgtatacgcccatacagacatgcacacacagactcctactccattagctaacataccctccctctccacaacccgtgtcacatacctttcaggaggtgacagttgtcttagttgtcatctacccagacaaacgtcctgggcccgtcctccctcctgatactgtagcctcttggtacccagggtgagttggtggagaacagagagatgagaagcagagggcttggggaaagcctgttcctctctgactcagccctttttggcattattgcaagagcttgactcctggttgccttttcccagccagttttcagttggggtgaaggtttctgcaagtgtgaggtccagatgctgctgctcatgttgggctttccttttgggaactatttctctttatttatagtgtcgggcttccggggaaagcaatcattggtgtgtatgtgtatgtgccatgcacacacgtgcatatatacacatttgtgtatgtggaaatgtgctgggcaagtcaaaactatagaagagttgcctcctgtctctcgaatcttccagagatatcacttaattgttaacagcttttgtgttaatccccttcatcccctagcacttttattctaccacggctggagagttgananctacagtcagcctgccagtgactcttagtgtctgtttctgacttatttttcctgtctctgtcttccaacccccaataatatttcccaccggggatgcatcatttttactcccaatattctgtagagagggagtcaggatgctgtcttcccacgaatagtactcagtaacaaaccaattgcattttagttgggcagtgctcccacccaccctgcagatccctccagctaaaacccttcccccttccctccatgtgtttctcagtttcccgttcgtttgttggactgttccactgcccctcctcctcaccctatcacccatggatcgtaatgtaaaattcttttaccatgtcaagaaattattaaaaatacaggtactttgacctctttctaaagccgcagaccctggtgcaatgctctggtggctagggatgtactcatgctcatatgtgtgcacgcttggacacccacctccatggacacctagccaccctgttgtgtgnccttatgccagttgagctgaatcttttccccagtatagtggaaagactgaggcttctgcctactgagcaaggttgggtgcttcatttgtgttcagtctgaattatgggaaagttagctcttcccagacctaagctgccttctctccctactttcag

SEQ ID NO: 1083 - DNA, 3076 bp, Homo sapiens
gaattcaaaatgtcttcagttgtaaatcttaccattattttacgtacctctaagaaataaaagtgcttctaattaaaatatgatgtcattaattatgaaatacttcttgataacagaagttttaaaatagccatcttagaatcagtgaaatatggtaatgtattattttcctcctttgagttaggtcttgtgcttttttttcctggccactaaatttcacaatttccaaaaagcaaaataaacatattctgaatatttttgctgtgaaacacttgacagcagagctttccaccatgaaaagaagcttcatgagtcacacattacatctttgggttgattgaatgccactgaaacattctagtagcctggagaagttgacctacctgtggagatgcctgccattaaatggcatcctgatggcttaatacacatcactcttctgtgaagggttttaattttcaacacagcttactctgtagcatcatgtttacattgtatgtataaagattatacaaaggtgcaattgtgtatttcttccttaaaatgtatcagtataggatttagaatctccatgttgaaactctaaatgcatagaaataaaaataataaaaaatttttcattttggcttttcagcctagtattaaaactgataaaagcaaagccatgcacaaaactacctccctagagaaaggctagtcccttttcttccccattcatttcattatgaacatagtagaaaacagcatattcttatcaaatttgatgaaaagcgccaacacgtttgaactgaaatacgacttgtcatgtgaactgtaccgaatgtctacgtattccacttttcctgctggggttcctgtctcagaaaggagtcttgctcgtgctggtttctattacactggtgtgaatgacaaggtcaaatgcttctgttgtggcctgatgctggataactggaaaagaggagacagtcctactgaaaagcataaaaagttgtatcctagctgcagattcgttcagagtctaaattccgttaacaacttggaagctacctctcagcctacttttccttcttcagtaacaaattccacacactcattacttccgggtacagaaaacagtggatatttccgtggctcttattcaaactctccatcaaatcctgtaaactccagagcaaatcaagatttttctgccttgatgagaagttcctaccactgtgcaatgaataacgaaaatgccagattacttacttttcagacatggccattgacttttctgtcgccaacagatctggcaaaagcaggcttttactacataggacctggagacagagtggcttgctttgcctgtggtggaaaattgagcaattgggaaccgaaggataatgctatgtcagaacacctgagacattttcccaaatgcccatttatagaaaatcagcttcaagacacttcaagatacacagtttctaatctgagcatgcagacacatgcagcccgctttaaaacattctttaactggccctctagtgttctagttaatcctgagcagcttgcaagtgcgggtttttattatgtgggtaacagtgatgatgtcaaatgcttttgctgtgatggtggactcaggtgttgggaatctggagatgatccatgggttcaacatgccaagtggtttccaaggtgtgagtacttgataagaattaaaggacaggagttcatccgtcaagttcaagccagttaccctcatctacttgaacagctgctatccacatcagacagcccaggagatgaaaatgcagagtcatcaattatccattttgaacctggagaagaccattcagaagatgcaatcatgatgaatactcctgtgattaatgctgccgtggaaatgggctttagtagaagcctggtaaaacagacagttcaaagaaaaatcctagcaactggagagaattatagactagtcaatgatcttgtgttagacttactcaatgcagaagatgaaataagggaagaggagagagaaagagcaactgaggaaaaagaatcaaatgatttattattaatccggaagaatagaatggcactttttcaacatttgacttgtgtaattccaatcctggatagtctactaactgccggaattattaatgaacaagaacatgatgttattaaacagaagacacagacgtctttacaagcaagagaactgattgatacgattttagtaaaaggaaatattgcagccactgtattcagaaactctctgcaagaagctgaagctgtgttatatgagcatttatttgtgcaacaggacataaaatatattcccacagaagatgtttcagatctaccagtggaagaacaattgcggagactacaagaagaaagaacatgtaaagtgtgtatggacaaagaagtgtccatagtgtttattccttgtggtcatctagtagtatgcaaagattgtgctccttctttaagaaagtgtcctatttgtaggagtacaatcaagggtacagttcgtacatttctttcatgaagaagaaccaaaacatcatctaaactttagaattaatttattaaatgtattataactttaacttttatcctaatttggtttccttaaaatttttatttatttacaactcaaaaaacattgttttgtgtaacatatttatatatgtatctaaaccatatgaacatatattttttagaaactaagagaatgataggcttttgttcttatgaacgaaaaagaggtagcactacaaacacaatattcaatcaaaatttcagcattattgaaattgtaagtgaagtaaaacttaagatatttgagttaacctttaagaattttaaatattttggcattgtactaatacctggttttttttttgttttgtttttttgtacagacagggcagcatactgagaccctgcctttaaaaacaaacagaacaaaaacaaaacaccagggacacatttctctgtcttttttgatcagtgtcctatacatcgaaggtgtgcatatatgttgaatgacattttagggacatggtgtttttataaagaattc

SEQ ID NO: 1084 - DNA, 1412 bp, Homo sapiens
gaagagacagtttatcttctgagccgaatgggtaatagccgaagtgccctgaagatgattatggaggaattacatgatgttgataaagcaatcgaatttgccaaggagcaagatgatggagagctgtgggaagatttgattttatattccattgacaaaccaccatttattactggcttgttaaacaacattggcacacatgttgacccaattctactgattcaccgtattaaggaaggaatggagatccccaatttgagagattccttggttaaaattctgcaagactacaatttgcaaattctgcttcgtgaaggctgcaagaagattctcgtagctgactctttgtccttactgaagaaaatgcaccgaactcaaatgaaaggtgttcttgttgatgaggagaacatctgtgagtcgtgcctttcccctattcttccatcagaataacccagtggagagaagtgttgtggcttccatcctgctcagtggaatgctggtgctgccattgcttagagctgaggttctcaagctctaggatgcagctaagcccttcagcgtggtggtcttccattgccggcacatgttccacaaggagtgcctgcccatgcccagcatgaactctgctgcacagttctgcaacatctgcagtgctaagaaccgtggaccaggaagtgcaattttggagatgaaaaaatagctcatttctccttgtcagtctccttgtcaccactctttttgagactgtttttgcaacaacaaaagcatttgttgacactcgtgctgttaagagatttgtttatgtttatattatactcaaaaacaatttcttcatctattcctgtactaatggtttctctttgcagttcacagagaatttggggctctcttcatgccttgaaattttggggtccatagtgaatattttgttatttatttgtttggctcattctttatatagtaatggaaacataagtctaggagttagaaatgaattttttagaccttagtaaaaccatttaaccataaaatggacaactgagaattctcccagctgcctgaaagcgtcgccaactgtggttatcctgcaagctgctacctgcaacttggacgttgtttccacgtgctctgctggctacgattcttgcattctgggtttggcttttttctgtgtcatcaactatggttatcctctaaataggcatttaatgaaacattgtacaaattgtcactcatttgatgacacctgggaataacattagcaggctgatgtcctgcaccattatgtttactaatcacatgttctgtgtgctgtgacgactgtcaaagagtatctggccatggcggacactcagcatttgttgattgaataaatgttagctcttctcaaaaaaaaaaaaaaaaaaaaaaaa

SEQ ID NO: 1085 - DNA, 470 bp, Homo sapiens; identical to SEQ ID NO: 1049

SEQ ID NO: 1086 - DNA, 738 bp, Homo sapiens
aatacagcgcattcaacttgcaaacacccttccactcccacaaagagcaagctgtcactggccaatcaaaacaatgaaccataatgaaacagtttttcttgctccacccactcggtgaccaaatttgaaaaaaaaaaaaaaccgcgccaactcatgttgttttcaatcaggtccgccaagtttgtatttaaggaactgtttcagttcataccttccactgcgataggaatcatgtctggtcgcggcaaaggcggaaaaggcttggggaagggtggtgctaagcgccatcgtaaggtgctccgggataacatccagggcattacaaaaccggctatccgccgtttggctcggcgcggtggggtcaagcgcatttccggtcttatctatgaggagactcgaggtgtgcttaaggttttcttagagaacgttattcgagacgccgtcacctatacggagcacgccaagcgcaaaactgtcacagccatggatgtagtatatgccctaaaacgtcaggggcgcactctgtatggcttcggcggctgaatctaagaatacgcggtctcctgagaacttcaaaaaacaaaaaaacccaaaggcccttttcagggccgctcacaaagtcgtttaaagagctgaaatgcgttgcgagaatgagtttggatgacagaaataaccgtgacagcctgcataagaatgaattgtgtttgccatgaccggccacactgtgacaaaatttca

SEQ ID NO: 1087 - DNA, 446 bp, Homo sapiens
aactgaggcatcatggcagtttaatagtgaggtatttaattgcatttttataaaaaacattgcaaaacaaagtgacaatagggacctaaattctttggacttacggtagagatgcttgaggatcctaatattctacttctgccaacatgtcaggtaggaagctcacaatgttccccataagccattacaaactggctaaggaaaatcagtcatgactaagtccttgtctgcatcacgctcctgcccctccacacactgtctgagcgtgcacttttctttcgaaggctaatttatgaggcattctgcctgagtcagggctattgctaagtggaaggtttgatgaacctcccagtagaaaatgcaaggcctgcaaaaatgccgaacagctccgatttactatgggcttataatcaagggcaaactatacaataagagggttggtattt

SEQ ID NO: 1088 - DNA, 442 bp, Homo sapiens
  misc_feature (1)..(442): n=a,t,g or c
ggtgttccctgagcggttgctgcgggtgatggatactcttctgatactggctcttcgtgctataatttcttttctcaccaagagcaggtgccctttcagaagggaatgggantngagggagggtcacagaaacacctcggcactgggggaaacgtggcctagcctctgngancggcgancagcggccggaanactggtgggctgcgggccggcgcgggttcannaggcttctttttccgcggacggagacactngtacagcccaagtctcgagnaaacgccaacgccgacgccttctccaacaaaagatggcctcggactcaagagtgcggctccagggcaatgcagccccaacctaaagatttagaggcctcccgtttcgctggcccccagagccgnccaccgcgactgcacttccccancgataaaaggtggtttccaan

SEQ ID NO: 1089 - DNA, 413 bp, Homo sapiens
tacagagaatataaaaatacattcactttattttagaaaaatgaagactcatagagtaagcttatcacaaactggcctattaggagtcacagaattcacaggaaacaatttctgaagaccaggtgcctgctgccacctctccaagcaggccagagtccagtagagaatgcgattcaggaagatggctcctcagagggcagggaggttagctacggaggccgctcacgtggaaatgtccagtgaaccaatgccaaggaagaagataaaattctctggggctgaccacaacagtgggggtggataaagacaaaccacttgcctgtacttctcatcttctatttgttcatttcactgctggaaggtgacctcttttcccctaatcttctttcaacccagagagtttaagtcttctc

SEQ ID NO: 1090 - DNA, 388 bp, Homo sapiens
  misc_feature (1)..(388): n=a,t,g or c
aagattatacgaangatttattgatactggttaacatccattatatacaggtagaaactttcaaaattgtacaaagaaccattaagcatattgataaagacagttttacagacaaaacaactggaaaatagttttaacatacacaatatataattatgaaaaaaatgtagaacacatattgttctaccagataaatcccaaggttattaaaagtctgctatgcagacctttaagttgaaaaatgtgttcaatggagttacatggttttagaaaattaagtataatgttaaaattaagcttttttttctcattgcaatttgggagaggaactgagacaacttttttaccccaaatctatacagtttgaaaaataatttatatgtctagc

SEQ ID NO: 1091 - DNA, 415 bp, Homo sapiens; identical to SEQ ID NO: 851

SEQ ID NO: 1092 - DNA, 637 bp, Homo sapiens
  misc_feature (1)..(637): n=a,t,g or c
gaattgtgaagctgtttatcaaatgtttaagagaatttacacaagaatgttttgaccccacaaaaaataatgtgcctaagctttaaacaaaattcacattttatttagattgaaataaactatacaaaattgattttcttcaccaaaaataacagcaatattttccatatttttctagataaaccacaacacttattttgtaggttttccaggttttgcttataaatcaagatgaggcagtatataagagtcatggaaaaagacagagaaaaaaaacagacaaatcagttgtcagtatccatggcctctgattctgtctcaaccatgaaacagaagtgttcaacatatacctgctaaaaagcttaggaagatgtaggctccacaaaggaatgtaaacagcaacgagatgtggaacaacagcaggcttttccattcaaactttgtcatttgtttcctttaagttcaagaaagaccaaatctacactggaaatccctgtttgggtgagctcacaagccttttctccgggtaatttcctgtaactgtccaggtatagattttaaccataccttaaaactccctattagtcaaggnccaattgtgggcttcncctacacattttataaatggtatccctcc

SEQ ID NO: 1093 - DNA, 261 bp, Homo sapiens; identical to SEQ ID NO: 860

SEQ ID NO: 1094 - DNA, 445 bp, Homo sapiens
tttttttattgttttatagttttattttttttaaatgacagttacaagtgcttttcccttgatgggcaatgacgtaactattttcagttattagtaatgccttaaaaagtaacagcattttgtctaaactgaacttatataattgcacaaaagtcatggaaagcattaagaaatgctggtaaagattgaagttttctcagattcttgcgcaattccaagaagccttgattccagtgggtcctctgattcaaacaataatgatgctcaaactcagtgacacacaggtagagaacagcagcacaaccaggagaacccatgtggtttgtaacagtgaaattctgctctactgttaaggtttaatgatgcattcattcatcttttcattaggagcataaaaaacacctcaaattatattttctcaggcttaaaacttgttttgagctat

SEQ ID NO: 1095 - DNA, 444 bp, Homo sapiens
  misc_feature (1)..(444): n=a,t,g or c
tacaaaaaacaattgttatttgtgtacttttaaaacctcacagtaatattttcacactaccttcttggctgaaagttcacactcggaattccagagcagtccatggccaggcccactggntccccttgctctctccttggctttggtaaccactggccccagggactcagcctgctttcctatccatcccctcagtagctgtcaccatgcaggttaccccttctgtttcttctaccactaactccatgtctgactgcaagtgaaaggaacagaagcccaaacctttgggttttaaggagtttattgctaatctgtaaaacagaaagagacaggagataagcatgacaaaatatagggaagaaatgacttttgcctaaacttccaaactgtgtacaattgaagcctccgctttatagctcttagcacacctctcaaataagaagg

SEQ ID NO: 1096 - DNA, 451 bp, Homo sapiens
ttcatatttcaagtgtttttattctgagcagtaggtacaaaaaataatgacatagttgtgtctaattctgtatagttcagcaccctccacaggctgtcaatctctgatttgatctacttttaccagatttaacagatccttgaatttactttactgtatatacttccttcttgctcacattgggaatcaaactaatgctggaaacatgcatcttcagacttcattgaggaattccagattgagacacgctgggatgtggattgagtccatggttagagaagatggattaaatggaaacaaaacaggaaacatgtgcttggcatctaatagcagttgctgagggtcattccgctcttgtagttgtgcctggattgttcgtataaaggccactgttacccgttcttcaaattcattcaggggagtataaaggtttaaaattttgacaatctgc

SEQ ID NO: 1097 - DNA, 466 bp, Homo sapiens
  misc_feature (1)..(466): n=a,t,g or c
gagcacaaaggtccactttacttacatgaaggaacataaaggcatgagaaacagtcatctcaataaatgcaagacatgagcataaaagaggttctctgcctttccagcgttgttattacagagagaaacctacaattattttgttaaacaaaattcaaggctccaggactcatctctggagctgatatgtcttaaatactattatagtaggaaagggagaggagaaaattccccacccactcccccgatttggcccgtgtagcttccctttgagggtgtgtgacttgccatctgcaaaagtcatggccaaaacaggaactaacaggccaaactaccatcaatctagtcttctacagcaccctaacagagtgccagggtcctctgtcncctccgcacctgaggncaaagttccaggaagtttactgccggtgttaggaggtgagctcaagttcagtgtctgncttct

SEQ ID NO: 1098 - DNA, 418 bp, Homo sapiens
gtggttttaatctgtgttttgagatttttttcaaatggaaagatattacagatagaaacacatcattctaggtttcaaaatcaccaaagtcagtgagaagaatgtacattcatttaaatgtaatcatttgtaaataaagaaatcttgaaaaggctgaacagttcaatcaaattgaagaattgatctagatttttcattattctttttaaataatgagtaagtgtagatatagtgtacatacaagttgacattctgattcattcaaaatagtcacatccctttgcttggttttggatgttccagagactaaaatttaataccattcataacatagtattttcagtaaaaagaattatagagcaatgaaaaatcagaagatggctcagagagctttataatctctaaatatacacacatt

SEQ ID NO: 1099 - DNA, 418 bp, Homo sapiens; identical to SEQ ID NO: 875

SEQ ID NO: 1100 - DNA, 446 bp, Homo sapiens
tctgaaaatcagccttttaatctagttgaacccaacgagtggggaaagaactaaaacatttttttcccttcagattttgattataagaataacgggtcagaggtgtctcttccataggaaactgacatcccctatgtcctcagagttgtttttttttttttttcttcaaaaaaatgcataaaagaatttcaactcatgtgcatgccacacatttccatccccaccccaccctgccccaccctctacaggcacacatattcacacaccaaagggactccttcctgtaactggggaacagaatgtaaaaaaatccatccaagtggccaccgataccagaaataaccaaatgcatttacactcacaacatcagtcaactcacatgcacaaggagaagcgtctccaatcggagcttagagccaaaaattacaaatggcagagacttgagc

SEQ ID NO: 1101 - DNA, 581 bp, Homo sapiens
  misc_feature (1)..(581): n=a,t,g or c
ttttaagtcctcacaacagtgattttattaaattagttgctttataaaacattgcagatgtcataattgttaacataacaatttaccaaactgtagttaactggtgcagtttgctgagcatgttttataaaggaaaggaaaggaaatgccaaaaccctggtaaagttgttccattgcagcctaagagaacaaagatttgtttctcagacacttaaatcaggcaaataaaaataagtttccctcccccacctgaagcagttcatcagtagaaatagcctgataaataactagacagtctttgcactcgagagattccacaacatgtaatgcaataatggaaaggtttaccttctttagcttcaaagttggagggttttggtcattttaattttatatcaaactagtgcttttcagccgcagtatcttcactctgagataagcagtcttcttccacaatggaatttttnatatccccatggtccatttttaagaccaagccaattttaatacnaggtgccccccacatggccctggctgcaaacngcttttcctggaccagntttgaagtagttccaggnggg

SEQ ID NO: 1102 - DNA, 465 bp, Homo sapiens
  misc_feature (1)..(465): n=a,t,g or c
tttttttttttttttttctaaatgaagtgcttttaattttcagaccaaacatttttaatataaaaacattttgataatatacaaacagcaatcacaacagcatccacatggcagcaaggggaccagggcacagagngggggagcgggctggggagggacagttttcagggtcccagttgcttccctggcttgaaatcaccctggtcctagcagaggacaggttaaggctgccagaggangngggtccctgacctgggcccggagacagactgcccaggcaggccctctgataccatcttccaaccatggcagcctccaggaaaagccagatccatttaggagataacaggaaggtggctgtgattgacaggaaaggcaacatggttcctcagcatcctgctgatcacacctctgggaggggctgctggattgaagaggacctaagaatcttcctgggagcaggac

SEQ ID NO: 1103 - DNA, 382 bp, Homo sapiens
tacatgtatattatttattgttgattctgtacaccaaatggattacaagcagcatccagcagaagacagaccccccaaccctgcccaccagggtcgacactctacaaaaccctgagggcctagaaatctgtaaatgcatcgccaagcactggggctgatttgcagtaattctctaagcaaggcaaacatgatctagctttgaaggcagcatgaaggcagcgggttggtgagaacaatctctccttaagagaagaagatacctggggcggaaggagttttccccggaagtggcttgcagcccaccctctctgaaccacagccatggcttccttcccaaggccactgctggcttcccaacaacgcagattcagttctgactgtg

SEQ ID NO: 1104 - DNA, 323 bp, Homo sapiens
cttcacacagtaagatcagtgtttgctaagtgttatcagccaatgtacagcaccccccaacaccgtcaaacgttgttccagttattttactttaaaagaggatttaaataatgcgacgtgctttccactgagccactaagtaggtgtggacgcacaaccttcaacactaattgccctttactaagccgaccagggctagacactaagccagaaaagccttttccagagtttcctcttccgcacaaaagctttccttctgtcactccacccaaccacccagctcctcccttaagtgtttgaaagataattctataagtctcctc

SEQ ID NO: 1105 - DNA, 416 bp, Homo sapiens
ttttttttttcaagtatatttactctttattgcattccttcatttgcattaaacaatattttttcaatacagttttggacaaaacacaaagacattaagctcatttaacaagagacataagttaacacaatgtgtgctgctttcatgaggaggaaagaggcaagatcttagaggaatccaggatactggccaccaggaatcacaggatctcacaatacaatccacttctttaaaagccacaaaataagctagggaagaaaacccaaaacaaagaagatatgacatccaagtctccaccaaaagtatacaaatggcaagatttggagatgatctgctttctcacatgaggacaaataacagaggagccacacccaagtgccactgtggccacaagcctcatgggtggcgtgtgaggt

SEQ ID NO: 1106 - DNA, 427 bp, Homo sapiens
tcttatttaaaatattttaatttctaaaaagcttaaatcatattaaaatttaaacaatttcattgtacagtacttgacaatacatttcaacaaactgaaaggcaaaccagtaaatcagttttgcttactttctaagcttaataatgtacagactcttgctcttcaagaagatgcaaaaatcagcaacagtacaagtgaaatatttaaataggaatctgaaacaaaacgaattcaatctgatcaaatccacaattaattgaagttttcattttattcaattgtgaataaaatagcagacactgtttcatccaataagccaatgatatcagcttaggagaaatgatctgcctggcttgtgcaagacaagaacagttaccttctgctgaaaggatgtgagttttcaaatttggttttcatgtcatagttt

SEQ ID NO: 1107 - DNA, 275 bp, Homo sapiens
ttcaaatgtcacatttaatgttttcaccactgtacttcaaatctacattgtacaaagtgaccagaaagtgtgccacggtaattgaccaacctctgagattgtacctttcacaccagtgtcttcttgggctcttttgatactaaacacgtttctcattcaagtgaattgaaatgcttcagttgggttgattctcaggagcctcataaaaaaaaaacaaagatattgcaccatctttgtttagtaattcaatgtttgtttctttcacagcaaataat

SEQ ID NO: 1108 - DNA, 366 bp, Homo sapiens; identical to SEQ ID NO: 902

SEQ ID NO: 1109 - DNA, 272 bp, Homo sapiens
acatagaaaaaaatgtatatttatatccctaaaaggcaatacagaatttataaccaaaccatgtgtgagaactgttaaattacattccaaataccagcagtggaacaaacagaaacacagagatgttttaaaaaacatgcagcacgttacaaagaggccgtgtaataattcacaacttttgttagcagccgttaagtttgattagtattaagcagcaatggtttaagcaattttaaatcatgatatgatagttacatatatgcattttactg

SEQ ID NO: 1110 - DNA, 337 bp, Homo sapiens
tttttttaaaattaatcaaccaacacccattctatttaaggttccaaaaggaagtagctggacccggctgcagacacactcccaccttgcttctgtcccaaaagtacatcccctacgtgtggttctccttaaacaattttaatgtctgggttggggaagcaggtagagcgcgtagaggcagctgctagaggctggttgctgactccaggccgcgttccaggaaatatcggtgggaagaacggggacgggcttgggacccttcattgaggaagtaggatgtgatcttcctgagtccctcctgattctcggatgctgagtcctcccatataacatcttc

SEQ ID NO: 1111 - DNA, 423 bp, Homo sapiens
acattcagatgtttttactgcttgattacatttcttggtttcacatttaagacttcaatttataagaagtaaattatatgtttttcaatttaagaacagatgaatgcaggaacattatgaacattatgttggggaaaacaaagagaccccaaattaaaaaacaaaacaaatcaaaacataactagttgtgcagctctggagaacttaataaaaagtaaatcaacttttaaatcagttaactttggcgtctgaatacaaaatgtttatcagtattacctatgtagatgactattaagggatgtgcagcattttcaaaatccctgtgtgtcctttgtatgcatgtttggtacactgagttctgtggtcactgtcctctcttcagcagggtttttttaccccagtacgattgtccatctctgtatt

SEQ ID NO: 1112 - DNA, 408 bp, Homo sapiens
gattgtattcaaatttttattttttgaacaaaaatttaagacaatgattttaaataataaaacatggtatatattctagacactggttttttttaaagatttattaaatttagactcctatagttctgttgtgatgctttcttcaacatttatattatttcttaccattttatcatcactccaagcttgctaaacaaagaatctctctgttaagtgaagttttacattaaggaaatactccactagcacactgaacaaacctacagaactgtcctagtttatatttacaaaacacaagaagtctgtccagccattttggttttgttgttacactgtccatactgagatcagcagagagctaagtaatacacaagattacgcttcggcagtgcaaaggatggcatcaac

SEQ ID NO: 1113 - DNA, 369 bp, Homo sapiens
gcaggtaatcttattttcctaagggtagtttcatgatgacagtgtcaaaaaattactgtggataaagaaaaaattgtctcaatgaaatagaatttttcactgaacacagaaaccatctcaatagttgctgctccctggtttccaggccacgcaacagacatcaaaccaggaagccaaactttcatggacctgtgttaagaaaaacacacatacatgggcatactactttttccagaaaaacggaattaggcagagaaggaagtgtgggtgtacaactgatccacaagctattgggaaatcaatagctaaaaaatgtcaacaccctggcttccttttatcaggaactccaggaggctgaaggaatgtgag

SEQ ID NO: 1114 - DNA, 362 bp, Homo sapiens
gttaccaatctgaagtgggagcggccgccatttttttttttttttttttttttttaaagtccatagattttaatgaaatttctattcctgtctctgagcggctgctgtgctttgtctgggtcccccaggggacaagagtcaggctggaatgagacctctgtctgccaggcctttgtggaggcctgggaggagaaaggccaaaggctttgatgcttgggaccgatgcccggccactcagctccagacaccagggatctggcaagggggtggggcaagggccagacagaccaacagccttggggtcctggcgagactcgccaagaccagatctgaagctggctgggccaaagcagctgaggcgg

SEQ ID NO: 1115 - DNA, 394 bp, Homo sapiens
caagatagagggtttttattgaaagtaggttatgcaaacttggcttgaaaggtacttatcattttaaaaattatgcctaatgatgcatcaaatacaaaaacatataatacatcaatagtcaaccctttccccataaaggcaaagttactgagaaatgtttatttttcctctggtaatggctaatccaggtaataatatgaaagcaaatggaaaattcacattgcttctttcattgcttctgtcccttaaacctgttaatctttcagaaccacattactgaggtgctggcctgtgcatggaaacccaatgatatccaggtcttacaggtccagggcccagtggacagacaggccctggtcctccacgctggccaccatgtcttcgatggcattcc

SEQ ID NO: 1116 - DNA, 385 bp, Homo sapiens
tgtgatgcagcatcaggtgcttttacttcagtgaatgaaaaataatggtcacaactcaaatgaatgggaatttaatatgaatatatgcaccttaccagagatgtttgctaccaatgatatcttagcaattccatattccttacaaagtcagtataattgttgtaaaaaaatcaactgtggttctgaatacccattcacagttgacctcaacaatgtatctgatgtaggagactgagtatccgtgacaggcagaagcatgtgatggtcctcagtcccaagtggaagagctaatggtaaagtcatatcagaaggcttcacatccatagtttctgataaaggacttttttgtatggaatcctgttcactcaaagtatgatcctctgca

SEQ ID NO: 1117 - DNA, 500 bp, Homo sapiens
ttttggaataccattgtgtttattgatcaaacctggcttcgagtgtgacagagccattcttggttctccttggaagtaacaagaacactgggtaacatgtgaagtgcatggagactcacctgaatcccaccaaagtagtagctggacccagtagcctagcttattgtcttggcagtgcccctacccagtaccattagacctggctttgtcccttacataggacagactgggcttctccactcccgccaggctggccctacctccacctgtccttggaagctagtatgtaagtaagggaggagtcatcaagtttatagatgggtaggctgaggattgaggcaggaggggacttaatggctgagtccctggcttgttccagagccctggcccttgagcccctggactggtcagtgcatggacactctcccctcccagctcgggcggaagacttttcctgacttagctgctccatacacacaatctataaatatgtatttgct

SEQ ID NO: 1118 - DNA, 313 bp, Homo sapiens
actgaaaaactcagactttattcagattaagttcctctacaaaaagtagggttctgtcccatgtgtctctgacacatttacaaaataccagttttttaaaattttggtcaaattatgagtggttgatttaaaaacttttccaagaagaagaaaagcatggagtagtaatttaaagaactcaataaaaacttctattttttattttaaaataatatacacagtgttattttcttcaagaccgtcctgtggatgtgaaatccgtcttcgcgtcatgtatctcccatatccagcagttcagccatccagctacctt

SEQ ID NO: 1119 - DNA, 207 bp, Homo sapiens
  misc_feature (1)..(207): n=a,t,g or c
gtggaagaatacagaaatatgtttaatacttagtatcaaactaaaaagtaatataaaattacaaaacttcttttttttcatgcacaggcttttnctggtaaggaccgctgggattgaacagaagcttccggtaaataagggccccgtcggcaagacagcatactgctgtcacaagtgcaaacacccctccaccaactgtcaatgttg

SEQ ID NO: 1120 - DNA, 221 bp, Homo sapiens
aaagcgctgatggaattaccctgctagggaaccagcatacatatgtcattcctttgtacagtatttttacaagtatttgattttgtttaccctaatttatccaactcaggaataaaaaggaatctcagatctatgagaaggacctccaatttctcattctcagcttcaaaacaaattagtcagtttaacattagtcaagacacaggttgctgtgaaataag

SEQ ID NO: 1121 - DNA, 228 bp, Homo sapiens
  misc_feature (1)..(228): n=a,t,g or c
gaaaagaaatctatttttaatggctttggctttatagcacgaagcaggcacccnctcgttaaaggcacacagtcctctcttctgccccacctcctgggtccttaaaatcgagtcctgagttccagaggggtcactgcaaggcagcagggaagggagagggtcacagtttcactctgtgagtatcagacacccagggccaaggcccagactggcctctgaagctaaagg

SEQ ID NO: 1122 - DNA, 536 bp, Homo sapiens
ttacaggtatcttaactttatttagctctctgtagaattaacatctttgcaaatatattattcaaccaagcatttgccataaagataagcatcaactttcccattggacaagtgatagtgttcaagctacttgacttgtgaaaaacaaaaaaccaccatgacttctcaacaaatacattttaaaatgaaatatgctcaggctgataaacaaacaagatattaaaatggagactgacattgaactacatagtcaacttgaaaaacacaagaagacaatgctcctataaaatgatatattattggctttacaaagacatactggtttatgtttacaactatgttttattttcaaatggtaaaggaaaggcttcatgttgctatttgaaagtacttctcaactagccgggcatggtggcataattcctgaagtaggaggatcatccccttgaggccaggaggtccaggctgcagtgagctgtgattgtgccctgaccatagcttgggtgacagagtgaactctgtctcaaaaaaaaaaa

SEQ ID NO: 1123 - DNA, 535 bp, Homo sapiens
ttttgaaaaaagatcacagaataattttatttataatgaatgttattctctccagacttcaactcatcagtttactcttataacagagaatcaatttaaataacaccatcaaaatggaatgaatataaaacaatctgctattacgtatcgatttctttgataggatataattatagccaattagtcttgcaacacatggtccatttccagtgaaattctcaataaactgctaggaattacagtccttcatattgacattttattgtaaagtctgctagacgtggctctcttgattgctttggaagtcagtcaaacaaatgctctgaagaaaaggctgacaccgcaaaacaacttcatatgaaatctgtccacaaatgggatagcaatgcctccagatcctttggtttttatcagtccctttggaaagttaattaattgatgattgttcccttaaaattctattttaaataggacaatcactgtctatacagtctgtgccagcgtccttgactttcttgcttccactgatttgttt

SEQ ID NO: 1124 - DNA, 378 bp, Homo sapiens
gagagcacaactccaaatcatcttttattaatataaaaagggcatatttagcaaaagacacacagataaaagagtcactatggctcaggacacaaggcagggaggtgccaggcctgtgcccctgctgggggagaaggaggctcgggacaaagtgggagaagtgctgggaagggctgagcggtaggggccacaaaagttccggtgggcaacactgtcggcaggtcatgggtgggactcatggggacctcgctgctaactcttgttgtgggggggtgtccttagtgctgccacctggagggccactccttggttcctggaggggacccaccaagggacacaggacaggaagcccaggatggttagtgcaactcgggatga

SEQ ID NO: 1125 - DNA, 225 bp, Homo sapiens
ctccaaggcatttattaactcctgagtgtcacggggccaggggaaggctggagcaaaaccaagtctctgggggcgggggtcctctctggatccccactactcagctccccgggctccccatgcagccctagagacgggagaagtccagtgtgctgttcaacttccctccaagtccccaagaaagtgggaggcagtgttccactccagtgtcgtccagacgaacaa

SEQ ID NO: 1126 - DNA, 357 bp, Homo sapiens
tttctttaaccgtgtggtctttatttcagtgccagtgttacagatacaacacaaatgttccagttagaaggaattcaaacggaatgccaaggtccaagccaggctcaagaaataaaaagggaggtttggagtaatagataagatgactccaatactcactcttcctaagggcaaaggtacttttgatacagagtctgatctttgaaactggtgaactcctcttccacccattaccatagttcaaacaggcaagttatgggcttaggagcactttaaaatttgtggtgggaatagggtcattaataactatgaatatatcttttagaaggtgaccattttgcactttaaagggaatca

SEQ ID NO: 1127 - DNA, 378 bp, Homo sapiens
aacataaaaaaataaatttattttgagtctgaaatactgaagaacaagcatacagataaatagtacaaagaacaaaaattagaacatgagtaatgacttaagacacaggcatttttctagctattgcatacagacacatttttacacacaaacatattttttaaagacatctctccaacattctcaaaaggcaagagctgtatttgtgacatttgtaataaatgcaacagcttttgaaacatccagtttctttcctaagtcatttgattaaaattcacacaagtgatgattacctattccattttctgaaaatacgacatacagtcatgtttcgatcaacaattgaccacatatgacagagatcctataagattataa

SEQ ID NO: 1128 - DNA, 425 bp, Homo sapiens
ctgttatgtatctgtgattttatttcttctttgggtatagggttgaggggaaataagttttgagtgagaaataaacgttttagctgaaattgtatcccagaagtttgaaataagtagtagaagagggggaaaacaagggagaagtggtggggaagacttggtagattggggccttaagtaaccacctcctttccctctctgcccccatgacttcctgctccaagttacagaagggaaggaaaccattttactctttttattctgctcattaatgatctgaaagaagaagatggggaaaaggggattccaccacaaggctccaaagaaccaagagtgcaaatcagtccatttcactttcactgtctgagatagggtctctaagaccaggatacaagggtggaatgtagctatatggactcgatttg

SEQ ID NO: 1129 - DNA, 418 bp, Homo sapiens; identical to SEQ ID NO: 381

SEQ ID NO: 1130 - DNA, 286 bp, Homo sapiens
caccactaaaaaaggcttttattacaaaatgaattctaataaaaccaggcctggtcttcaacccctcccgctgggtagaggccctagggtgggctagggtaggggagatgggggtggggggccctgaaagaacagagcaggctgccctcctctcatcagtctcagctgctgccctccttttataaagggctagaagagctcttccaaagccccttgagagagtccccatccttccaaccaggatccttccaaccactgctgtcacaggaccttagcaatgccgcat

SEQ ID NO: 1131 - DNA, 240 bp, Homo sapiens
tactgctttcttgattttatttcaaaagtacacaaggtcacaaaactagagcaagttgtttttcttaacaaattttgttcttacaaatttcaaaatctgcaccattggatatataagccagaaatcgtacatacaaaatctgaaactgacactgtcagttctatactttgcacacgtgaagtgtcagaatattttcttcagtagtacaggtgtatttatcactaaaattcacaattaggg

SEQ ID NO: 1132 - DNA, 434 bp, Homo sapiens; identical to SEQ ID NO: 928

SEQ ID NO: 1133 - DNA, 337 bp, Homo sapiens; identical to SEQ ID NO: 930

SEQ ID NO: 1134 - DNA, 374 bp, Homo sapiens
tttttacaattaagctatttttatttaacatgtaatagtcataaagcaactccatatatttagttttctgatatcctaatgtatttccacaaaccttttaagtctacaattttatatagttttccatcagggaggcaagatatatataatttctttttatatttaactaaaggttttaagagggcttagtctctaaatcagtaacaattagtcataacaccatacaaacacatttaaatattcaggaaagaggttgttaagattattgcttagtcttataaaatggtgaattttaaccaaattgatacctctgtaatcttatttatgtttcctataacatcatactgcttggcaagtaatgtaagttttgacat

SEQ ID NO: 1135 - DNA, 277 bp, Homo sapiens
ttttggtaattaacataatttattacgcaaaaaatgagaaaatatacagcaggagggatgaggagtacacataggaaatttctgtgattttcttcattttgatcgtattgctttcttgtcttcaggagggaagatttcgacttcaaaagtaacaaaatatttaagaagagaattcacatctttctgttctaactggtattcttgcatttattttctcagcagtccaggtttctgggaaaagcttatgattattgagaagtgtcaatgcttctacaat

SEQ ID NO: 1136 - DNA, 463 bp, Homo sapiens
gagttctcattagactgggttctaggcgggctgctccagctccataaggaagcactcgatgtcgtcatagaggctgttggcgctggacaggcagaggctgaggctgctgctatccagggaagacacaccctcacgctgcgtgccctctaggtgcactcggcacagccagggttccagcttcaccaggaccaggctcttctccttgggcctcccagctgacaggtcctgcccgaagcccaggtagatggtatagcgtggggagccacggcgctgccgtcccggaattccaccagctctcggaagaagactctgaagtcgaagatgggggtgtcacagttccgaggcagcaggcaggctggggtggaggggctggcggactaggggggccgcccacctcccagtacaccttgcacttgcccatgcgccgggggcatagttgtggcccctcaagctccaggtgcaa

SEQ ID NO: 1137 - DNA, 413 bp, Homo sapiens
ttttttttttttttttttccaggacgctcacacttagtttttattagccacagtttcccacagttttctacctcctaggaaatacacagctcaccaagggcacccagtcaccattctgtcctgcttgcatggctgacactgttgctcaccgagggtgacaggatctgcaaagtcacccagggcctggtttcctcaggtacagagaaccccaaagaaagaagagccagaacttagagcccctttcttctccatatgggataggacacccaagacaaatgacccatgcatcatgaaacagaggcagggcctaagctgcccaagaggcctgggcacttggagttcctgccaacagccaggccactgaaccattgcctgtccaccctcccacagtgggtaatccctggcctagttgt

SEQ ID NO: 1138 - DNA, 404 bp, Homo sapiens
tttgtttctttgaattttatctttatttctccataagggcaatcagagaaatatgctttcctttttaacaagctcatctttaatgtggtagcaaagatggaaggtgcgagaccaaatcttaccaaactagctatttttacaggccaataaagcaacatgcaatccccctcaacaaatttaaataatcaggcaatactaagaatgtatattccattaaactaaaataaacaaggttgaaatgtggtacagaattcactgatgagcctgtgaactccacgtgaggatgtccagtgccttatttatctcagtaaccagagtacccagcacacaagataaaagtgggtattacctaagtggccactattttattaataatgcacataacatatgcttatcattaactc

SEQ ID NO: 1139 - DNA, 404 bp, Homo sapiens
tttttttgcatcttaagacaaatattcttttatttctgttaaactgaatatacaattgttccctaggcaaccaacttttgcttataactacaatttaatttcacgttgacaaaacacagtgaaaagacaactttgtgaagatctaattacaataataaataaaataatttatacaagggtttttttttcttgacttttctataggggtcatattcattaaaaagcccaaaaggctacctttgccttaacccttctgtagtacaggaatgattctagatttgtttccttttgttatagaagcaaatattgtttttttaaaatagcctgagatgagaggttatattgtaccccaccagctaacacactaagtggatgacaaactattctctcggtaatttatatag

SEQ ID NO: 1140 - DNA, 404 bp, Homo sapiens
cacctacactgtctctgttctctcttccaggaactcctaacattacatattgattgtctatgtcttttttctttctttatatttttctatctatttctttttgctctttatctggagagattccctcaactttattttccagactgtataccaaatacttttagcagtcttattttattttcaaagagatcttcttattctcagtcttctctttcttttcttgctttttaagagacagggtctcactctgtcccccaggctggagtgcagtggcaccatcatggctcactgaagccttgaactcctgggctcaagtgatcttcccacttcagcctcccaagtagctaggaccacaggcacatgccaccatgcttggctaatttttaaaaattattttgtagaga

SEQ ID NO: 1141 - DNA, 193 bp, Homo sapiens
tttttttttttttttttttttttttaggaacataaacttttattgtcatccagcacctgtgatagtttcatgtctctctaaaggagacaggaaattggagcattgtgggcccttttaaaagaaaagaggagtaggtaggcacacccaggtgcttctaaaacaaccaagcccaaacctgacatgctcctcccca

SEQ ID NO: 1142 - DNA, 406 bp, Homo sapiens
agattttttaaaaattttatacaaatagactaactttgatttaaagtaaacatataaaaattgagaagaatattgcttgcaacaatggacttggaaggagaggaatggattaggcaggggtacaaagaaatggctcctactcggtagttccaggcacatgcccagcactctgcagaactctcacagggacaccctctgctgcaccgtgtccttcagcccacaaagtctgactgattttgtaacaacaacttcaggtcaggaaaaaaacaaatgcaagaaaatcggaaggcacaagcacccatgtgatctagaatgttcttggggtgaggaataaggagggaaagggatacttttggttcagcactacagtcaatttcgccattgttgaagaaaaacggtataaaat

SEQ ID NO: 1143 - DNA, 224 bp, Homo sapiens
ttttttttttaagccttatatttttaataaaaaataaacagtctctgacaagcagttttctgaatcccaaaacaaaggaaatttgagggggagaggtgaaggggtcagctagggtaaaggagtgaagaaggctcagattacccctgccattctgccagggcagaagggatcagagtctgccccaactgaagcaagaagaaaggtggtcagacttcaggaaagac

SEQ ID NO: 1144 - DNA, 412 bp, Homo sapiens
taagatcaatattcattcttcatttgccctcgtaacgaaaatagatttttaaatgcctcaaatatacaaacatcattgatgcacacacattccagaaatgcagaggtatgctgctgccacggggtaggggtgcgggaggcggcctggcctcatggcgcatgaccgtgccccagcccgggcctggcaggtagctggccactgataaatgccactgggatcctaggagaagctggggaccatgcgtgaggtactgaaggggaccatggtggatggcatcctgggcactttgtagcttgtctgagggaaaggcctctgctgccatagaaaagctggacacatgtcaccctggggccctgacatcctaaaatgccccactgactaccagtcactaggagaaaggtctccggctatg

SEQ ID NO: 1145 - DNA, 408 bp, Homo sapiens
ttttttttttttttttttttttttttttttttttttcatttttagaaaaaactttatttacaaaaccacaactcagtctgctttggtattgacaaaatccctacaactgagatattaaagagatacatttattttagagttacataaaaccagaatccaacactaccctactttcctattcctttgtggctctgaatgcagctttaaaaaaacaaaacaaagcaaagcaaagcaaaacaaaacagctctttataatgtacaatggcttaagcaaatcgctttagttttttttctatttaagatttaggacagactactcgtctaaaattcactatttacagagaaggtcctagggaacaggataacttatttaggtttagctctcataatacaatatccataatggct

SEQ ID NO: 1146 - DNA, 308 bp, Homo sapiens; identical to SEQ ID NO: 407

SEQ ID NO: 1147 - DNA, 365 bp, Homo sapiens
ttacttttagaattttattgacttttttcttcataactttaaaacaaaaacagcgcatgaaaaccagtgtcttattccaaagtctcaactcagctgattgccaggtgaacatcaccatcttactcctctgaataactagacacaaattacatagcaagttcgtgtttctgcccacccaagacacagccagtaatcagtcacaaacacagacacagccaactccaggggctccagctttctgcccatcttctctcagcagttcctcccatctgctaagatgcgccttcctggtggctctctctcaaggtgggtcaaggctgaacaagacagaaaagcacagtctaggtccaccatcacctcccact

SEQ ID NO: 1148 - DNA, 383 bp, Homo sapiens
tttgaacataaaaattctttatttaacctaatccagccagtattgagatagtttgctatattaaaaacaagacgtttaaaaaaattacagcaaagttagcaaggcagtgactaattaagtcactaagtttaattttatattcttcacagtcatttcataatcatgtaatggtaaacaatattttcagccactttggagataagttaacttttgaaaagaatagaattctagtagtcgtcattgaattttataaaagaggtttaaaacattaaagtttccagaaataacacagtaaagaaatatgaaaataaactggaaaataaaatatacccacccatccgaaaaatctacatcatctctttcatttgtccccaatgcctttc

SEQ ID NO: 1149 - DNA, 386 bp, Homo sapiens
tttttgaccatctccaaatggttctttattgaacacccactttggctaggcaatatcctccccctgccctctaatccaggctcaggtacccccagtggagtatcctcagaaggcaactcccaagaccaggagtaatgagagattgggcagagggtaagggacagcagggagacggaggaaaatgaagacaccagggaaagaggagaggcctgaactggacagctgatgctttgtcctgcccagcacccattcgtcccttcttcaggtaatatcatctgccaccacaaccaccagcaccaactctcagtctctgtgggtacatgccaggcctgtccatttggtgtattccatcttcctggccacaatgatgacttgaggctggatac

SEQ ID NO: 1150 - DNA, 284 bp, Homo sapiens
aagaagaaaaggctgtaattttattttcaaatttttggaagtttttcagaaaaaaataaaatgacaagaacacatacaaatattgaaattattcattgaactataaacacttagcagaggaagggacttttgatgtatttgaatccacctccttctgaaagcaggaatcacttctaaatgtctctcatatctttcttcaaggagtggttttccaggaggttcccagcctcctcaaatctttcccaagtttgatgcacttcacctcataaaaataatatatatat

SEQ ID NO: 1151 - DNA, 355 bp, Homo sapiens
  misc_feature (1)..(355): n=a,t,g or c
acaattctccgcagattttattaattataactttttttttcagacgtcctgccatcttctcattcagacttttcttagcaaaggtagtccatggcaagtaatgaattcccagtaactaggtctgtaacagaagtaaattctgtttttatgtttataaactcaaaaagtaacatgaagtgcaaacacctttagttccttcccctcggtaaccttcttttgatgaaccagtgtgcagcaaaccaggatgaagttggatttgggtgggatccacacaggtcattttcaggcaagatgagacttcccaagttccatgnatagattcatattatcagttattttatgcattcatttctcc

SEQ ID NO: 1152 - DNA, 429 bp, Homo sapiens; identical to SEQ ID NO: 479
  misc_feature (1)..(429): n=a,t,g or c

SEQ ID NO: 1153 - DNA, 331 bp, Homo sapiens
tttttttttgatggtggttgtctctaatatttatttgtctggttataaaattaatatgtgaggagcattggatttggtgagaacgttttgaaccctagctgtcacgtgccacctgcgggatctagaccagtgacttctcagaactgccatttcctcatctggtagacaggatggtaagccctgtcttgctcactccacgtatgggcagtgcagatgaaatgagatcacagaggggaagcaattggcaggctggaaagtgctgacaaatggaaggggttgtgtcaccaccctcagctgaggtagtaccaaggtccaagctcctgcccctccc

SEQ ID NO: 1154 - DNA, 417 bp, Homo sapiens
  misc_feature (1)..(417): n=a,t,g or c
gtaaacactttgctttggttctgtgtctatactggcatctcaggagagtgagatatccagacctgatcttcagaagcactatgagccagtatccatcggcgccactgatgagttccagagtgaggacagtgctcacagctagaactgaccgtccccacacttcatctccctccagggntctcctgctgacaccaggggctcctcaaaattactccttccttcacacatgggtgacaagggttctcaaaaagaacacctgggcagagatgcccactacaggcaatgcttgtgggtgggcaagaagcataaaagaaccccaatgtnccaacaccaggggaatgggattaangccagggggttacccatttgtaaacaaaaacaacttccaaaacccaaccggttaaacngggggaggtt

SEQ ID NO: 1155 - DNA, 412 bp, Homo sapiens
ttaaatgtataaccttaaatatttatttgagaaaacaaataaagatccaaatacgtgagttgatcatctgataaaagtaagagttgacaaaaaaggtacatcttctccaatccgaaaacagaaagtgggaaagatcaaggtatcactagaggtcaatgaaacaaaacatacaatagtggatgacaaaagccaatctctgaatctttgaaaagaatataataaatgaacatctgaaaccagtgatcgagaaatgttttagataaggcacaaaaagataccaagaatgttaacactaggctgtacatcctaaaacagtcagatgagctcactgttataattctggttcaccgcaagaaccttagcacaaagaaaggactcaacaaacatttggatccatgaataaaattatctt

SEQ ID NO: 1156 - DNA, 289 bp, Homo sapiens
ttttcagtcacagaatgttttattttaaacttactgtaaaactttcaaatacaacacatgtggcaaagaaacaacagttcacacacaacatctgccacaattctctttgaactgccatttctattatgtgatattttacaatttctttcaatttcttacattcatggtattcttaaaggcagcaatgtcaatttttctgctttgaaaatagttcagttaatgttctgaaattgcttaacatgacattttccttttagtattctactgctgcccacactgacataattca

SEQ ID NO: 1157 - DNA, 398 bp, Homo sapiens
ttacaaaagaaaacacaaaaccagaatttattgaaagtaggtaccagctctgattagaacaatcagctcaaagataccattactcagaacaatatatacaaaaatctcagggaaaggagaataaaagaacttaaaagaatacaacttgaacaggactgttttactaaaatggtcttgttgcaaaataataacaaataccacagagagccctacatgagaaagccatgtgccttcaagcctggggatgaggactctagttctcaaattcttagaacatagcacatgattctccaggcagagaggctggctggagaatgaggacctcactgctgactctgcttaacaaagtccatgccccaggcacaggcacacatggaatgaggccaccaagcaagtca

SEQ ID NO: 1158 - DNA, 401 bp, Homo sapiens
ttttttttgctgccagctgcatttattgtagcatgtacaaaccactcacagccagcgcctgtcaggggcccaggacactggccagcggggccaaggagccacattgctgggcacatgccccataccctggccacccggcagcagtgcccagcatccctcaatgacagagcagccaggaccccagcggtgactgtcccagaggacctacaggggcatggggccaaagctgggtcctgcaccttgtttggcctgcagatttgatttctgaattaatttctgccaacaacttaaaaaatcaggacatctcacatacaaatctgtatttctggcttctccagatttctgtcattaggcctgcattcccacaccagagcaattagctacacctgaatatggcagcg

SEQ ID NO: 1159 - DNA, 421 bp, Homo sapiens
tcatctttttgttcactaattaatttagctgtgatacttggagtatctgacactctgtcaagaacatctgataatgttgttgagactggcaaatgaagagtacggaatttgtggcctgctccatacattggatgctggatgacgtggctagtagcattaattctacctttgtacagtggacatggagactgaagaaacattgtcactttctcatcttccagcatcaactgtaaaaataatcttcgtataaaccctgaaatgttcccagatgttggaaggttccctctttgaggagatgtctgaaatagttcacaaagaacctgtgccatcagcttttgattattaggatggcatgaaatgcactgtagaaagaacgcaacagttgcattctcaattgctgtgcgctgttgagtagtcagtc

SEQ ID NO: 1160 - DNA, 108 bp, Homo sapiens
gatctgacgttttctacgtagcttttgtattttttttttaaatttgaagaaacactgatgaagccctgccatacccctcccgagtctaataaaacgtataatcacaaa

SEQ ID NO: 1161 - DNA, 407 bp, Homo sapiens
  misc_feature (1)..(407): n=a,t,g or c
tagagacggggtgtcaccatgttggccaggctggnctcaaactcctgacctcaggtgatccgcatgcctcagcttcccaaagcattgtcttttattttntattgttattttntcaacatctaagtatttattaaggtgagtttttacaaacaagcatctatcccagtgtgcggggtgaggatgggagaggagagtggggcagcaggaagatgaggattctcatcttttgataataaagctccagggttcancccattgtggatttcatagtcccccagagacacatgggccttaaaaattgtgtaccacttcttcaggacaatcttgttccaacggggtgccagtttagggctgcaatcagcttcttaagggtccccgatgggnatcanccctgttggcatttaacg

SEQ ID NO: 1162 - DNA, 447 bp, Homo sapiens
  misc_feature (1)..(447): n=a,t,g or c
gtgattaacaggacttttattggtagtaaactagagcaaacaatcagaataatacatatgcagtattcagtacacacaataaaagttaaagaaattcaaaacctgtataaaacaaactggagaaaaatcatacagcttaagagatacagtggtaaaggtcctctccatcctttgattacagcttgtactctgtactcaatagaacttaccgcacttactgaaataagaaataaacactttttagtactcagcgtatttaagattaagtacattttctaagaatcttgcaatgacaagttggtgaccctttagctgctaaagctaaagggaggaaagtgggaaaaggaaattaactaatactttgtaaccatttttaatatttcntattttccaaacactgcttttataacagaagtgttttacacttggcacaatattaattacttg

SEQ ID NO: 1163 - DNA, 210 bp, Homo sapiens
ctcaaaaacatcttttattgattttgtggcaagtactccacagtcaataactcgcacatctgcatatggtctgcttgcagcatcggtcttcagattttcaatttgttcgattacttcaaaaccagaaataaccagtccaaagactacatgcaccccatccaggtgtggagcaggctttgtggtactatgtaataaacatcaacacaaaga

SEQ ID NO: 1164 - DNA, 441 bp, Homo sapiens
ttttttttgttttctacagcaccaaagaaattcaaataggaaaaggagagttgagaattgggaatcaagaatcagccctgtttccatcttagccacaccaacttatatctttatgattttcaaagcttttgccatgtgattctgcccccacaaaggcatcggtatttcctaaatggtacctgtatatgcagcgttgttttctataccatccttattcaaaacttgcatgtggcacaaaatgggttggtgggcaccaaggtatattttctgttgatttgatatgttctttgtcttaatcttaggccaaggaaaacaaacagggaccaacttcaaatccgaacttctggattctgatcaccaaaggtcattgatccatggacatcaacataggggacttggatcaatttttgggggtattggatttccatggacagttttttt

SEQ ID NO: 1165 - DNA, 488 bp, Homo sapiens
tttttaaaacttttaactaaaaagtaaactttaatgtcgaaagtgcaaacttggggaaggcagaaaacatcacacacaaggctgtcacttcacacttggaaggttgcacagcggccgggcagaggcgctcctcacttgccagacggggtggcggccaggcagaggtgctcctcactttccacacggtgtgggggccgggcagaggtgcttctcagttcccagatggtgctgggctgtcggactccattgctggatgtgtgacttgggtttaagcttctcccttctgctctcatctggaaatgctgacagcctgggcatttcctcctttggcactggagactgaagcctggcaaggcctgccctcagcaggaactccccctgggccccactctgtgaccttgagcccaagacaggatttttcctttaccttcttccagccactttgggcctcccggctctctcagaagccctgttaggtaggtgacaac

SEQ ID NO: 1166 - DNA, 484 bp, Homo sapiens; identical to SEQ ID NO: 839

SEQ ID NO: 1167 - DNA, 401 bp, Homo sapiens
ttttttttttttttcccgcagtcacaaaccattttattacccacattgtgctgtgacagggaggggtctccaatgaagaggacctagcactggaaggtgatagccccagaagagaagaggcttctttctcactgtgaggcagaaacaaatttatctgtatgtaaacttttccagtaatgggtgatgctgtgacacctgcagaaagcagcctccctctgttactactataaacacccattctgcaggcagtgtgagggcacagccttctggagtgccacacctgggtaccacggcacactggtgcatcccgggaagatgttcctagggcaccacatcttgggtaccaagaggactgtgtgcatccaattagaccgaggtgcaaaagccaatgcgtcaacatc

SEQ ID NO: 1168 - DNA, 533 bp, Homo sapiens
ttttttttttttttttttttttttttggagtttaaaaatcctttattaaaaaaccccaaacggaaatgttccaaaaaaaataaacacgtttctattaacatatcccattaatcctattagttggaataagatttaaagcccaatttggaaaagcttgcagaatttcttcggaaattcctaaaaattacggtaggcaaaaacttacaaaaacatatgctatcccagggcggggaaaggaaaaaaggggaaggggctacaaaggccccgggggcatcacctgcccacctgggacccaggggtccgggaaactgtcccgtaacgggaaacctaccgggatgtaaaggtccataagttacaaggcttttttggtttaaaaaaaaaaaaaggtctgtactttccaggccaaaggtgaaatggcccaaacaccccttaacgctttcaggtcccccaggccctccattggggtgggaccccctaggaacaatttcggggtacaaactttcccggaatttaggcggaaactgtccgggaaa

SEQ ID NO: 1169 - DNA, 339 bp, Homo sapiens
cctttctttcctttagaagaagtagatgaacgagacgatgcagcagactgggctcctgatgaatgctgggaggtaacatccacagaggaaggatcataggcagactttctgttagaatggtcctcctgagggcttaaagtgctatgaggttcaagagttgattttttttctgtcgaagtcccagtccctggagaggagacaaaatcatcttcatatgaaacaccacttagaggagttgcggtggcattcaaaggccgtgatgttgatgttcctctgtccaacttgtcttcaaacccttttccatataactgataggattttgtaaaaatattaatgacg

SEQ ID NO: 1170 - DNA, 346 bp, Homo sapiens
ttgttttttttttgtcttttttttttcttttccatttcgttgaaatatttacagcaatggggaaggaggaggagagaggaaggagtaagagggccccctagggaaagatccaagcccaggacccactccccagggagatccagacccaaaatctgctccccagatagccgagcccacaggactgggaactgcccaaatatggccacccctgtgggctgggggccctgcggggaagttgtgcttcatcaggagtcgccccaagggagggggtcattgggtgcactgggaggcagagggggcaggtttgcttgcggggcagggaccaagagcaaggggaaaggagctt

SEQ ID NO: 1171 - DNA, 384 bp, Homo sapiens
ccgtgtcacttctcacttctaaatagctctagacttggtcccattgcactaacttaattcactctccatcatctttggcttggagtacaactccgtccttccatctaatctgcctgtctccaatcgttctcccctttgatgtgcagggcagccactgatctctctaacatttacagaagaatgcaccacttgggttgtttaaaacccttcaatggcttcccattgccccaagttcaaactctgcaatgtggcctacacatctctctagcttcacctcctgctcaatatcctacagcacagtgaagttcttggtggtcctcaaaagggccctcaaacttcaaacattcccttcaacctaaaatcctcaatggacattactgagtc

SEQ ID NO: 1172 - DNA, 494 bp, Homo sapiens
ttattttttttttttttttttttttcaggatttggtatgttttattagagcaaatttttaacaaaaggtggctttcatttacagaatttaatgtgtgtggggactgtccaacccatgtggactcaagtaaggataaccattaagcttgctaatgtattttcttattttcagtttacatacaaattttttttgtttgcttcacattcataaaaaccccaatactgtaaatgacaaataacccctcccatcccttaattaaatatacaaacagcctgaaaacatacaatttaaattggtttaatcttgaagtgtaatccaataagactgaaaactaaacatttcaagtcttgtaccaaatagtaaaatactcgaaggccttcaggatcctttgacggatttacatcaataagagaacctatttttgatgtggtaaaagatatgtggctctctccaattacattttcaagctcctgtcggccaacccttttaggggg

SEQ ID NO: 1173 - DNA, 241 bp, Homo sapiens
ccagttttgtccaaaataatttatttaccagccttacaaaaaacatgtcggcaagagaagaatcagtcccgtaggagcaggcaaacctctccttccttccggtggctcccctaggacctgccggagagtggagagtccggtgggggggtcccaagcccagggtggacgaggaaaaggtcaggaaatagaggattgtcctgagccctcctggccatgggggccgacccagtgggcactgagg

SEQ ID NO: 1174 - DNA, 403 bp, Homo sapiens
tttttttggctgttaaaacgttcacccccacaaaaggggagtggacagatttattgaaatcaaactgggaaaggagcagctggacggctggactctgggcccagcccaggccccgtctgcccaggatgggcccttgcagagagggaggagaggcatggggcctgcagctgcccacaaggaagcgcccttggttacttccacggtggggggcctcttggaaacctccaatctggaaagaaaaccaagggccaaagtcacatggacagggccagagaaagggactggggaggtggaaagcaggcagaagcaggctcaggagcccgcagtgagttaaactgtgcttctcaaggcggcctggggggtgtgggtgggggctgccagccttgcagggggcctaggctgg

SEQ ID NO: 1175 - DNA, 253 bp, Homo sapiens
taactcccagtcaccctgttttatttcaaccatggagaaaagtacagaggaaaggctgcatatggagagactgtcgggctgacggtgtcacagcagatccgagtccacgtgtggaaacagcagccgcccggccctgggtgtttcctccaggaaaggcctggtcagtgaatgcctgcaggcagcagggtgtcaggaatcacctgcccgatgccagcgctgctcttgtctggagggccagactgtcatgaagtca

SEQ ID NO: 1176 - DNA, 118 bp, Homo sapiens
tttttttttttttttttgccacacacagcactgggtggacttttattttaaagtcaaaggcacagcctggctgggctgaggcagtgaccatggatgcccagcccagacccccaaggcc

SEQ ID NO: 1177 - DNA, 382 bp, Homo sapiens
aattcttttttagctcattggctatccttagcgtacattatgtatggcccaacacaattcttcttccactgtagcccagggaagccaaaagattggacactcttgttttaaatagactatctttttacccttttatttgttccaactcaggataaatatccaagtatctagagggtctatgtgtgctatctatacaataaaagatagttatataaaaatgaagagttctccataccattatataaacaggaggttttacaggcattagtgatactctgttggactcaatgggtttttttctctcttatagctatgaaagactttatgccagtccaaaatatacaatgttgaaagacaggttttgaaataaatattctcccca

SEQ ID NO: 1178 - DNA, 519 bp, Homo sapiens
tttttttttaatggtttggactgcaaactagtacttaggctttcagcaacttggcagtgtttgtctgatgcagatactgcacccagttttaaaaaaggcttattactaaataaactagtgaagttaacaactgaaggagtaatagtatgaatgctggattcagaagtcaaacttggcttttttccaagggaagagcttattcttggaatatctatatgggtagtttttgaatcatttacctctttatcaatccctttacattcaatacttatactatgaccaactgacctatgaccaacgttcaagtgggtactttcagaagtaaactggttctttccaacagattcagaaatttcttcgattagttctgtagtagaacttaaaagtaatggattaggagccaactgtgaagaagtttcagggggacttctggttaaaggattaacagatacagtaggtgatggggaagggaagatgctttccccaagtgcccgaaggggattaggggtaaatacccca

SEQ ID NO: 1179 - DNA, 347 bp, Homo sapiens
  misc_feature (1)..(347): n=a,t,g or c
gacacgkgcacntctttattggaaaagaataaagcagtcacngatgtggcaggggcaggacacgagcagctgccgtccyccycccagsgtgcctggcatggtcgcaggggagcgggtbcctggagtcccggtgacaccacggggcacactgagggagctgaggagccggggccgcgcasctcctggdtgctcagcggatcgtgtacttktcccacttcttttcagggtcgtagggttcccagcggctggcgggaaagatgtgcttkttcttctcgtaccagctcctcagcaccaccttgcctgcatgggrctcatccttctccacagtgggsgtcactgagcaaccg

SEQ ID NO: 1180 - DNA, 387 bp, Homo sapiens
  misc_feature (1)..(387): n=a,t,g or c
atctttctctttattctgacaacattatgacattaaataaaanccaagnggtattggattagnccttgtttggnctctggngatttagataaggcagaactgagcccctcggaatgtattatctcaaagngctagtagcagctgctatgcaaagttctaaggcccgagtcaaatcctgggcatctccacagatgtgtggtagggcacgggctccagctcttgtgtaagaaagancaggantgagancagctttattttgtaggcgccaaggtctcactatgctcacacctgtaatcccagctttgagaagaggatctgggcaccagaagggtctgggtaggaaggaaagtggggaaagggtgaaggncagggaatcttttcccttct

SEQ ID NO: 1181 - DNA, 353 bp, Homo sapiens
  misc_feature (1)..(353): n=a,t,g or c
aaacatgtttattagaaaagtaaaaaatattgcataggncttaatacttgaacatcaagtgtattcatgaacagtgagtatcttancttcatgtaaacagtnctagatggaagacccagatggcactcctcccggggngggntnccagcccccaccctctcagcccctcccctgccagctcaactctgcagtacacgatgggggaaggcttaaacgcagctgccagggggtaatttttcaagtgtcaaagancccaagtgatccctgnacacccaccccttcctactcttacattcatgcggtctgtaagataggctgcctacaacagggtcagtaggngatggctccgatcc

SEQ ID NO: 1182 - DNA, 195 bp, Homo sapiens
  misc_feature (1)..(195): n=a,t,g or c
cataatacatatatttattgccatcagagttctgcaattctcataaaattagagtcagatggaattcagggacacgtgcaagttttggaaatggacacagataacagtatagaactgtacacaaaataattaccatttattaaacacactggtttagnacaccctggatggatgagaatgngcnccataattttt

SEQ ID NO: 1183 - DNA, 437 bp, Homo sapiens
  misc_feature (1)..(437): n=a,t,g or c
cataatgctaatgcaagagggcttgaagtatcaaagagtccacaggaaatggatgcccccagtaatatcttttttttaaaaaaaatatacattatataatatatattatatatataanangctagtgtaaatgcttccatggtgtggtcacaaatttgaaagatgaacctcctttcagctgttaaccatcttcccatttgcaacaggttttaaaaagtcgtttttatcttccnacataacatgnntttncntaatgaggttgccagcactgacagatgtggtgatggggaggcaacttgcattgctaatagacactgggagtggctggctaaagcaagaagttaccggcagaattgttttttgctcctccagaatcacatggtcttcacctaaactctgtttcttctgctttggtggctccntttggtgcngctgga

SEQ ID NO: 1184 - DNA, 366 bp, Homo sapiens
  misc_feature (1)..(366): n=a,t,g or c
ttttgagagctgatgacagacaacagcaagctactttacagaatctaccaactgggtaggaaagtcttctgagtttctttgcagacaagaaaagttacctgttgattgttggccaatcaataagggactttcctctctgccattaagagcaacgatgctgaccacatactctgtgcctggagtgaggttggtgagggtgatggaattccgagagtggggcacccgatcttctcgaggtctcccactgaagtgctcgggatgatggcggatcctgtagccagtgatggtggctcgaggagcaatccagtgcacagtaaaagagttggcagtaatatccagaaaagtcaatacccatttggggantca

SEQ ID NO: 1185 - DNA, 295 bp, Homo sapiens
  misc_feature (1)..(295): n=a,t,g or c
ttttttttttttttttttttttttctgagatggttctcgctacgttgcctaggctgtagcgcagaagctatacacaggcatganggcagcacactacagtctccaattcctgggctcaagtggtccttctgcttcacctcctgagtagctgggactacagggacgtgccaccccacctggcatgatacctatttcacagantctgttactatagaaaaacagctctcctactcacttttttcttgtaaaattgtataacattattaggcaaaactgggagantacaanttttaaa

SEQ ID NO: 1186 - DNA, 344 bp, Homo sapiens
  misc_feature (1)..(344): n=a,t,g or c
ttggatacccaagaattaattttagaatttaaatttggctttagtatcagtaagtacggatatcacatcctcagaaccaaaaacgaacaactcattttcttctttcaggaaattaaaagctacaaaggcaaaaagagggttgaggatatatgaatataacaacttttaactagctgactaattaaagagaggattagcaaagataattgaagtctacttataatttcaaatttccattttgaaaaagttttatttttaattcaaagaggattaaaataagggngccaaaactgatatggaatttcaaatactctttctctgcccaatggatccanaaccaatta

SEQ ID NO: 1187 - DNA, 382 bp, Homo sapiens
  misc_feature (1)..(382): n=a,t,g or c
tttttntangaaatgacaagtaccgtttattgtcgttacacaaatgaacccagcctctggcttgggcaccgtcccacggaccagcagatgagcatggtcagccgacccctttccccacccccgagtcatgtgcagtcatacantccagggagaaagtcgcagtntcgantaccggacacaggttcccttggnttggtggngcatctntgatccacagantggcccacctntcggagtggccaacggagtcgntgaaacgttgtcaaataagncaagtaagtgcaggagccctggggntggggggcctntggcttntgncagccgggtggggaggagggatntccaaggtttctgcggggtagggcctcggcttccanacctc

SEQ ID NO: 1188 - DNA, 404 bp, Homo sapiens
tttctaattgagcaactttattcacataatttctacaccaagaactcgaggttatctctgatggaaccaatttcactaatatttactttaagggcagagaagtcaaccaagtcctcacagtctcaagaatcaaaaacaaaacaaaaatacaaacagagagcaagtgggaagataaataacactccgaaataacctagctacacacttttagtttccaatttttctagcatgaaatcacttttctcttccatcctgtaagacgtgttctctcctctctcttctgagttgggctgtgaagagctgccctgggtctcccgggtctgacgggtgttgtccaccccatctgagggcacccaggggaattgccctgggggtccggagccctgggggtttctggatagcct

SEQ ID NO: 1189 - DNA, 431 bp, Homo sapiens
  misc_feature (1)..(431): n=a,t,g or c
aaccggatgtctcagactgtaagcgaaggacaaatttgtgagatttggggtctatgaactcttcagagagtatgatgaatggaattttcttcacattgactacgaggctgaagtccaagcacttaaggacgaacacaattccatcccgtaatccattagtcacagcctcatcactgacaagcctccactgtgtagagagccagcggnccttgtcatattgcagggtggggcccgcactgaggtaccgttctaggnaggccttgggggtcatgccngttggtgatgcagaaggccagggtgctgcaggatgctctcccatgctgtgggtagttctgctgccggggtnatgcgcaggtacttctnggagagccctgggccatnggaggggaaaattgcctngggcngcctccctagggtccntcactncccta

SEQ ID NO: 1190 - DNA, 3323 bp, Homo sapiens
tagtggtgggtaagaaaattggaagtattccctcctcatttggtgggttggtggctgggaatatctgttcccttggaaatgtttgatgctactctgaaagatcgagaactgagctttcagtcggctccaaggtactaccatgtttctgcattggctagtgggaatggtatatgtcttctactttgcctccttcattctactactgagagaggtacttcgacctggtgtcctgtggtttctaaggaatttgaatgatccagatttcaatccagtacaggaaatgatccatttgccaatatataggcatctccgaagatttattttgtcagtgattgtctttggctccattgtcctcctgatgctttggcttcctatacgtataattaagagtgtgctgcctaattttcttccatacaatgtcatgctctacagtgatgctccagtgagtgaactgtccctcgagctgcttctgcttcaggttgtcttgccagcattactcgaacagggacacacgaagcagtggctgaaggggctggtgcgagcgtggactgtgaccgccggatacttgctggatcttcattcttatttattgggagaccaggaagaaaatgaaaacagtgcaaatcaacaagttaacaataatcagcatgctcgaaataacaacgctattcctgtggtgggagaaggccttcatgcagcccaccaagccatactccagcagggagggcctgttggttttcagctttaccgccgacctttaaattttccactcaggatatttctgttgattgtcttcatgtgtataacattactgattgccagcctcatctgccttactttaccagtatttgctggccgttggttaatgtcgttttggacggggactgccaaaatccatgagctctacacagctgcttgtggtctctatgtttgctggctaaccataagggctgtgacggtgatggtggcatggatgcctcagggacgcagagtgatcttccagaaggttaaagagtggtctctcatgatcatgaagactttgatagttgcggtgctgttggctggagttgtccctctccttctggggctcctgtttgagctggtcattgtggctcccctgagggttcccttggatcagactcctcttttttatccatggcaggactgggcacttggagtcctgcatgccaaaatcattgcagctataacattgatgggtcctcagtggtggttgaaaactgtaattgaacaggtttacgcaaatggcatccggaacattgaccttcactatattgttcgtaaactggcagctcccgtgatctctgtgctgttgctttccctgtgtgtaccttatgtcatagcttctggtgttgttcctttactaggtgttactgcggaaatgcaaaacttagtccatcggcggatttatccatttttactgatggtcgtggtattgatggcaattttgtccttccaagtccgccagtttaagcgcctttatgaacatattaaaaatgacaagtaccttgtgggtcaacgactcgtgaactacgaacggaaatctggcaaacaaggctcatctccaccacctccacagtcatcccaagaataaagtagttgtctcaacaacttgaccttcccctttacatgtccttttttgtggacttctctctttggagatttttcccagtgatctctcagcgttgtttttaagttaaatgtatttgacttgtgttctcagcattcagagagcagcggtgtaagattctgctgttctccctggatcttctgacattactgctgtctgagatttgtatatgtgtaaatacaagttccttgataccctaaaaccttggattaaacagaatgtgcattgtacatctttaaacaaaatgtatattaatttattaaatctagttgtcactttattttggacctgctgtgatctcgacaggaaacgtgccacagagcagtagtgcgcaggcaagacttttcagtgacgccttgtggaacgcagttcatgatgtcctagcagctctcactaagggaactgtacattctttctttcttggctattcagaccttaccaagaacgttaaaggaaacaagtagaaatcagcagtggagtgtctgtggtaagaaaacatgaactttatgcttcactgttagttgtttgtggaagttattttgtataacaccaaagctgttgtacatttcctactgcctgatttttttcatgtgtctgtgtttgtaatattgtatagtatcttgtgctaggtgaggaaattattttttaattttgataatttaatattcctagtgtgatcagcattgggagttgggtttcagtggggcatgtctatacttagagaaaaaaagtcccaatgaagattttcatgagtcagcccccccgcccgcccccaccccacacccacatcctctcttttccacacacaactatctgtttattttttgtagcagtggccgaaagtcctgcaaggtcataaatctttcagagtgacatcaccaactgtactgcatcttactggatttaggacttctgagatgcttgtgaagtatagatgtggttgtggtcttagattgacagcattagagaagactggttagaacatctggtctcgctggttagtgcctcgttggctgaggactaggtgtgcatttctcctagcttttcatcaggaaatcccaaagtttccaaagctttttgtttacagaataaaacttcaaataaaaccaattcattatttgtccagaaggaagcttggctgagctggccttttaacataggaatgtatttcgttggaaacattctgaaaaatctcagagaactgaacccttacaaactttgttttccctcataaccaaagcttcaggttagaagtttagaaaaatagaatggttgggtacatgatctaaatgtttaatgctaaaggtatatcgtaagggtagtgtttgtttttgaacgataatttagaagttctcatagaaagcgtataacataggtcttcagaaactataaaagaattttcatatagtattaaaatccatagactaaaatctgagaattttttaacatatgcaagtcagccaaacataagctaccaaaataaagagcaatgtgttctggctgttttatacttcaacaattttttccctaagtggtaagcaattactttaaaacatatttttaaaaacatcggtatcgggagctgcggtggctccggccggttgtcctggcacacaaggaggcgaggctatgcgttcgaggccaacctaggcaaaattggaaaaaaaaaaaaaaa

SEQ ID NO: 1191 - DNA, 18596 bp, Homo sapiens
cctgtagtcccagctacgcgagaggctgaggcagcagaattacttgaacccaggaggcggaggttgcagtgagccgagatcgcgccactgcactccagcctgggtgagagagcgagactctgtctcaaaaaaaaaaaaaaaagaccgccagggctcaaacaaaaaacctcggaaaagccctggcggtcttttttttttttttttttttttttttttgggacagtcttgctctgtcgcccaggctggagtacaatggtcggatcttggctcactgcaacctctgcctcccaggttcaagcaattcttctgcctcagcctcccaagtagccaccacgcccagctaatttttgtacttttagtagagacgggggtttcaccatgttgtccaggctggtcttgaactcctgacctcaggtgatccacccgcctcggccccccaaagtactaggattacaggcgtgagccaccgcgtccagcgccctggcggtttttaatcaagtagaaaagctgcattataccacttgcttcggttgcttcagtgagaacgaagaaatggaaatgcaaatcccttattagttgtaggaaacagatctcaaacagcagttttgttgacaagaccgcaggaaaacgtgggaactgtgctgctggcttagagaaggcgcggtcgaccagacggttcccaaagggcgcagtccttcccagccaccgcacctgcatccaggttcccgggtttcctaagactctcagctgtggccctgggctccgttctgtgccacacccgtggctcctgcgtttccccctggcgcacgctctctagagcgggggccgccgcgaccccgccgagcaggaagaggcggagcgcgggacggccgcgggaaaaggcgcgcggaaggggtcctgccaccgcgccacttggcctgcctccgtcccgccgcgccacttggcctgcctccgtcccgccgcgccacttcgcctgcctccgtcccccgcccgccgcgccatgcctgtggccggctcggagctgccgcgccggcccttgccccccgccgcacaggagcgggacgccgagccgcgtccgccgcacggggagctgcagtacctggggcagatccaacacatcctccgctgcggcgtcaggaaggacgaccgcacgggcaccggcaccctgtcggtattcggcatgcaggcgcgctacagcctgagaggtgacgccgcgggcccctgcgggacgggtggcgggaaggagggaggcgcggctggggagagcgctcgggagctgccgggcgctgcggaccccgtttagtcctaacctcaatcctgccagggaggggacgcatcgtcctcctcgccttacagacgccgaaacggagggtcccattagggacgtgactggcgcgggcaacacacacagcagcgacagccgggaggtaagccgcgtcccagcggctccgcggccgggctcgcagtcgccccagtgatgccgtggcccccgaggcgggcgtcatcgggcagcgtttgcccagtgctggagggttagggagagctgcctgggcttgaccgcgcgccggtctcaaagtcctggctttggcccctcctccgttttcccctgtggaccattccgcttcgcagcgttttcaaaaactggagcgaaagtgatgtgggcggggcaaaggcggcgggaagaggacagcactgaagctggcgcgggaacttggtttcctggtggcctcccatccaatccccacgaaccagctttcctcttaaaccttgaaaagagaaattcgggagttcgagttcttagtcgtcctttcctctttcctttccgacaggagcaccccaggcaaaaaatgtctcgcgggtcattggcgccaggctttcaggggacagtggggcggggcggggtgggcacaggacgttaggcagccgttggccctccctaaggccacaccgtcctgccgtcctggatcctgcgccagctgcgcgggggaggggactcgaaggtgtgtgagccaggggctgaccttgaccgctcagataaatggagcgcagccttgacacaggggtggaggtggttttgaatggggaaacccattcgtggtgaagcagattcactgtagctagcggaaaagccctccggcccacggacccatctagagacgaatacatagcagctgctgtggctgattggcgtgggacagcgtggggagttttgtctgaggagagggatccacttttctgcagctccaagcccaggggcctttgatgagccatagacctcatttttaacccacctttctgcttagacattgagcaagttacttctcatatagcttccctatatgttaaaaatggagaaaataatgcttagtaggcaattctgataaaagcaggtgcttgcaaaaatctctctgttgtctgaatataaactgtaccacaagcgagtgcggatgaacgaggactgcatttaaagataagtttttacactttcatttctctgtggctcgacacttctgatgcctccctttttgttcctgggacacatgcttggtgttgtcttcacacctttgtgacaggattagcactagtgggcagtggatgatagctcctcctcccttttgccacatgttcatccctgccctcgccaccatctcactgtgtggaattcctgtgtccactggtcaccggggcacagaagtgctgtctcagcctgaatcgggccactgatgggacttgcagcctgggagctccaccgtgatctctggcccactttgcgggagtctaggctttctggatgctccaggcctcacgtcccagggcagttttcttccctgaagaaagttggatggcatgatctgtcttcccatcttgaaaccgtatggcaaattgtttttcagatgaattccctctgctgacaaccaaacgtgtgttctggaagggtgttttggaggagttgctgtggtttatcaaggtaaagaagtcgctgctattagaagtcagtagtctgttctcaacacagcagccagtgagatcctttcaaaactcaaagcagccaggtgtggtggctcacgcctgtaatcccaccgctttgggaggctgagtcagatcacctgaggttaggaatttgggaccagcctggccaacatggcgacaccccagtctctactaataacacaaaaaattagccaggtgtgctggtgcatgtctgtaatcccagctactcaggaggctgaggcatgagaattgctcacgaggcggaggttgtagtgagctgagatcgtggcactgtactccagcctggcgacagagggagaacccatgtcaaaaacaaaaaaagacaccaccaaaggtcaaagcatatcattcctcaccctcaagcccttagtggctccatttcactcagtaagagccacggtccttatggtgtccgtttttcagctctgaccttagctgctgctctctgcaccaccctgctgttcttgtgagtttttgagcacaccgggacatccccactccctggaaccttcttcccccacacttggcttcttcctttgagtctctactccactcgggcaagccttcctagacctcctgatttaaaactgtgactctcccccaacctccttggtgtttctccgtagacgaacatcaccatctgatgtatgtcagcctttcccttcccctgttagaagggggacagcaggtagtaaaagtgaaatgtgctgtaagctttatgagggcagaggatttgtttctcgtgttcactgttgtatcgccagggcctcaaacacagcctgccacatagtaggagtcaacatatattgatcactaaatgtagataccacctgtgttcccatgttcatataaattctagaagagtctcttcagtaacaaggtgaaccccttccagagggctgagtaggtacctcaggccggggccagagtgctgtgaagacagcagcagcccagaccaagcttctctgtgttccgtgtcctggtctagaaccagcgatgttctttctgaccagtgctttttggaaggtggctgaggtctgggctcaggtctgggccatactagaagctgggatcccttctatagagcacttggtatggcttgtatggtcttggggcaagccagacccaagccctcttatcccattttagaaagggcttcaatttggatccagccccaggtctgccttagctctgtattcttggggtattttgttctgtattggcctatcttgactaacaatgagccttggatttgaaacatatcatcagaaacctcagaagacaacattcttaaactggctagagcctggtctgaatggatgaaaaggagagacttttgaagcaatatgtaaaagattgagaaatgatttgttggaaatttctcaattggagaaatttctttgatttgttggaaatttctttgattctttctcaatcaaagaaaatcgggacaaactcaacaatagaaagggaggaagcaagatactcagaaataaaatgcattcccctgtttcaacttaatgcttcaattcaggattctaaggaatccttgccaggaatgtcagactcaccttgatagttggagttactccattggtgactcgatcaaatacaggagttgaggcacctgcactgtaaaatactgattagtctgatcattaggaatatcctgtatgccaggtagaagatacattgaacagattgcatgtaggcattaaattcattttggggtattacatatagacaacacatttcattaagaaacataaaactgtcagatcggtggaatacttaaaagcacttggaggtgtttagcctaaaaagcttagttgaggggaatggaagaaaagatctgggagggtggttccaaagaagggatcagactatcctaaagccctcaggaatctgggctgggaccacctacttaaagataggatgggcagctgggtgtggtggctcacgcctgtaatcccagcacttcgggaggccgaagcgggcggatcacctgaggtcaggagttcgaggccagcctgaccaacatggagaaacgctgtctctactaaaaatacaaaattagctgggtgtagtggcgcatgcctgtaatcccagctactcgggaggctgaggcaggggaatcgcttgaacctgggaggtggagggtgccgtgagccacgatcgcgccattgcactccagcctgggcaacaagagcgaaactctcaaaaaacaaaaaaaaggatgggttccatatgggtggtgtcaagtgcccacctcctagcaagtcagcaggggccagaggcccttgtaagtggtgtctcggggggatcaactgagatggcttaagatttacctggatgcctgctctgctctccccatctcttccagggatccacaaatgctaaagagctgtcttccaagggagtgaaaatctgggatgccaatggatcccgagactttttggacagcctgggattctccaccagagaagaaggggacttgggcccagtttatggcttccagtggaggcattttggggcagaatacagagatatggaatcaggtgaggagatagaacaatgccttccatttccgggtgcccttcctagcacgtgtttgctccgttgttttagataaggtctgggggatgagtcaatgtcacaggagctgatgtatagctttgaccttgtgaggggtggtgccaggttgaagccacaattaacgcctactgaaggccgtttcacatcttttttttttttttttttttaattattatactttaagttttagggtacatgtgcacaatgtgcaggttagttacatatgtatacatgtgccatgctggtgcgctgcaccactaactcaccatctagcatcaggtatatctcccaatgctatccctcccccctcctcccaccccacaacatccccagagtgtgatgttccccttcctgtgtccatatgttctcgttgttcgattcccactatgagtgagaatatgcggtgtttggttttttgttcttgcgatagtttactgagaatgatgatttccatttcaccacgtccctacagaggacatgaactcatcattttttatggctgcatagtattccatggtgtatatgtgccacattttcttaatccagtctatcatgttggacatttgggttggttccaagtctttgcctattgtgaatagtgccacaataaacatacgtgtgcatgtgtctttatagcagcatgatttaatagtcctttgggtatatacccagtaatgggatggctgggtcaaatggtatttctagttctagatccccgaggaatcgccacactgacttccacaatggttgaactagtttacagtcccaccaacagtgtcaaagtgtcctatttctccacatcctctccagcacctgttgtttcctgactttttaatgattgccattctaactggtgtgagatggtatctcattgtggttttgatttgcgtttctctgatggccagtgatggtgagcattttttcatgtgttttttggctgcataaatgtcttcttttgagaagtgtctgttcatgtccttcgcccactttttgatggggttgtttttttcttataaatttgtttgagttcattgtagattctggatattagccctttgtcagatgagtaggttgcaaaaatgttctcccattttgtgggttgcctgttcactctgatggtagtttcttttgctgtgcagaagctctttagtttaattagatcccatttgtcaattttggcttttgttgccattgcttttggcataggcatgaagtccttgcccatgcctatgtcctgaatggtaatgcctaggttttcttctagggtttttatggttttaggtctaacgtttaagtctttaatccatcttgaattgatttttgtataaggtgtaaggaagggatccagtttcagctttttacatatggctagccagttttcccagcaccatttattacatagggaatcctttccccattgcttgtttttctcaggtttgtcaaagatcagatagttgtagatatgcggcgttatttctgagggctctgttctgttccattgatctatgtgtctgttttggtaccagtaccatactgttttggttactgtagccttgtagtatagtttgaagtcaggtagcgtgatgcctccagctttgttcttttggcttaggattgacttggcgatgcgggctcttttttggttccatatgaactttaaagtagttttttccaattctgtgaagaaagtcattggtagcttgatggggatggcattgaatctataaattaccttgggcagtatggccattttcacgatattgattcttcctacccatgagcatggaatggtcttccatttctttgtatcctcttttatttcattgagcagtggtttgtagttctccttgaagaggtccttcacatcccttttaaggtggattcctaggtattttattctctttgaagcaattgtgagtggaagttcactcatgatttggctctctgtttgtctgttattggtgtataagaatgcttgtgatttttgcagattgattttatatcctgagactttgctgaagctgcttatcagcttaaggagattttgggctgagacaatggggttttctagatatacaatcatgtcgtctgcaaacagggacaatttgacttcctcttttcctaattgaataccctttatttccttctcctgcctaattgccctggccagaacttccaacactatgttgaataggagtggtgagagagggcatccctgtcttgtgccagttttcaaagggaatgcttccagtttttgcccattcactatgatattggctgtggctttgtcatagatagctcttattattttgaaatatgttccatcaatacctaatttattgagagtttttagcatgatgtgttgttgaattttgtcaaaggctttttctgcatctattgagataatcatgtggtttttgtctttggatctgtttatatgctggattacatttattgatttgcgtatattgaaccagccttgcatcctagggatgaagcccacatgatcatggtggataagctttttgatgtgctgctggattcggtttgccagtattttattgaggatttttgcatcaatgttcatcaaggatattggtctaaaattctcttttttggtgtgtctctgcccagctttggtatcaggatgatgttggcttcataaaatgagttagggaggattccctctttttctattgattggaatagtttcagaaggaatggtaccagttcctctttgtacctctggagaattcggctgtgaatccatctggtcctggactctctttggttggtaagctattgattattgccacaatttcagctcctgttattggtctattcagagattcaacttcttcctggtttagtcttgggagagtgtatgtgtcaaggaatttatccatttcttctagattttctagtttatttgcgtagaggtgtttgtagtaatctctgatggtagtttgtatttctgtgggatcggtggtgatatcccctttatcattttttattgcgtctatttgattcttctctttttctttattagtcttgctagcggtctataaattttgttgatcctttcaaaaaaccagctcctggattcattaattttttgaagggttttttgtgtctctatttccttcagttctgctctgattttagttatttcttgccttctgctagcttttgaatatgtttgctcttgcttttctagttcttttaattgtgatgttagggtgtcaattttggatctttcctgctttctcttgtgggcatttagtgctataaatttccctctacacactgctttgaatgtgtcccagaggttctggtatgttgtgtctttgttcttgttggtttcaaagaacatctttatttctgccttcatttcgttatgtacccagtagtcattcaggagcaggttgttcagtttccatgtagttgagcagttttgagtgagattcttaatcctgagttctagtttgattgcactgtggtctgagagatagtttgttataatttctgttcttttacatttgctgaggagagctttacttccaactatgtggtcggttttggaataggtgtggtgtggtgctgaaaaaaatgtatattctgttgatttgggatggagttctgtagatgtctattaggtctgcttggtgcagagctgagttcaattcctgggtatccttgttgactttctgtctcgttgatctgtgtactgttgacagtgggtgttaaagtctcccattattaatgtgtggagtctaagtctctttgtaggtcactcagatgattggcacttactgggcgcttggcactttccatactgtgtcatcggcagatagctgcatggttggtgttcgtgctggggaatgggaagttcatcggtgggacaaggacaaaatgcccccattgctttgttgtggctttaatctccctttcgaggctgagccacagcgtgctgtaggtggcgctgctgtgaagcgcagtaccagggtcacactccactcccagctctgcagaggtggagaaagaatgaaacatctcactcctggacttccactttcctgtcactgttggtgtcacctcttactggatgtcacagagcccagcccctcccacctgtgcctaggaaaagcagatgccaccttggaatgtggggtttgtgtgtgcaatttactagctgggcagagaccagcaacctggagagcaggtgtctcgtctaaggggacagtcacatttcacctccagccacctggaggaatttgggcctggtgatgtcagaattcttcaataaaagcctaaaatctatattttatgtgcggtcatgagatctgttaaatgttagcaacttcaggaagtttaaaaatgctgtgtggacctagaataggcaagttcttaaaggcagaaagtggaatgctagtttccagggactggggaacagggaggaatggggagttcatgtttaatgggcacagaggttttgttagggatgacgaaaaagttcgggagatggtgatggtgatggagatggtgatggtgatggagatggtgatggtgatggtgatggtgatgggtgatggtgatggtgatggtgatggtgatggagatggtgatggtgatggtgatggagatggtgatggtgatggtgatggtgatggagatggtgatggtgatggagatggtgatggtgatggtgatggagatggtgatggtgatggtgatggtgatggtgatggtgatggtgatggagatggagatggtgatggtgatggttgcctaacatcaggaacgtgcttaatgcttctgaattgcacacaaaaatggcaagtttaatattatgtgtactttatcacaatgaaaaaagctgctgcgtgggccaagttacttgtgcaggtaatgttctgcaggtggttgcctgcacctcagttgtagggtgtccgtaggatgtgaggccagtccccgggcttaatgatgctttaaatcctgcctagtattcaattatttcttgtcgcttaaaaggcctaataaaattatggtcttagtttacagtggtatgaatgcttagctgttggattttagtaggaaagttcgtccctttttgtttttaattttgttttacagattcacaggaattttttttttttttttttttttttttttttaatgcacagaaagtttccctggactctctacccagtttccccagtgataatatcttgggtaacatcctgtatacattcacattggtgcattcctcagagttgtcagattttgctagttttacgtgcacttgtgtatgtgtgtatttgcaattttagcacgtgtagactcttgtaaccactacaatcaagttacagaactacactaccaaggttcatctttttaaaatctttgatgttaccttttttggaacagtgaccatgagaggactttcctcccaaaattttgaaaactactgaaccagaatatagtctgacactaataggtagaaatttaaccaaaggagattatgaagctctgcacttgagttaacaaaatcacttctcagcttccagttccatctcagaaggaaggaaaagggattaaaaatccagagaccagaaaatgggagcaaagtacaaggtggtgtaatcattacagaggtttcctgatgtttccaagtcagtcgtgtgttgagctgctaaactctaaagtaattttaggtggaatgttggaaacatgctgctgaggtgatagaaaggaatccatggtcctctgttagttggaaagtatatggaatactatattctacataagatacaatactctctgtgagacaaggataaagtagattttgtcagtgaaattgtgacaagaatcgctgatgggtttagagcctaagtttgcgaggagcactggaagaaattaagattgttgagattggaaagggttagctatgggggaacaggaggaggtgactccatgacagaccaaatattcaaaggactgtgtagaagaggaaaaagactttgttagggctccagaggacagagccaggagtcagacagggccttgaactcaacccaccgagatctgcaaactttgcaggatgcaccagatgtcttgtagccatgggtcaaggggggaccctgggtaagagactgtaatagatgacctctaaggccatctcatgacatgtgtgattaatgtatgtacctgtcctctctttttgacaattctacagattattcaggacagggagttgaccaactgcaaagagtgattgacaccatcaaaaccaaccctgacgacagaagaatcatcatgtgcgcttggaatccaagaggttgaaagaaccccgtcgtcttcatttatactaaccatactcttagagggaagcaatctggttttgtgcagaggcactgagggaggcaggaccctgggcaacttcccccagccacatggttgtgtgacgttgggcaagtcacattttgctgcactttcaccttcagatcatgaggttgggcccagaggatttttttttttttttttttttttgagacagagttttgctctgttgcccaggctggaatgcaacggcgtgatcttggctcactgtaacctctgcctcctgggttcgagtgattctcctgcctcagcctccaagtagctgggattacagcatgtgccaccatgcctggctaattttgtatttttagtagagacgggttcacatgttggtcaggctggtcttgactcctgaccctcagatgatctgccttgcctcagcctcccaaccgagtgatcttaagttgtgtattatactcattcttacacaaaaagggctttaaatgcctagaaactacatgaagatgttaacattttaaatggaagcagatgaagttccagctcgctgccacctcactaacatttttaacaattatattgtaaaattcaactctaccagggtgtagagccaggtgtggtggctcacacctgtaattccaacaactccagaggccaaggcgagaggatcatttgaacccacggaatttgaggctgtagtgagtcatgatcacgccattgcactccatcctgggcaacagagtgagaccctgaatatttaaaaacaacaacaacaacaaaactctatcaggatatcataagtacttagagtgaaatacttgcatctgtaatagagacttattttttttttttttgagacacagtctcaccctgttgcccaggctggagtgcagtggtttgatctccgctcacggcaacctccatctcccaggttcaagtgagttcccattcctcagccccagagctgggaccacaggcgcgcgaatttttgtatttttagcagagacggggtttcactatgttggccaggctagtctcaaactcaagttggcctcaagtgatctgcccaccctggcgtcccagtgttgggatttcaggcatgagccactgtgcctggccatgtaatagagacttttaatataggagggtgtaccagaagcaccagtttcctgtggcaaacagaattattcctgctgtatttgtaatttggtgccacgaggtagcccagatcccttcagctctgatggaagagcattgcttcagccgtaaatggacacctgcagaaaccttgcaccgatggatagtctccctcagctccgtgccatcgctgcaggggctgttatggacatcactgcagcccagtggctctctctcctggtctccaccatatgagttggcttctgtttctctcctgttttactttgcctttagctgtggtctttcaaaccaccatccctccttatcttcctctgctggttcctcagatcttcctctgatggcgctgcctccatgccatgccctctgccagttctatgtggtgaacagtgagctgtcctgccagctgtaccagagatcgggagacatgggcctcggtgtgcctttcaacatcgccagctacgccctgctcacgtacatgattgcgcacatcacgggcctgaaggtgggctgtctcgggaagggtgacttgccagcctaccacatgagctcttcagttctttaatatgggaaaacaaattgcagagtttagtctctgattagcttttaaatttgatatgtgtaagtaagacatgaaccagcttttactttgaaaccttccttttctggaaggttttctggccctgtggtatatgcactaacagatctatacaggttgtttgtgatacagcttctatggatcttctcaaaagctatgctgaggttgggtatggtggctcatgcctgtaatcccagcactttggaagactgagacaggagcaattgcttgaggtctggagttcaataccagcctgggcaacataacaagatgctgttgctacaaaaaaatggaaaagctacactaaattatttttttaaaaaaagccttgcggtgtctgcatattctaatgtttttaaatgatgttttaaagaattgaaactaacatactgttctgctttctcccggtttatagccaggtgactttatacacactttgggagatgcacatatttacctgaatcacatcgagccactgaaaattcaggtaagaattagatgttatacttttgggtttggtaccttctcttgataaaaggttgactgtggaacaggtatctgctcaatgctgtgtccaagataaagatgactgctccaaatgtggggcttcagtttagggagaagtggtgggcaggtgggcaggacaaggcaggcatctgcctcagcaaccatggcacttaacttgtcaggtgctgtgaggtactaagcaccagtaccagagagggaagagccacattcaagccaggggattgtccaaaaggaggcattttaactcattttaacttgaaggagaattgaagtgcaaatgtttttccttttctttttttttgagatggagtctttctctgtcggccaggctggagtgtgccgtggtgcgatctcagctcactgcaacctccacctcccgggttcaagcaattcttctgcctcagcctcccaggtagctgggattacaggcacatgccaccacacccagctaattttttgtattattagtagagatggggtttcgtcatgttggccaggctgatctcaaactcctgacttcaagtgtaccacctgcctcagcctccgaaagttctggaattacaggcataagccaccaccctggccataaatattttttgttaattttacattaagtacaatatttaggtccaaacttcaaaagtctgttgaaatccctgaagttatagcagccaacaattgatatgaaatggcaataaaaatgtaagttcatctgcttcatgagccttaaggaaaaaaactcagaaccagacactttttagccccttccaggttagatccaggttttaaaagttattcctttgagggagtttggctgcttttgagtggaggtgacttcaggcttattctctctggctctctgctctggtcatttttagacatagtaataggttgtgacctgtcttcacatcctaattgccactgtctgttcatcccaggaatcctggctttcatccctttctgttcactgtccatgcatgtcatctttccttctttctgccagggaccagatgggttagggattgtgaattcaagtaaacgtagagctactatgagttacagattgactgtgttcctgtctttaataaatttgccaagagtggttataagaacttacacctgatgaggcaccaggctcctgatgctgtgtaatgtcacaaaatacccctcactctcgatctgtgcaagagaacagctggttgcgctccaatcatgttacataacctacgcgaaggtatcgacaggatcatactcctgtaaaatagaactttgttgatcacatcctgtgtacttgtttcacggacatgaggagcaattacaacaggtcgtacaattatggcaaaataatggccttattttgtttttagcttcagcgagaacccagacctttcccaaagctcaggattcttcgaaaagttgagaaaattgatgacttcaaagctgaagactttcagattgaagggtacaatccgcatccaactattaaaatggaaatggctgtttagggtgctttcaaaggagctcgaaggatattgtcagtctttaggggttgggctggatgccgaggtaaaagttctttttgctctaaaagaaaaaggaactaggtcaaaaatctgtccgtgacctatcagttattaatttttaaggatgttgccactggcaaatgtaactgtgccagttctttccataataaaaggctttgagttaactcactgagggtatctgacaatgctgaggttatgaacaaagtgaggagaatgaaatgtatgtgctcttagcaaaaacatgtatgtgcatttcaatcccacgtacttataaagaaggttggtgaatttcacaagctatttttggaatatttttagaatattttaagaatttcacaagctattccctcaaatctgagggagctgagtaacaccatcgatcatgatgtagagtgtggttatgaactttaaagttatagttgttttatatgttgctataataaagaagtgttctgcattcgtccacgctttgttcattctgtactgccacttatctgctcagttccttcctaaaatagattaaagaactctccttaagtaaacatgtgctgtattctggtttggatgctacttaaaagagtatattttagaaataatagtgaatatattttgccctatttttctcattttaactgcatcttatcctcaaaatataatgaccatttaggatagagttttttttttttttttttaaacttttataaccttaaagggttattttaaaataatctatggactaccattttgccctcattagcttcagcatggtgtgacttctctaataatatgcttagattaagcaaggaaaagatgcaaaaccacttcggggttaatcagtgaaatatttttcccttcgttgcataccagatacccccggtgttgcacgactatttttattctgctaatttatgacaagtgttaaacagaacaaggaattattccaacaagttatgcaacatgttgcttattttcaaattacagtttaatgtctaggtgccagcccttgatatagctatttttgtaagaacatcctcctggactttgggttagttaaatctaaacttatttaaggattaagtaggataacgtgcattgatttgctaaaagaatcaagtaataattacttagctgattcctgagggtggtatgacttctagctgaactcatcttgatcggtaggattttttaaatccatttttgtaaaactatttccaagaaattttaagccctttcacttcagaaagaaaaaagttgttggggctgagcacttaattttcttgagcaggaaggagtttcttccaaacttcaccatctggagactggtgtttctttacagattcctccttcatttctgttgagtagccgggatcctatcaaagaccaaaaaaatgagtcctgttaacaaccacctggaacaaaaacagattttatgcatttatgctgctccaagaaatgcttttacgtctaagccagaggcaattaattaatttttttttttttgacatggagtcactgtccgttgcccaggctgcagtgcagtggcgcaatcttggctcactgcaacctccacctcccaggttcaagtgattctcctgcctcagcctcccatgtagctgggatcacaggcacctgccaccatgcccggctaattttttgtattttttgtagagacagggtttcaccatgttggccaggctggtctcaaacacctgacctcaaatgatccacctgcctcagcctcccaaagtgttgggattacaggcgtaagccaccatgcccagccctgaattaatatttttaaaataagtttggagactgttggaaataatagggcagaggaacatattttactggctacttgccagagttagttaactcatcaaactctttgataatagtttgacctctgttggtgaaaatgagccatgatctcttgaacatgatcagaataaatgccccagccacacaattgtagtccaaactttttaggtcactaacttgctagatggtgccaggtttttttgcacaaggagtgcaaatgttaagatctccactagtgaggaaaggctagtattacagaagccttgtcagaggcaattgaacctccaagccctggccctcaggcctgaggattttgatacagacaaactgaagaaccgtttgttagtggatattgcaaacaaacaggagtcaaagcttggtgctccacagtctagttcacgagacaggcgtggcagtggctggcagcatctcttctcacaggggccctcaggcacagcttaccttgggaggcatgtaggaagcccgctggatcatcacgggatacttgaaatgctcatgcaggtggtcaacatactcacacaccctaggaggagggaatcagatcggggcaatgatgcctgaagtcagattattcacgtggtgctaacttaaagcagaaggagcgagtaccactcaattgacagtgttggccaaggcttagctgtgttaccatgcgtttctaggcaagtccctaaacctctgtgcctcaggtccttttcttctaaaatatagcaatgtgaggtggggactttgatgacatgaacacacgaagtccctctgagaggttttgtggtgccctttaaaagggatcaattcagactctgtaaatatccagaattatttgggttcctctggtcaaaagtcagatgaatagattaaaatcaccacattttgtgatctatttttcaagaagcgtttgtattttttcatatggctgcagcagctgccaggggcttggggtttttttggcaggtagggttgggagg

SEQ ID NO: 1192 - DNA, 3493 bp, Homo sapiens
agcggccggggccacgatggagcgcgacggctgcgcggggggcgggagccgcggcggcgagggcgggcgcgctccccgggagggcccggcggggaacggccgcgatcggggccgcagccacgctgccgaggcgcccggggacccgcaggcggccgcgtccttgctggcccctatggacgtgggggaggagccgctggagaaggcggcgcgcgcccgcactgccaaggaccccaacacctataaagtactctcgctggtattgtcagtatgtgtgttaacaacaatacttggttgtatatttgggttgaaaccaagctgtgccaaagaagttaaaagttgcaaaggtcgctgtttcgagagaacatttgggaactgtcgctgtgatgctgcctgtgttgagcttggaaactgctgtttagattaccaggagacgtgcatagaaccagaacatatatggacttgcaacaaattcaggtgtggtgagaaaaggttgaccagaagcctctgtgcctgttcagatgactgcaaggacaagggcgactgctgcatcaactacagttctgtgtgtcaaggtgagaaaagttgggtagaagaaccatgtgagagcattaatgagccacagtgcccagcagggtttgaaacgcctcctaccctcttattttctttggatggattcagggcagaatatttacacacttggggtggacttcttcctgttattagcaaactaaaaaaatgtggaacatatactaaaaacatgagaccggtatatccaacaaaaactttccccaatcactacagcattgtcaccggattgtatccagaatctcatggcataatcgacaataaaatgtatgatcccaaaatgaatgcttccttttcacttaaaagtaaagagaaatttaatcctgagtggtacaaaggagaaccaatttgggtcacagctaagtatcaaggcctcaagtctggcacatttttctggccaggatcagatgtggaaattaacggaattttcccagacatctataaaatgtataatggttcagtaccatttgaagaaaggattttagctgttcttcagtggctacagcttcctaaagatgaaagaccacacttttacactctgtatttagaagaaccagattcttcaggtcattcatatggaccagtcagcagtgaagtcatcaaagccttgcagagggttgatggtatggttggtatgctgatggatggtctgaaagagctgaacttgcacagatgcctgaacctcatccttatttcagatcatggcatggaacaaggcagttgtaagaaatacatatatctgaataaatatttgggggatgttaaaaatattaaagttatctatggacctgcagctcgattgagaccctctgatgtcccagataaatactattcatttaactatgaaggcattgcccgaaatctttcttgccgggaaccaaaccagcacttcaaaccttacctgaaacatttcttacctaagcgtttgcactttgctaagagtgatagaattgagcccttgacattctatttggaccctcagtggcaacttgcattgaatccctcagaaaggaaatattgtggaagtggatttcatggctctgacaatgtattttcaaatatgcaagccctctttgttggctatggacctggattcaagcatggcattgaggctgacacctttgaaaacattgaagtctataacttaatgtgtgatttactgaatttgacaccggctcctaataacggaactcatggaagtcttaaccaccttctaaagaatcctgtttatacgccaaagcatcccaaagaagtgcaccccctggtacagtgccccttcacaagaaaccccagagataaccttggctgctcatgtaacccttcgattttgccgattgaggattttcaaacacagttcaatctgactgtggcagaagagaagattattaagcatgaaactttaccctatggaagacctagagttctccagaaggaaaacaccatctgtcttctttcccagcaccagtttatgagtggatacagccaagacatcttaatgcccctttggacatcctataccgtggacagaaatgacagtttctctacggaagacttctccaactgtctgtaccaggactttagaattcctcttagtcctgtccataaatgttcattttataaaaataacaccaaagtgagttacgggttcctctccccaccacaactaaataaaaattcaagtggaatatattctgaagctttgcttactacaaatatagtgccaatgtaccagagttttcaagttatatggcgctactttcatgacaccctactgcgaaagtatgctgaagaaagaaatggtgtcaatgtcgtcagtggtcctgtgtttgactttgattatgatggacgttgtgattccttagagaatctgaggcaaaaaagaagagtcatccgtaaccaagaaattttgattccaactcacttctttattgtgctaacaagctgtaaagatacatctcagacgcctttgcactgtgaaaacctagacaccttagctttcattttgcctcacaggactgataacagcgagagctgtgtgcatgggaagcatgactcctcatgggttgaagaattgttaatgttacacagagcacggatcacagatgttgagcacatcactggactcagcttctatcaacaaagaaaagagccagtttcagacattttaaagttgaaaacacatttgccaacctttagccaagaagactgatatgttttttatccccaaacaccatgaatctttttgagagaaccttatattttatatagtcctctagctacactattgcattgttcagaaactgtcgaccagagttagaacggagccctcggtgatgcggacatctcagggaaacttgcgtactcagcacagcagtggagagtgttcctgttgaatcttgcacatatttgaatgtgtaagcattgtatacattgatcaagttcgggggaataaagacagaccacacctaaaactgcctttctgcttctcttaaaggagaagtagctgtgaacattgtctggataccagatatttgaatctttcttactattggtaataaaccttgatggcattgggcaaacagtagacttatagtagggttggggtagcccatgttatgtgactatctttatgagaattttaaagtggttctggatatcttttaacttggagtttcatttcttttcattgtaatcaaaaaaaaaattaacagaagccaaaatacttctgagaccttgtttcaatctttgctgtatatcccctcaaaatccaagttattaatcttatgtgttttctttttaattttttgattggatttctttagatttaatggttcaaatgagttcaactttgagggacgatctttgaatatacttacctattataaaatcttactttgtatttgtattt

SEQ ID NO: 1193 - DNA, 836 bp, Homo sapiens; identical to SEQ ID NO: 970

SEQ ID NO: 1194 - DNA, 4203 bp, Homo sapiens
tgacaacatggcggcgcccatggtccgtggcccggcagtgctcgcctaaaggtggagaacgaggagtagaggaggccgcagccagagcctgtgagcagatccagacctacagataaaaaacattatttaatctatctgggatttactccggcttatgatttgagggccttctcaccttctgaagaatggcttctgtttggcagagattgggtttttatgcctctcttctgaaaagacagctaaatggtgggccagatgtcatcaagtgggaaaggagagtaattcccggatgtaccagaagcatctacagtgccacgggaaagtggacaaaagagtatacattgcagacaagaaaggatgttgagaaatggtggcatcaacgaataaaagaacaggcctccaaaatttcagaagctgataaatcgaagccaaaattttacgtgctttccatgttcccttatccttctggtaagctgcacatgggccatgtgcgtgtctacaccatcagcgacaccatagcacggttccagaagatgagagggatgcaggtcatcaaccccatgggatgggatgcttttggattgcctgctgaaaatgccgcagtcgagaggaatctacatccacaaagttggacacaaagtaatattaaacacatgaggaaacagcttgatcgtctgggcctgtgtttcagctgggatagggaaataactacgtgtttgccagattactacaagtggactcagtatctctttattaaactgtatgaggctgggctggcctatcaaaaggaggccctggttaactgggacccagtggatcaaacagtgcttgccaatgagcaggtggatgaacatggctgttcatggcgttctggagcaaaggtggaacagaagtacctcagacaatggtttattaagacaaccgcttatgcaaaggccatgcaggacgcgttggcagaccttccagaatggtatggaataaaaggcatgcaagcccactggattggggactgtgtgggctgccacctggacttcacattaaaggttcatgggcaagccacgggcgaaaagctgactgcctatacggccacccctgaagccatttatggcacctcccacgtggccatctcgcccagccacagactcctacatgggcacagctctctgaaggaagccttgaggatggcccttgtccctggcaaagattgcctcacgcctgtaatggctgtgaacatgcttacccagcaggaggtccctgtcgttattttggccaaagctgacttggaaggctctctggattcaaaaataggaattcccagtactagctcagaggacaccatcttagcccaaaccctgggcctggcctactctgaagtcattgaaactttgccagatggcacagagagactgagcagctctgctgagttcacaggtatgacccggcaggatgcttttctagccctgactcagaaagcccgggggaagagagtgggtggagacgtgacaagtgataaactgaaagactggctgatttcacggcagcggtactggggcacaccaatccccattgtccactgcccagtctgtggccccacacctgtgcccctggaggacttgcctgtgaccctgcccaacatcgcgtctttcactggcaagggaggccccccactggccatggcttcagagtgggtgaactgctcctgcccaaggtgcaagggagcagccaagagagagacagacacgatggatacctttgttgattctgcttggtactacttcagatacactgaccctcataatccacacagcccttttaacacagcagtggccgattactggatgcctgtggatttgtacattggagggaaagaacatgccgtcatgcacttgttctatgcaagattctttagtcatttttgccatgatcaaaaaatggttaaacatagggagccttttcataagctgctggcccaaggccttatcaaggggcagacattccgcctaccatctggacagtatctacagagagaggaagtggatctcacaggttccgttcctgttcatgcaaaaacgaaagagaagttagaggtgacgtgggagaagatgagtaagtccaaacacaacggggtggacccagaggaagttgtggagcagtatgggatcgacacgattcggctctacatcctttttgctgcccctcctgagaaggatatcttgtgggatgtgaaaactgatgctctccctggggtgctgagatggcaacaacgactgtggaccttgacaactcggtttattgaggccagggcttctgggaagtctccccagcctcagctgctgagtaacaaggagaaagctgaggccaggaagctctgggagtacaagaactccgtcatctctcaggtgaccacccatttcacagaggacttctcactgaattctgcaatttctcagctgatgggactcagcaatgccctctcgcaagcctctcagagcgtcattctccacagccccgagtttgaggatgctttgtgtgccctgatggtaatggctgctccactggcccctcatgtaacctcagagatctgggcaggcctggcgctggtgccgaggaagctctgtgcccactacacttgggatgccagtgtgctgctccaggcatggcctgctgtggacccggagttcctgcagcagcctgaggttgtccagatggcagttctgatcaacaataaagcttgtggcaaaattcctgtgccccaacaagttgcccgggaccaggacaaagtccacgaatttgttcttcaaagcgagctgggtgtcaggcttttgcaaggacgaagcatcaagaagtccttcctttccccgagaactgccctcatcaacttcctggtgcaagattgacagccaggaggctgcagctaccacgagggcctctgaggaacctccttccaggcctgggatgagggggcgatgtctgctggcccaggggaagggaaaagacaaatgtcttgactgttgacctcggtcctgtggcagactgcagtcaacagtgtgcctctgtagtgtggcctggtgctggggtgaaggtgagctgggcaaaggagaaatatgagctactgaggagggggttggacatcctgcccctcaccccccacccacactgcaggtagaggaggccatctgatcccatgggaagccatcagagacactgctggtgggagcaggaaggagcagtgcccctcgagcagccaggaagcctgcggatctgggaaatggctctgccttaggcacttctcgggaatttgaggccagcctgaggaactgcaggactcaggtgcaatgtgccagccacttggaactgctaactgagcctccagatggtagtgaatggtctctttgccttcaggctggatgaggaagtcatttaggaaatgttcaaataaccaatatgtggaaatggacacagggatcttctgaagttgctttgaatcaaaaggcaggcagtgctggttcctctgcctgtgtccccaccactccccagctctgtcatgcaggcctgtcctccccaaccccagctggatgtgcctcccaggcctgctgtggttctgacacacaggatcccaggcaaggcaccacttcctcacatgaatgaggagcagcaagtcataaccactcccttgggtatacaatttgctgtgtagtgaagtggaaccaggctcaggctgctggtcccaacctcagagccccaccgcagcccagtagggatgcagcacgccccagagggctcatgtgggccccagatggcaatgccaccattgttgatgtgactccagagccagttattaggaagagcaagctcaccacagaggagtggaactgaggccccccagatgttgcctccggtgtccaagccacagcggtctggctgttgggaagatggccaggaatggactcataccattggcacattaggctaatcctggttttatgtgaagtcagcaattaagtgttcccactagaactgacctaagccactgattaatatttaatgagggaaggtaggggagaatctagccattttataatgccagaaatctatatatgttatctgatgccatttttctgaagtagcctcacatgtggtccccctgcagttcagcagttaacagatgacttttttagtgtaataaaatgtttatcatctatg

SEQ ID NO: 1195 - DNA, 906 bp, Homo sapiens
actcttgggaaaactgctgggcaccgtcgtcgcgctgaaggtggttctgtacctgctccgagtgtgcttagcgatggcctggaaatccggcggcgccagccactcggagctaatccacaatctccgcaaaaatggaatcatcaagacagataaagtatttgaagtgatgctggctacagaccgctcccactatgcaaaatgtaacccatacatggattctccacaatcaataggtttccaagcaacaatcagtgctccacacatgcatgcatatgcgctagaacttctatttgatcagttgcatgaaggagctaaagctcttgatgtaggatctggaagtggaatccttactgcatgttttgcacgtatggttggatgtactggaaaagtcataggaattgatcacattaaagagctagtagatgactcagtaaataatgtcaggaaggacgatccaacacttctgtcttcagggagagtacagcttgttgtgggggatggaagaatgggatatgctgaagaagccccttatgatgccattcatgtgggagctgcagcccctgttgtaccccaggcgctaatagatcagttaaagcccggaggaagattgatattgcctgttggtcctgcaggcggaaaccaaatgttggagcagtatgacaagctacaagatggcagcatcaaaatgaagcctctgatgggggtgatatacgtgcctttaacagataaagaaaagcagtggtccaggtggaagtgattttatcttctgctctttcttcttccacacatgcaagtgaaagggtgtgattttaagacattagactacaagagctgtttttggttgtcacctttatgctcctccattataacgtcagaaattcattacattaaaaatgtgaaaaatgt

SEQ ID NO: 1196 - DNA, 852 bp, Homo sapiens
ggacggtcctttgttgccgcgaggggtaggagtgggcgtggcggagccagctccgttcggaacactcccgggccgacccgactcgctcatcctgcaggagctgcggcgccaagatgagtggagaggagaacccagccagcaagcccacgccggtgcaggacgtacagggcgacgggcgctggatgtccctgcaccatcggttcgtggctgacagcaaagataaggaacccgaagtcgtcttcatcggggactccttggtccagctcatgcaccagtgcgagatctggcgcgagctcttctctcctctgcatgcacttaactttggcattggtggtgacggcacacagcatgtactgtggcggctggagaatggggagctggaacacatccggcccaagattgtggtggtctgggtgggcaccaacaaccacggacacacagcagagcaggtgactggtggcatcaaggccattgtgcaactggtgaatgagcgacagccccaggcccgggttgtggtgctgggcctgcttccgcgaggccaacatcccaacccacttcgggagaagaaccgacaggtgaacgagctggtacgggcggcactggctggccaccctcgggcccacttcctagatgccgaccctggctttgtgcactcagatggcaccatcagccatcatgacatgtatgattacctgcatctgagccgcctgggctacacacctgtttgccgggctctgcactccctgcttctgcgtctgctggcccaagaccagggccaaggtgctcccctgctggagcccgcaccctaagcatcctgctgccttcccacaacattaaactctccttcctcag

SEQ ID NO: 1197 - DNA, 5404 bp, Homo sapiens
cctgtgttacatctggaagcaagcagtgctgctgacggtgtgagtgctgcatgggaggaggtggctggccaccacgcagaccgtggcccgcagggatcggatgccaatggtgatggtgaccagggccatgagaatgccgcattgccagacccgcaggagtcggacccagcagacatgaacgctctcgctctgggtccctcagaatatgactctctgcctgaaaatagcgagacaggaggaaatgagtctcaaccagacagccaggaagacccccgagaagtacttaaaaaaacattggaattctgcttatctagggagaaccttgctagtgacatgtatcttatatcacagatggatagtgaccagtatgtgccaatcacaacggtggctaacctcgaccacatcaagaagctcagcactgatgtggacttgattgtggaagtgctaagatctttacctttagtccaagtggatgaaaagggagaaaaagtaaggccaaatcaaaatcgctgcatagtaatattgcgtgaaatatctgaatctacccccgtggaagaagtagaagcactatttaaaggagataatttaccaaaatttataaactgtgaatttgcatataatgataattggtttattacatttgaaacagaagctgatgcacaacaggcttacaaataccttcgagaagaagtcaaaacttttcaaggaaaaccaattaaggcacggataaaagcaaaggcaatagctataaacacatttttgccaaagaatggatttagacccctggacgtgagcctgtatgcccagcagcgctacgcgacgtcgttctacttccctcccatgtacagcccccagcagcagttccccctgtacagcctgatcactccccagacgtggtcagcaacgcacagctatcttgacccacccttggtaactccatttccaaatactggatttataaatgggtttacgtctccagcgttcaagcctgcggcgtctcctctgacttctctcagacagtatcctcctcgaagcaggaatcctagtaaatctcatctgcggcatgcgattcctagtgcagagaggggacctgggttattagaaagtccttcaatatttaacttcactgcagatcgattaattaatggtgtccggagtccacaaacaaggcaagcaggtcaaactagaacacggattcaaaacccttcagcatatgccaagagagaggctgggcctgggcgtgtggagccaggcagtctcgaatcctctcctggtttagggaggggaaggaagaattcctttggctaccggaagaaaagggaggagaagtttacaagcagccagacacagtctccaacgccaccaaagcctccgtcgccaagcttcgagctggggctgtccagcttccctccattacctggagctgccggcaatttgaagacagaggacttgtttgaaaacaggctatctagcttgataataggaccatccaaagaaaggaccctcagtgcagacgcaagcgtgaacacccttcctgtagtggtctccagagagccctcggtgccggcttcttgtgctgtatcagcaacgtacgagcgatccccctccccagctcatttacccgatgatcccaaggtggcggagaaacagagggaaacccacagtgtggacagacttccttccgccctcactgcgaccgcgtgtaaatcggtgcaggtgaacggagccgccacggaattgcgaaagcccagctacgcagagatttgtcagagaacgagtaaagagcctccttcttccccattgcaaccccaaaaagaacaaaagccaaacactgttggttgtgggaaggaggaaaagaagctggcagagcccgcagagagataccgggagcccccagccctcaagtccacacctggagcccccagagaccagaggcggccggcggggggccggccctcgccctcggccatggggaagcgtctcagccgagagcagagcactccccccaagtctcctcagtgaaaaccgtacgtctgggaggggtcgcagagcgctgtgttaaccacaaacgagacactctcccactcagtgcgagggcgagccgctggttaggagcttgcagtgtctgaggcctgtgggatcctcaagttggttttcttctgtgagttggattctccccctcttgaaaaaaaatcgatttttcaggatttaattaatacaaaccttattttaggttggtgcttaactggaggtgatgcataagtctgatttttttttccaagatagaaaaagcatttatcctaacaaattggtattttttattaagcctccatgtggctctgaatgcaagctatatatagtgagtttttctaaattaagggaactctgctttttttttttttttttaagtaactggtctgtaagtgcatatctctagaacgtccccgcagatgaatgagggccagtggccttggcagaggcaggtgtggcctcgtagaggcagtgctggccgcgccagggcatcagtgctgatgtgggagctgtgcttccacctaagccgttggtaggggactgtggcatttaagaatgtagagagcgcatcctttttgatctcctgggcggagtgaacctgcaggggccaccccagaaaccttggttctgatgcactgcaagcaagtaaccagcttctcactccagtttcaagtggctattatgtaatataaattcaaagcacattgtgaatagaacctacatgaaaacatacactttgttgcccactgacatgttaccagaagttgtaccatgatgttgttttgacccctgtgagctgatggccccggccctgctctgtgcacatttctgtccgtgttccccagcactctggttggagagagtccacatcttcagctccgtgtggacatctccctgtacctctgcatcagcacatggatttaagagttatgtaatcgtgagagaatggtgtttgtggtttttccccctctttggctggtggaggataaagttcctgctcttttacctccaagacgagggcctcattgattcacttccagaagtgctgcacttctgaagaacaaggatgcactaaagttagcaagtttataataaagttaaatataaattattttgttttaaaatgcctcaaatttttctttattctaagcagcaaacattaaaataagaatatttcctgctaaatgtaaccatacactttattccacaaaatgttatttaacaagactgagggttttttttaagaaaaaattatttccatccaatatttaaagacttgaattttatttaaacttgaaaatgactttgccttaacttttgtataagacagcttagagtccatggagcccggccctgggttggcgtgagtgggtcagagttactcagttactgcgtggatctcctgtcgctagttttactgagtaagcatactgtagtacaagagctagtagtagtttttgtaatataccttaaagatcttcaacagttgatcttttttcagaatgttggaaaatcctgtaaatgcaaatagtcaatactgtattaaatacgtgcacttggagtgtgcttcgcttgtacagttgtaaataatcagaacatatgaaaaaggtaccctacagagaaaattctgatacagattattgatatattataaatgttgctgttgagcgggatgtagataaactaaatgttgtggtttgaatattattttgatttgttgagattttcttttttctcttacatcggtgtgttgaactgattctgcctctttgctgcaaaagggaattggaaagtcttattaaaagcctccagatgttttcatactcttttaaaatgtatgtaaatgcatactaatcatatctaatgtgaaagagttttaaagtatatagagagcaaaaactggcaggatcgtaagtgaaggtgactagtaatctaatttaaatcacctgcagctaagcatgattgaccctgccagaggaaaacatgcctatttgaccatttcctttaaagcagttgccattattcaaatacagagaaatagccacagggctagtgtttttcaaatgcattttaaagaacatggggatttttttttgtagttgtcagttcactgaccaaaaaaaaaaaaaaaatcagaaataattgatctgtgaaacccaaactctcaatactcagaaagctgggaggcaacctcgaggcctgggcctacgagctgcatcttcgctacggaagggccagggcgccatcagccattcccaaaacacaaggcctgcccgtccgccagtgagtccttggtttttaataatgagaagtcctttcccccaaggtgtgagcattgcagcgcagtgtgtgtgtgtggttagagccagcttagtccttcactttgtcgaccgaagtgggagctcaacagctgcatgaggagggcagcgcgtgcattagccagtcgccactggagggctctgctgccctccggtcaatacactgtagttactgcctagccagcagcagtcttctgcatcaagaactgaaaccttgctcggaggtgatttttatagcatcctttttaattaaaggtgaaatacagattgctatataatgtctgaaaaaacctgatactacttcaagagtttctgctcagaagaaaatgagagttatcataataggaagctgtggcggtccatgccaactgtgctgtgtcacatacagcgatgagagtggctttcatactttttttttttttaagttaacaccctcctttacccccagcagtatctcaggttatagaatcagagatgcagcagtgacaaatggcattttaacttgtaaaatcgtgtgatgatgcttatcattttgaaatagaagaataaaaacctggtcccgtttcaccagacatgaatttcaagtggagtcgtcgttctctgagagtgagtgtcttgacattttcacccaggccctcctgtcatcacatcaccggctgtcactggcgggtggccgtaaacgtcctgcgttgctatattaggatctctgcagttcaggcttcaaaaccagttcagtgtatccgggcgacgggtagtggtggtgcatgcctgtctgtgtgccccgctggcgagctgtagttgcggcttgcgtgcctcgcggcccactacagggctgcagacaatcgaggcgagggcgctggccgccagcagctcacagcgcgggggtcatgtggtcgctcctcgagggtttcgtttttgttctgcttcattaagactggaatcaagcttacatgtaaactattggtaatttaagtttccttttgtgtcattcagtgtaaaactgtctaatttgaaaaaaaatgtaggttatgaaaataaagatttaggcactgttc

SEQ ID NO: 1198 - DNA, 4121 bp, Homo sapiens
acaatgtggtcccgaagcggccagcgccgggagctgcagcgctgagacccccagcccgccccctcgggctcccggccggggccccatcatgttctccaggaagaaacgagagctcatgaaaaccccttccatctcgaaaaagaaccgcgcgggaagccccagcccgcagccctcgggggagctgcccaggaaggatggggctgacgcggtgttccccggaccaagcctggagccgcccgctgggtcctccggcgtcaaggccacagggaccctcaagcggcccaccagcctgagccgccacgccagcgcggctggcttccccctgtcgggtgctgcctcctggacactgggccggagccaccggagcccactgacagccgccagcccgggcgagctgcccaccgagggtgccggcccggacgtcgtcgaggacatctcccatctgctggcggacgtggcccgcttcgctgagggccttgagaaacttaaggagtgtgtgttgcgtgacgacctccttgaggcccgccgcccgcgggcccacgagtgcctgggtgaggctctgcgtgtcatgcatcagatcatctccaagtacccgctgctgaacaccgtggagacgctcaccgcagccggcaccctcattgccaaggtcaaagccttccattatgagagcaacaatgatctggagaaacaggagttcgagaaggccctggagacgattgctgtggccttcagtagcacagtgtccgagttcctcatgggtgaagtggacagcagcaccctcctagcagtgcctcctggggactcgagccagtccatggaaagcctgtatggaccgggcagtgagggcacgcctcccagcctggaagactgtgacgccggctgcctgcccgccgaggaggtggacgtgctgctacagcgctgtgaggggggcgtggatgccgcactgctgtatgccaagaacatggccaagtacatgaaggacctcatcagctacctggagaagcggacgacgctggagatggagtttgccaagggcctgcagaagatcgctcacaactgcagacagagcgtcatgcaggagccccacatgccgctcctgtccatctactcgctggccctggagcaggacctggagttcggccacagcatggtgcaggcggtgggcaccttgcagacccagaccttcatgcagcccctgaccctgcggcggcttgaacacgagaagcgcaggaaggagatcaaggaggcctggcaccgtgcccagaggaagctgcaagaggcggagtccaacctgcgcaaggccaagcagggttacgtgcagcgctgcgaggaccacgacaaggctcgcttcctcgtggccaaggcggaggaggagcaggctggcagcgcgccgggagcaggcagcacggccaccaagaccctggacaagcggcggcggctggaggaggaggccaagaacaaggcggaggaagctatggccacctaccgcacctgcgtggccgacgcgaagacgcagaagcaggagctggaggataccaaggtgacggcgctgcggcagatccaggaggtcatccggcagagcgaccaaaccatcaagtcggccacgatctcctactaccagatgatgcatatgcagacggcgccgctgcccgtgcacttccagatgctgtgtgagagcagcaagctgtatgacccaggccagcagtacgcctcccacgtgcgccagctgcagcgggaccaggagcccgatgtgcactacgactttgagccccacgtctccgccaacgcctggtcccccgtcatgcgtgcccggaagagcagcttcaacgtgagtgatgtggcgcggccggaggctgccgggagccccccagaagaaggcgggtgcactgagggcacacctgccaaggaccacagggccgggcgaggacaccaggttcacaagtcatggccgctctcgatctcagactcggacagtgggctggaccccggccctggcgcaggggactttaagaagttcgagcggacgtcatccagtggtaccatgtcgtccacggaggagctggtggacccagacggtggagccggggcttcagcctttgagcaggctgacctcaacggcatgacccccgagctgccggtggccgtgcccagtggaccgttccgccacgaggggctgtccaaggcggcccgtactcaccggctccggaagctccgcacgcccgccaagtgccgcgagtgcaacagctacgtctacttccagggtgctgagtgtgaagagtgctgcctggcctgccacaagaaatgtctggagacgctggccatacagtgcgggcacaagaagctgcaaggccgcctgcagctgttcggccaggacttcagccacgcggcccgcagcgcccccgacggcgtgcccttcatcgtcaagaagtgcgtctgcgagatcgagcggcgggcgctgcgcaccaagggcatctaccgggtcaatggggtaaagacacgcgtggagaagctgtgccaggccttcgagaacggcaaggagctggtcgagctgtcgcaggcctcgccccacgacatcagcaacgtcctcaagctctacctgcgtcagcttcccgagccgctcatctccttccgcctctaccacgagctcgtagggctggccaaggacagcctgaaggcagaggccgaggccaaggcggcgtcccggggccggcaggacggctcggagagcgaggcagtggcggtggccctggcaggtcggctgcgggagctcctgcgggacctgccgcctgagaaccgggcctcgctgcagtacctgctgcgtcacctacgcaggatcgtggaggtggagcaggacaacaagatgacccccgggaacctgggcatcgtgttcgggcccacgctgcttcggccacggcccaccgaggccaccgtgtccctctcctccctggtggattatccccatcaggcccgcgtcatcgagactctcatcgtccactacggcctggtcttcgaggaggagccggaggagacccccgggggccaggacgagtcatccaaccagcgagctgaggtagtcgtccaggtgccgtacctggaggcgggcgaggcggtggtctacccgctgcaggaggcggcggcggacgggtgcagagaatcccgagttgtgtccaacgattcggactcggacctagaggaggcctccgagctgctgtcctcatcggaggccagtgccctgggccacctcagcttcctggagcagcagcagagcgaggccagcctagaggtggcttctggcagccacagcggcagtgaggagcagctggaggccacagcccgggaggacggggacggggacgaggacggcccggcccagcagctctcaggattcaacaccaaccagtccaacaacgtgctgcaggccccactgccccccatgaggctccgtggcgggcggatgacactgggctcctgcagggaaaggcagccggaattcgtgtgagctggggtggggctgggaccacaggtggcttctctcttgcctgctcctgtccctccagcacgtcccctgcaccacggcatagcttaggtgcgccgtcctggggtcgctgccgagagcgcctggacttcgacgtcccaccagcgggcgcctcctcccagaggcttccaggagcacgagggccttgcggcacaggactgtgccctgtgctgtcccctgcaccccggctcagctgagctggggaacactgctgtcgtgtgaagtcacagtggccttgttggtgcccacagggctgtgtggatggaggaagctgtccctgcccagtgcatcccccaggtcatcacggggacgcaggaggcaggccctgccctgccctctcctcacaggtctgttgcagggactccagaaaccattctgggagccgtggatgggggcggagctggggtttggtgcagtttccagggtgcagtacagcagggcctgaatactggccctggactcccttttccagaacaccaggtgtggccacctggggctcaggtacacagtggggtctctcggaagccaccgtgtggttctttcacaggcacgtttattttgctgaaataaaaagtttttaatcggg

SEQ ID NO: 1199 - DNA, 4792 bp, Homo sapiens; identical to SEQ ID NO: 993

SEQ ID NO: 1200 - DNA, 1685 bp, Homo sapiens
gagtagctgctttcggtccgccggacacaccggacagatagacgtgcggacggcccaccaccccagcccgccaactagtcagcctgcgcctggcgcctcccctctccaggtccatccgccatgtggcccctgtggcgcctcgtgtctctgctggccctgagccaggccctgccctttgagcagagaggcttctgggacttcaccctggacgatgggccattcatgatgaacgatgaggaagcttcgggcgctgacacctcaggcgtcctggacccggactctgtcacacccacctacagcgccatgtgtcctttcggctgccactgccacctgcgggtggttcagtgctccgacctgggtctgaagtctgtgcccaaagagatctcccctgacaccacgctgctggacctgcagaacaacgacatctccgagctccgcaaggatgacttcaagggtctccagcacctctacgccctcgtcctggtgaacaacaagatctccaagatccatgagaaggccttcagcccactgcggaagctgcagaagctctacatctccaagaaccacctggtggagatcccgcccaacctacccagctccctggtggagctccgcatccacgacaaccgcatccgcaaggtgcccaagggagtgttcagcgggctccggaacatgaactgcatcgagatgggcgggaacccactggagaacagtggctttgaacctggagccttcgatggcctgaagctcaactacctgcgcatctcagaggccaagctgactggcatccccaaagacctccctgagaccctgaatgaactccacctagaccacaacaaaatccaggccatcgaactggaggacctgcttcgctactccaagctgtacaggctgggcctaggccacaaccagatcaggatgatcgagaacgggagcctgagcttcctgcccaccctccgggagctccacttggacaacaacaagttggccagggtgccctcagggctcccagacctcaagctcctccaggtggtctatctgcactccaacaacatcaccaaagtgggtgtcaacgacttctgtcccatgggcttcggggtgaagcgggcctactacaacggcatcagcctcttcaacaaccccgtgccctactgggaggtgcagccggccactttccgctgcgtcactgaccgcctggccatccagtttggcaactacaaaaagtagaggcagctgcagccaccgcggggcctcagtgggggtctctggggaacacagccagacatcctgatggggaggcagagccaggaagctaagccagggcccagctgcgtccaacccagccccccacctcaggtccctgaccccagctcgatgccccatcaccgcctctccctggctcccaagggtgcaggtgggcgcaaggcccggcccccatcacatgttcccttggcctcagagctgcccctgctctcccaccacagccacccagaggcaccccatgaagcttttttctcgttcactcccaaacccaagtgtccaaagctccagtcctaggagaacagtccctgggtcagcagccaggaggcggtccataagaatggggacagtgggctctgccagggctgccgcacctgtccagaacaacatgttctgttcctcctcctcatgcatttccagccttg

SEQ ID NO: 1201 - DNA, 2334 bp, Homo sapiens; identical to SEQ ID NO: 433

SEQ ID NO: 1202 - DNA, 692 bp, Homo sapiens
ttccccgagccgcagtcttggaccataatcatggtggacatgatggacttgcccaggtcgcgcatcaacgccggcatgctagctcaattcatcgacaagcctgtctgcttcgtagggaggctggaaaagattcatcccaccggaaaaatgtttattctttcagatggagaaggaaaaaatggaaccatcgagttgatggaaccccttgatgaagaaatctctggaattgtggaagtggttggaagagtaaccgccaaggccaccatcttgtgtacatcttatgtccagtttaaagaagatagccatccttttgatcttggactttacaatgaagctgtgaaaattatccatgacttccctcagttttatcctttagggattgtgcaacatgattgatcttgatggattttcatacgattgtaaatgagctatattaaagtctattaaaggaagcccttcttgtttgagggagagatttctgtgctttctcatatttaatttgctgtttttaagatattccaacctagagtttttgatggaactgatatattgacagttctcaccgaagcccttttataaagaattgctactccaatatatggtcagattagatgcaagaataaagcagttgtccgagtctaagtttctattttattaataaaaactaaaatggtacgtacaaaaaaaaaacc

SEQ ID NO: 1203 - DNA, 2002 bp, Homo sapiens
ctcttctcacatcagcgggtccaggcccaaccgacagactatgggggctccttcaccaggcgctgcgtggagtggctgctgggcctctacttcctcagccacatccccatcaccctgttcatggacctgcaggcggtcgtgccgcgcgagctctacccagtcgagtttagaaacctgctgaagtggtatgctaaggagttcaaagacccactgctacaggagcccccagcctggtttaagtcctttctgttttgcgagcttgtgtttcagctgcctttctttcccattgcaacgtatgccttcctcaaaggaagctgcaagtggattcgaactcctgcaatcatctactctgttcacaccatgacaaccttaattctgatactctccacatttctgtttgaggatttctccaaagccagtggtttcaagggacaaagacctgagactttgcatgaacggttaacccttgtgtctgtctatgccccctacttactcatcccattcatacttttaattttcatgttgcggagcccctactacaagtatgaagagaaaagaaaaaaaaaatgaaggaaacaaccactggcccagggtagagatgcctacagggtggttgcttgttggatacatacaggaacactgctcagaacccacgtcttcagcagcatttgaaacactggcagcaatgcacaagagcaagatggtgtcaggaaccatgtcaaaccctcaccttcttccattttttttttttttttgagacagtctcactctgttgccaggctggagtaaagggcagtggcatgatctcggctcactgcaacctccgcctcctgggctcaagccatcttccttagcctcccaagtagctagaactacaggtgtgtaccaacacgtatggctaatttgttttgttttttttgtgtgtgtggagacagggttttgccatgttgcccaggttggtctcgaacgcctaggctcaagtgatctgcccacctcagtctccctaagtgctgggattacagacgtgaaccactgggcccagcccaaaccttcaccttctaagggcactgggatgaacagaccgatcggcttgagggtgggcaaaggggtgtgggctaggttataaggaagtggtaccaaataactgtgttgcctgagttccaccgcaagattactaaaagcaggaccagaccagaaactgctaaagaacatggcctgtttgacatgttcatgagtcacctgacccacagcatatatgcttatgactaaaccctccactcctgattctcaagagtgtatcacctgtcagcaaaatgaatagtgggatattttgggccattttaaatgtgaaattttgcctctttaatgttaattcaaaactatatcaatgttttcttgttcccacctctaacccaaggaaaaaagagaaaacatactatgcaaaggaagtttaaacttaagttttccttaagggtcagcccaacaatgactttcagtcaaatggattaaactggaaaatgtttttgtttctgttgtaaacagatcatcctaggcgaaagttttttttgtttgtttgcttttaaattagtttatttctaaatcttagtcttccacatttctagaggccacctgacacaagtccctgtatctgaagtctagcatctcaaggctgatctggaagtgtgctagtatgctccctagtggataacttaatcttttaatacagttccgtcattcccatcttgttttcagaagagaaggtggctacagccaggcataacttatccactgtgtgcatagagggtctcttcacgttgatgcttggcattccatcagctttctctaagtctttgctcaagttcaaggttaaaatgatgttagacaacaggtcccagtcagtcccctctattttcacccattttgctcacaagccatattggcccgattagtggtactgtctgactcacgtgtgtgatccaaataaaggtagctgccgggaatt

SEQ ID NO: 1204 - DNA, 3220 bp, Homo sapiens; identical to SEQ ID NO: 694

SEQ ID NO: 1205 - DNA, 835 bp, Homo sapiens
atggcgagcagcggagtcaagaacacaccacgatggcggagaaaagcccctcatgggagggaaaggaaagagaaaggaaagaaaagaaaaagatgtatctggtcaactccaaaaaggagacataagaaaaaaagcctcccaagagagatcattgatggcacttcagaaatgaatgaaggaaagaggtcccagaagatgcctagtacaccacgaagggtcacacaaggggcagcctcacctgggcatggcatccaagagaagctccaagtggtggataaggtgactcaaaggaaagacgactcaacctggaactcagaggtcatgatgagggtccaaaaggcaagaactaaatgtgcccgaaagtccagatcgaaagaaaagaaaaaggagaaagatatctgttcaagctcaaaaaggagatttcagaaaaatattcaccgaagaggaaaacccaaaagtgacactgtggattttcactgttctaagtcccccgtgacctgtggtgaggcgaaagggattttatataagaagaaaatgaaacacggatcctcagtgaagtgcattcggaatgaggatggaacttggttaacaccaaatgaatttgaagtcgaaggaaaaggaaggaacgcaaagaactggaaacggaatatacgttgtgaaggaatgaccctaggagagctgctgaagagtggacttttgctctgtcctccaagaataaatctcaagagagagttaaatagcaagtgaatttctactaccctctcagtcaccatgttgcagactttccctgtctggaggctcaccttagagcttctgagtttccaagcccggaatt

SEQ ID NO: 1206 - DNA, 840 bp, Homo sapiens
ccggtgagtcgccggcgctgcagagggaggcggcactggtctcgacgtggggcggccagcgatgaagccgcccagttcaatacaaacaagtgagtttgactcatcagatgaagagcctattgaagatgaacagactccaattcatatatcatggctatctttgtcacgagtgaattgttctcagtttctcggtttatgtgctcttccaggttgtaaatttaaagatgttagaagaaatgtccaaaaagatacagaagaactaaagagctgtggtatacaagacatatttgttttctgcaccagaggggaactgtcaaaatatagagtcccaaaccttctggatctctaccagcaatgtggaattatcacccatcatcatccaatcgcagatggagggactcctgacatagccagctgctgtgaaataatggaagagcttacaacctgccttaaaaattaccgaaaaaccttaatacactgctatggaggacttgggagatcttgtcttgtagctgcttgtctcctactatacctgtctgacacaatatcaccagagcaagccatagacagcctgcgagacctaagaggatccggggcaatacagaccatcaagcaatacaattatcttcatgagtttcgggacaaattagctgcacatctatcatcaagagattcacaatcaagatctgtatcaagataaaggaattcaaatagcatatatatgaccatgtctgaaatgtcagttctctagcataatttgtattgaaaatgaaaccaccagtcgttatcaacttgaatgtaaatgtacatgtgcagatattcctaaagtgccttcgtggc

SEQ ID NO: 1207 - DNA, 2439 bp, Homo sapiens; identical to SEQ ID NO: 441

SEQ ID NO: 1208 - DNA, 2261 bp, Homo sapiens
ccgcggttccggctgctccggcgaggcgacccttgggtcggcgctgcgggcgaggtgggcaggtaggtgggcggacggccgcggttctccggcaagcgcaggcggcggagtcccccacggcgcccgaagcgccccccgcacccccggcctccagcgttgaggcgggggagtgaggagatgccgacccagagggacagcagcaccatgtcccacacggtcgcaggcggcggcagcggggaccattcccaccaggtccgggtgaaagcctactaccgcggggatatcatgataacacattttgaaccttccatctcctttgagggcctttgcaatgaggttcgagacatgtgttcttttgacaacgaacagctcttcaccatgaaatggatagatgaggaaggagacccgtgtacagtatcatctcagttggagttagaagaagcctttagactttatgagctaaacaaggattctgaactcttgattcatgtgttcccttgtgtaccagaacgtcctgggatgccttgtccaggagaagataaatccatctaccgtagaggtgcacgccgctggagaaagctttattgtgccaatggccacactttccaagccaagcgtttcaacaggcgtgctcactgtgccatctgcacagaccgaatatggggacttggacgccaaggatataagtgcatcaactgcaaactcttggttcataagaagtgccataaactcgtcacaattgaatgtgggcggcattctttgccacaggaaccagtgatgcccatggatcagtcatccatgcattctgaccatgcacagacagtaattccatataatccttcaagtcatgagagtttggatcaagttggtgaagaaaaagaggcaatgaacaccagggaaagtggcaaagcttcatccagtctaggtcttcaggattttgatttgctccgggtaataggaagaggaagttatgccaaagtactgttggttcgattaaaaaaaacagatcgtatttatgcaatgaaagttgtgaaaaaagagcttgttaatgatgatgaggatattgattgggtacagacagagaagcatgtgtttgagcaggcatccaatcatcctttccttgttgggctgcattcttgctttcagacagaaagcagattgttctttgttatagagtatgtaaatggaggagacctaatgtttcatatgcagcgacaaagaaaacttcctgaagaacatgccagattttactctgcagaaatcagtctagcattaaattatcttcatgagcgagggataatttatagagatttgaaactggacaatgtattactggactctgaaggccacattaaactcactgactacggcatgtgtaaggaaggattacggccaggagatacaaccagcactttctgtggtactcctaattacattgctcctgaaattttaagaggagaagattatggtttcagtgttgactggtgggctcttggagtgctcatgtttgagatgatggcaggaaggtctccatttgatattgttgggagctccgataaccctgaccagaacacagaggattatctcttccaagttattttggaaaaacaaattcgcataccacgttctctgtctgtaaaagctgcaagtgttctgaagagttttcttaataaggaccctaaggaacgattgggttgtcatcctcaaacaggatttgctgatattcagggacacccgttcttccgaaatgttgattgggatatgatggagcaaaaacaggtggtacctccctttaaaccaaatatttctggggaatttggtttggacaactttgattctcagtttactaatgaacctgtccagctcactccagatgacgatgacattgtgaggaagattgatcagtctgaatttgaaggttttgagtatatcaatcctcttttgatgtctgcagaagaatgtgtctgatcctcatttttcaaccatgtattctactcatgttgccatttaatgcatggataaacttgctgcaagcctggatacaattaaccattttatatttgccacctacaaaaaaacacccaatatcttctcttgtagactatatgaatcaattattacatctgttttactatgaaaaaaaaattaatactactagcttccagacaatcatgtcaaaatttagttgaactggtttttcagtttttaaaaggcctacagatgagtaatgaagttaccttttttgtttaaaaaaaaaaaag

SEQ ID NO: 1209 - DNA, 1488 bp, Homo sapiens
cgcgacggctgagcaaggactctccagtcctcagtcaccttggacaaagaagtgtggatcctcagattccatcttttccaactccaaggtgccatggcagagaaggtgctggtaacaggtggggctggctacattggcagccacacggtgctggagctgctggaggctggctacttgcctgtggtcatcgataacttccataatgccttccgtggagggggctccctgcctgagagcctgcggcgggtccaggagctgacaggccgctctgtggagtttgaggagatggacattttggaccagggagccctacagcgtctcttcaaaaagtacagctttatggcggtcatccactttgcggggctcaaggccgtgggcgagtcggtgcagaagcctctggattattacagagttaacctgaccgggaccatccagcttctggagatcatgaaggcccacggggtgaagaacctggtgttcagcagctcagccactgtgtacgggaacccccagtacctgccccttgatgaggcccaccccacgggtggttgtaccaacccttacggcaagtccaagttcttcatcgaggaaatgatccgggacctgtgccaggcagacaagacttggaacgtagtgctgctgcgctatttcaaccccacaggtgcccatgcctctggctgcattggtgaggatccccagggcatacccaacaacctcatgccttatgtctcccaggtggcgatcgggcgacgggaggccctgaatgtctttggcaatgactatgacacagaggatggcacaggtgtccgggattacatccatgtcgtggatctggccaagggccacattgcagccttaaggaagctgaaagaacagtgtggctgccggatctacaacctgggcacgggcacaggctattcagtgctgcagatggtccaggctatggagaaggcctctgggaagaagatcccgtacaaggtggtggcacggcgggaaggtgatgtggcagcctgttacgccaaccccagcctggcccaagaggagctggggtggacagcagccttagggctggacaggatgtgtgaggatctctggcgctggcagaagcagaatccttcaggctttggcacgcaagcctgaggaccctcccctaccaaggaccaggaaaagcagcagctgcctgctctccagcctctggaggaactcagggccctggagctgctggggccaagccaagggcctcccctacctcaaaccccagctgggcccgcttagcccaccaggcatgaggccaaggctccactgaccaggaggccgaggtctctaactcttatcttccacagggtccaagagttcatcaggacccccaagagtgagtgagggggcaaggctctggcacaaaacctcctcctcccaggcactcatttatattgctctgaaagagctttccaaagtatttaaaaataaaaacaagttttcttacactgg

SEQ ID NO: 1210 - DNA, 4839 bp, Homo sapiens
tccggtttttctcaggggacgttgaaattatttttgtaacgggagtcgggagaggacggggcgtgccccgcgtgcgcgcgcgtcgtcctccccggcgctcctccacagctcgctggctcccgccgcggaaaggcgtcatgccgcccaaaaccccccgaaaaacggccgccaccgccgccgctgccgccgcggaacccccggcaccgccgccgccgccccctcctgaggaggacccagagcaggacagcggcccggaggacctgcctctcgtcaggcttgagtttgaagaaacagaagaacctgattttactgcattatgtcagaaattaaagataccagatcatgtcagagagagagcttggttaacttgggagaaagtttcatctgtggatggagtattgggaggttatattcaaaagaaaaaggaactgtggggaatctgtatctttattgcagcagttgacctagatgagatgtcgttcacttttactgagctacagaaaaacatagaaatcagtgtccataaattctttaacttactaaaagaaattgataccagtaccaaagttgataatgctatgtcaagactgttgaagaagtatgatgtattgtttgcactcttcagcaaattggaaaggacatgtgaacttatatatttgacacaacccagcagttcgatatctactgaaataaattctgcattggtgctaaaagtttcttggatcacatttttattagctaaaggggaagtattacaaatggaagatgatctggtgatttcatttcagttaatgctatgtgtccttgactattttattaaactctcacctcccatgttgctcaaagaaccatataaaacagctgttatacccattaatggttcacctcgaacacccaggcgaggtcagaacaggagtgcacggatagcaaaacaactagaaaatgatacaagaattattgaagttctctgtaaagaacatgaatgtaatatagatgaggtgaaaaatgtttatttcaaaaattttataccttttatgaattctcttggacttgtaacatctaatggacttccagaggttgaaaatctttctaaacgatacgaagaaatttatcttaaaaataaagatctagatgcaagattatttttggatcatgataaaactcttcagactgattctatagacagttttgaaacacagagaacaccacgaaaaagtaaccttgatgaagaggtgaatgtaattcctccacacactccagttaggactgttatgaacactatccaacaattaatgatgattttaaattcagcaagtgatcaaccttcagaaaatctgatttcctattttaacaactgcacagtgaatccaaaagaaagtatactgaaaagagtgaaggatataggatacatctttaaagagaaatttgctaaagctgtgggacagggttgtgtcgaaattggatcacagcgatacaaacttggagttcgcttgtattaccgagtaatggaatccatgcttaaatcagaagaagaacgattatccattcaaaattttagcaaacttctgaatgacaacatttttcatatgtctttattggcgtgcgctcttgaggttgtaatggccacatatagcagaagtacatctcagaatcttgattctggaacagatttgtctttcccatggattctgaatgtgcttaatttaaaagcctttgatttttacaaagtgatcgaaagttttatcaaagcagaaggcaacttgacaagagaaatgataaaacatttagaacgatgtgaacatcgaatcatggaatcccttgcatggctctcagattcacctttatttgatcttattaaacaatcaaaggaccgagaaggaccaactgatcaccttgaatctgcttgtcctcttaatcttcctctccagaataatcacactgcagcagatatgtatctttctcctgtaagatctccaaagaaaaaaggttcaactacgcgtgtaaattctactgcaaatgcagagacacaagcaacctcagccttccagacccagaagccattgaaatctacctctctttcactgttttataaaaaagtgtatcggctagcctatctccggctaaatacactttgtgaacgccttctgtctgagcacccagaattagaacatatcatctggacccttttccagcacaccctgcagaatgagtatgaactcatgagagacaggcatttggaccaaattatgatgtgttccatgtatggcatatgcaaagtgaagaatatagaccttaaattcaaaatcattgtaacagcatacaaggatcttcctcatgctgttcaggagacattcaaacgtgttttgatcaaagaagaggagtatgattctattatagtattctataactcggtcttcatgcagagactgaaaacaaatattttgcagtatgcttccaccaggccccctaccttgtcaccaatacctcacattcctcgaagcccttacaagtttcctagttcacccttacggattcctggagggaacatctatatttcacccctgaagagtccatataaaatttcagaaggtctgccaacaccaacaaaaatgactccaagatcaagaatcttagtatcaattggtgaatcattcgggacttctgagaagttccagaaaataaatcagatggtatgtaacagcgaccgtgtgctcaaaagaagtgctgaaggaagcaaccctcctaaaccactgaaaaaactacgctttgatattgaaggatcagatgaagcagatggaagtaaacatctcccaggagagtccaaatttcagcagaaactggcagaaatgacttctactcgaacacgaatgcaaaagcagaaaatgaatgatagcatggatacctcaaacaaggaagagaaatgaggatctcaggaccttggtggacactgtgtacacctctggattcattgtctctcacagatgtgactgtataactttcccaggttctgtttatggccacatttaatatcttcagctctttttgtggatataaaatgtgcagatgcaattgtttgggtgattcctaagccacttgaaatgttagtcattgttatttatacaagattgaaaatcttgtgtaaatcctgccatttaaaaagttgtagcagattgtttcctcttccaaagtaaaattgctgtgctttatggatagtaagaatggccctagagtgggagtcctgataacccaggcctgtctgactactttgccttcttttgtagcatataggtgatgtttgctcttgtttttattaatttatatgtatatttttttaatttaacatgaacacccttagaaaatgtgtcctatctatcttccaaatgcaatttgattgactgcccattcaccaaaattatcctgaactcttctgcaaaaatggatattattagaaattagaaaaaaattactaattttacacattagattttattttactattggaatctgatatactgtgtgcttgttttataaaattttgcttttaattaaataaaagctggaagcaaagtataaccatatgatactatcatactactgaaacagatttcatacctcagaatgtaaaagaacttactgattattttcttcatccaacttatgtttttaaatgaggattattgatagtactcttggtttttataccattcagatcactgaatttataaagtacccatctagtacttgaaaaagtaaagtgttctgccagatcttaggtatagaggaccctaacacagtatatcccaagtgcactttctaatgtttctgggtcctgaagaattaagatacaaattaattttactccataaacagactgttaattataggagccttaatttttttttcatagagatttgtctaattgcatctcaaaattattctgccctccttaatttgggaaggtttgtgttttctctggaatggtacatgtcttccatgtatcttttgaactggcaattgtctatttatcttttatttttttaagtcagtatggtctaacactggcatgttcaaagccacattatttctagtccaaaattacaagtaatcaagggtcattatgggttaggcattaatgtttctatctgattttgtgcaaaagcttcaaattaaaacagctgcattagaaaaagaggcgcttctcccctcccctacacctaaaggtgtatttaaactatcttgtgtgattaacttatttagagatgctgtaacttaaaataggggatatttaaggtagcttcagctagcttttaggaaaatcactttgtctaactcagaattatttttaaaaagaaatctggtcttgttagaaaacaaaattttattttgtgctcatttaagtttcaaacttactattttgacagttattttgataacaatgacactagaaaacttgactccatttcatcattgtttctgcatgaatatcatacaaatcagttagtttttaggtcaagggcttactatttctgggtcttttgctactaagttcacattagaattagtgccagaattttaggaacttcagagatcgtgtattgagatttcttaaataatgcttcagatattattgctttattgcttttttgtattggttaaaactgtacatttaaaattgctatgttactattttctacaattaatagtttgtctattttaaaataaattagttgttaagagtcttaatggtctgatgttgtgttctttgtattaagtacactaatgttctcttttctgtctaggagaagatagatagaagataactctcctagtatctcatcc

SEQ ID NO: 1211 - DNA, 634 bp, Homo sapiens
cggctgagaggcagcgaactcatctttgccagtacaggagcttgtgccgtggcccacagcccacagcccacagccatgggctgggacctgacggtgaagatgctggcgggcaacgaattccaggtgtccctgagcagctccatgtcggtgtcagagctgaaggcgcagatcacccagaagattggcgtgcacgccttccagcagcgtctggctgtccacccgagcggtgtggcgctgcaggacagggtcccccttgccagccagggcctgggccctggcagcacggtcctgctggtggtggacaaatgcgacgaacctctgagcatcctggtgaggaataacaagggccgcagcagcacctacgaggtccggctgacgcagaccgtggcccacctgaagcagcaagtgagcgggctggagggtgtgcaggacgacctgttctggctgaccttcgaggggaagcccctggaggaccagctcccgctgggggagtacggcctcaagcccctgagcaccgtgttcatgaatctgcgcctgcggggaggcggcacagagcctggcgggcggagctaagggcctccaccagcatccgagcaggatcaagggccggaaataaaggctgttgtaagagaat

SEQ ID NO: 1212 - DNA, 13500 bp, Homo sapiens
  misc_feature (1)..(13500): n=a,t,g or c
aagcttccttcttggaattccaaactaataaatgagctaactccgccccagccccttagtccctccctgcaatccacctacctctgcagacatcttcttccaaggaaccttgcttgggaaacccacaccagacacatccatcatggcgtctacagccgcatgggcgtgcgtccctctgtttatatggccagagccccgcctcgctccgcccctttaaacttggtgggcggaccgaggcggggctcagaccaggccccaccccgatcagccacgtccatcgccctgatttccaggccctcccagtccctgggcgcacgtcccggattcctcccacgagggggcgggctgcggccaaatctcccgccaggtcagcggccgggcgctgattggccccatggcggcggggccggctcgtgattggccagcacgccgtggtttaaagcggtcggcgcgggaccaggggcttactgcgggacggccttggagagtactcgggttcgtgaacttcccggaggcgcaatgagctgcattaacctgcccactgtgctgcccggctcccccagcaagacccgggggcagatccaggtgcgggggccagccctgcgcgtggctggggatgaggtggtcgtggtgatagcctgtgtccaggcatccgcgcagggcgggccctcaaatgacctcaccttctctcctaggtgattctcgggccgatgttctcaggaaaaaggtaatggcttcgcggggctggggtggagctccttcctcttctccggggaccccttgtccctcccctcccctcccctcccctcccctcccctcccctccccttccctccccttcccttccctccccttcccttcccctagaaggaccagcacagcctcctacagctcccgcccggggtgctcctcccttgaattcagtccaggaggaagtctctgccctcttctgcccaggccaagcccctcgtcctgtgtggacgccactccctcctggagctggtgacagctgcttacagcttagctgtcttccccaccaagtcctctgagaaggtggcaaccagttgtgtcccctgtaggccaggcctttttgtacacccctattcaatgtggctgtttccttctaaggccaaggaaacgtagtcgctttctaaaccaaggagtctgaagccgtggagcctctgctctcctgaggtgatagaaccattccctgacccgggtggggctagtgagtttcttgagtaaactacccacgcaccattctttttgttttgtttttgttcttctagaggtaggatcttgctatgttgcccaggctggtctcaaactcctgggctcaagcaattctctcacctcagcctcccaagtagctgggactacaggcgtgcaccccccccgcctccacccagctaattttattttatttttatagagctggggtcttgctatgttgcccaagctggtcttgaactcctggtctcaagcaatcctcctacttcagcatcccaaagtgctgggattacagatgttagccaccatgccctgccccaacattcttttatggccctggggatcacttcagctcaaaccccttgctcaggaagatgtggctcagagttggacttcttggacccagaagcaagtgcttttgacgctgcacacaaagactttctgaaattaatttagaaaagctgtatgccaggtgtggtggcccacgcctttaatcccagcgctttggaaggctgaggtgcgttgatcacttgaggttaggagtttgagaccaccctggtcaacgtggtgaaaccccatctctactgaaaaaaaaaaccaaaaattatctgggcatggtggcagcctcctgtaatcccagctactcgggaggttgaggcaggagaatctcttgaacccggaaggcaggggttgcagtgagctgagatcgctccactgcactctaacctaggcaacagagcgagactccaccccaaaaagaaagaaagaaaaactctgaactctgggaacaactctgggatgaggttactttggaatgcagtcgcaggttccctctacatgtagcctttgcttctgccttccccactacatcttggagaaggttactcctcccacacttcctgggaccacctgagtaccattcctggacctcttccccatagagaattctgacttccaaccctctttgtagggatattataccctgcctgctctgccctgctcttttctggctgtggtgggctcagtctgcataccactagggacaatgaggagccaggcttgttggggaggggtctccttctcccactcctcccgccgtggacctcacctgaccctctctcctcttgcagcacagagttgatgagacgcgtccgtcgcttccagattgctcagtacaagtgcctggtgatcaagtatgccaaagacactcgctacagcagcagcttctgcacacatgaccggtcagtccctgccccctgcagtcctgtccagtggaaaatcacaaggcacaggacacactgttaggactctctttaatggggatggttaatcatttgaacattgaatgattcaaatcagcacactttccaaggtgcttggcaaggtagcgcacactctccactccctgggctggagccagtggttctccactgagggtgattttgccgccagggtccatttgacaatgtttgaagacatttctagttgttgcaactggaggggggaggggatgcttttgggctttaatgtgtagaaatcagggacactgctgctaagggtcctatggtgcagaggacggcccccatgcaagaacgagctggccccaaatgtcaggagcctgccagtgttcagaaactctgccgtagggtttcagcttcacacaggctgcagactggtttggtttggcctgcacgttgatttttgtttaattttttagttgtccgttgttggctggctcccccgtcacctggcagccttcacgcttccctgttttatgtgtagctgtttgagctcgctggacatttccgcctgcaacctcagtttgggagttaaattcacttccttggcagcagatgtgggcccgatgtttctgagcctgagacgctttgcttggtcctctggacttgtccacctgggcacccagtggcaaagccatgctgtgccacacattatagggcttcagcctcagagccctggctgggagctgtatccgagagttgctatggctgtgcagagaacagatccacccggcgtgtggccttcggtgggagctgaggggctcctgaagccagatgctggtggagtggagggtgcttggggcttggagttgcatgtgggaatttaaccgcaccttcgtgaccatgctgtctgatgtaggtcatttacttttccaaatttgcttcctcattcctaagatgcgatgtccacggcacagggtggtgttacacctggtggggacagggaaagcagaggaggtcacttcgttccagctgttggaagtacaacttctggagtcagtcagatccgggattaaatatgagttctgcccgtgtgtcacaagtcatctctaacacgggccacagaggccaaggctgggccagcagcattgatggctcgagaggctgcccttgcaggggccacagctggcctcccacctgccctcactttgtctttctctgtttagggagggaagagggaatttaaaatgcccaaaatactgtttcacacattctttccagaactcgaagtaggattatagcaaggtaataacgaaacaatagttgtaaagtatgtttttttgtttgtttgttgtttgtttttgggacagggtctctctctgtcacccaggctggagtgcagtggctcaatcatagcttactgttacgtgaccccaaacccttgggctcaagtgatcgtcccacctcagccccctgagcaggtgggactacaggcgcacaccaccacacccagttaatttttacatttttttcacacagtgtctcgctgtgttacccaggctggtctcgaactcctgagttcaagtgatcctcccgtcttggcctccccaaagattacgggcatgagctgctgtgtctggccagaatacaggattttaaaaatttatgttttgcaacataattaatataaagacaaatataacccaggcccagttctagttattcattcttctgaattttaaaaggaaacatttggctggcccctaatggtatcatgggccctggtacctgatgaagttggcctagtctgcccccagctcctgaacagtggaagagtttttagtctcattgagctttgtactggacattactaatttctaatccaaagcatcaagtgaagtggcttgtataaataactggttttcctctgggaggctaaggcgggtggatcacttaaaagttaggagtctgagaccagcctggccaacatggtgaaaccccatgtctgctaaaaatacaaaaattagctgggtgtgatggtgtgtggccagtagtcccagctactcttgtggctgaggtgggagaatcgcttgagacccttgagaattgggaggtagagattgcagggagccgagatggcgccactgcactccagcctgggtgacagagcaagactctgtttcataaaaaataaataaataactggttttctggacgagggcctttcccataggtgctaacttctcaaagcccggctgggtgaacactgagcctgctttgcaggtagcaggtggtcacgacagtgccattccctggcccctgcattgtggcttctggcctccctggccctgctcacgctctggctttctcttcccaggaacaccatggaggcgctgcccgcctgcctgctccgagacgtggcccaggaggccctgggcgtggctgtcataggcatcgacgaggggcagtttgtaagttggcttgtcttggcatcactcttcctgccttccgctgtgtcctcccgttttccctcgctgacttggaagttatctganncttttagtaaaataacaaggttaaatagctacaactagtgttggaataccctctgaaggcccctttctagtttccctgtcatagtgtcatagtcttgtaggattcgttttactttttttttttttttttttgagacggagttttgctcttgttgcccaggccggagtacgatggcacaatctcaccgcaaactttgcttcctgggttcaagcaattctctcctgtctcagcctcccgagtagctgggattacaggcatgcgccaccacgcccagctaattttatatttttagtagagatggggtttctccatgttggtcaagctggtctcaaactcccaacctcaggtgatccgccccgccttgaactcccaaagcgctgggattacaggcatgagctaccacacctggccattgtacctttttaaaaatacatatatctatttactggcaagatgcagtgactcacacctgtaatctcagcctgtgggaggccaaggtggacagatcacttgagcccaggagttggagactcacctgggcaacatagtaaaaccccatctctaccaaaaaaaaaaagaaattagccagtcatagcagcgcacacctgtggtccctgctactcaggaggctgaggcagaaggatggagcctgggaggtcgaggctgcagtgagtggtgatagcaccactgcactccagcccgggcgacaaggccagaccctgtctcaaaaaaaaaagggggaggtggggagtaatgtttggtttgcctcatggttccttttgcttgtttcttatacgtttattttcttgttgttgaagtaccttttttagtagtttttgcagccaggaggtatagatgggaagctgccagtctttgtatggaaatctttcttttgtcatctagtttaagctgggcagcaagaggtaggttgatcttgtgtgggtttgggtttttttttttttttgagacggagtcttactctgtcgcccaggctggagtgcaatggtgtgatctcggctcactgcaacctctgccacccggattcaagcgattttcccacctcgcctcccaagtaggtgggattacaggcacccaccatcatgcctggctaatttttgtagagacaagggttcaccatgttggctaggctggtcttgaactcctgacctcaggtgatccacccgccttggcttcccaaagtgttggaattacaggcatgagccgccgtgcccggccttttttatttttattttttttgagatggagtcttgctctgttgccctggctggagtggagtgacgtgatcttagctcacagcaacctccgccttttgggttcaagcagttctgcctcatccttccgggtagctgggatcacaggtgcgtgccacatgcgtamtcatttatgtatttttaatagagatggggtttcaccatgttggccagctggtctggaactcctgacctcaggtgatccgcatgcctcagctcccaaagtgctgggattacaggcgtgaaccacgcctggtcttgatcttgttgctttgaaaagtagcagcgctggtcattgtgtttttgctcagaggaaggccgccatctctctaatgttacctctggtcaggtattctatctgttctctctcagcacaatgtgtgtaggggaagctttgtttcatttatcctgctttatagctggtgtgccttttcatttctggggaaggaatgaagccattatcacttcaggtatttctctcctcatccatctctgaggtgttctgggttccatcttccagagtgtgttttgtttcagtgactatttttacatctgctgctctaattcatcatgctccgttttgtttgacaagttactgttgggttatttttaaatttatgctgttccttccattatgttcctgaaaatcttttcttagacttttccagatttttctatttcctcaggaacatattctgtggttgagtttctgggttattttctgttatcttagttttctttcctctgctttggagattttatttttgttagtttatcacaaagaatgaaactgaaactctctccaaggggtttagcagacttgacctcttaggtacttttagggttgcctcgaagtacacaatgtggtggtttgatataaacataacaggaatttatttctcgctcacagaccccctacgtggttccaggccggttgatggggaggccgcccacgaggcggcttaggtcgccctggctggctgtatacagacacggaggggaagagacgtggcggagcccctgggtgtgaggttttcatgggcctgaccagaagctgcaaacgtcacttctgctgatctttcaaagactagaacctgggcacagggccacctatacgtttagtatacttagtccagttcgttttttgtttgtttttaaaaacagtcttgctctgtggcccaggctggagtgcagtggcgcagtctcggctcactataacctccatgtcccaggttcaagtgattctcccgcctcagcctcctgagtagctgggattacaggcttctgccaccatgcccagctaaccttttgtatttttagtagagacggggtttcatcatgttgaccgggctggtctggaactcctaacctcaggtgatctgcctgcctcagcctcccaaagtgctgggattacagcgtgagccaccacgcctggccacacttagtctagttctataccctggaggaagaataaatgagtttgtttggtgagtgcttcaaggtctctacccgccctgcctcccagcacagagccaggccgctctggcctgaataccctgcccggacgtcacagggcctgtcccctcaaaaggccagtcctgccttcctggttctgttcttgcccaacattctgtatgagtcacagctgcaaattccattcccgtggggaggctgacgggtcccttcccctgtgcggggcatctgccctgtggagttgaggctgccagtgtccgctctgggttcccgaccacccggcagctggcatctcctccccgcttgggtatggccattccgtttctgaccttcagaggtgcgcccctgagcacccccatgcctctgcgtacgtggagacgtcgttgttgctgccccgtgcttgagggactcctggcgagaaagtgagcccaggctgggaatagggctgcagctgttctcttttgctcccaaactgtggcctcagaatgcatccagggattttgcatcagctttggggacatggccctctcagaacaaggaagcttcagctttggcaaggctctccctccttcagacctgccgctgtgagttgttcaatagctctgttctcctggctctgcgtaaaccttgttgacagaggctgacccagacccccgaggcagaaacctttcccttctccttcctcgacatccaaatgccctgagtcaggagccagcgtatgaagtcctgtcccctgttcagcctgtaggagggatttctcggtctacttcctccctggccagcaagtaaaacttgagttcattcagtgagtatttattacaccctacccagacatcagcattctgccctggcctctgtgtgcccttgttctcttcaagaagttccgggtcaccagcctgaccaacatggagaaactccgtctctactaaaaatacaaaaattagccgggcgtggtggcgcactgcctgtaatcccagctacttgggaggctgaggcaggagaatcgcttgaacccggtaggcgaaggttgcagtgagccaagatcgccccattgcactccaagcctgggcaacaacaagagcaaaactcagtctcaaaacaaaacaaaacaaaagaagttcagggtcttcccattgcaagcagttctagatcgaggagaggggttcctagcatgggacccagcagaaggactgtccttcgctccttcattgtctacgtggacagtggatgaagctcagccgaacctgccttgttcccgttttctgggtcagcagggaaagcctttcacagagtagccaccgtgccatcctgaggaaggccctgggtcagaagcttctgtgcttctttgtaccccgggcaagacacacaggtgctcacactgctctgtagaaactgttggcatccaagagagactcacctggaaatctctggaaaacctgaagctcctagctgggggtgctgtgcttcagatgctggtggtgggtgggcacccttgcatcaacagctgcacagtgtgtggtgggcttgcagggtcgcttggcaatagtaggagctctgatttatttttttaaactttttttctggctgggcaggtggctcacacctgtaatcccagcactttggaaggcctaggcgggcggatcacttgaggtcaggagtttgagaccagccaggccaacatggtgaaaccccatctctactaaaaatacaaaaattagccaagcgtggtggcacacacctgtaattccagctacttgggaggcagaggcacaagaattgcttgaacctgggaggcagaggttgcagtgagccaagattatgccactgcactccagcctggatgacagagcgagactctgtctcaaaaaaaatagacaaagccaggcgcagtggctcatgcctgtaatcccaacactttgggaggccgaggtgggtgaatcacgaggtcaggagatcgagaccatcctggctaacacggtgaaaccccgtctctactgaaaatacaaaaaaattagccaggcgtggtggtgggcacctgtagtctcagctactcgggaggctgaggcaggagagtggcgtgaacccaggaggcggagcttgcagtgagctgagatcacgccactgcactccagcctgggcgacagagcgagactccgtctcaaaaaaaaaaaaaaaatagacctttttgtgttttctgttctactacacaagtaatacaggttgagtattccttaacctaaatgcctgggaccagaagtgtttcggatttcaggttttcgaatatttgcatgttcataatataatgagaccttgggaatgagccccaagtgtaaacacaaaatccatttatgttttatagacatcttaggcacatagcctgagagtaattttatgtatttagtaatttgggcgtgagccacagtttttgactgtgacctgtcccatgaggtcaggtgtggaattttccacttgtggtgggcgctcaaaaagtttcagattttggagcctttcaggttagagacatgcaatctataataagtttaatctaggaaaagttagggtctggcacagaggctcacgtctgtgatcccagcactttgggaggctgaggcaggcagatcactggaagtgctggacgggtggggaagtgccgggtgcaagaaccaagctctttgactatggacctcagcctgaggttggtcaagaggtggagtgagtgggggctgaggaccttcatcctgaaaccctgatgcaggagagtctggggtctgccttctaccctcatgtggcgggtgaaggagcaaggttctcaactcaggagggttcttcccctctccattcccacccaggggacatctcacaacaactagaaacaattttgtcgcagctggggggtgggaggtgtgttcctggcatctatctaatgggtgggggcgagggacgcagcccaacaccctacagtgcacaggacacagcgagatccggcctcaaactggcagccatggcagcgtcagccctccagggggcgcgccctggcgcaggtggtgtgccggcccacagctccttgcaggctgggagctgcattttcgtgacatgtcatgagtcctcagagaaaaagagggaacgagtgcatggtggggaggggccctggcgtgctggagtctctgggtttccttctccagagacccctgcagtcagctgagcgcaatcagtcacgttgggctttgcttggatctcactggaatttttcgagccaccccttagtcctcaccttgctaagccctcacgtctcaataacctcaaacctcagtacctgggctgagaaagcctgagtggccctgggagagagaccctgcacccaaggacaaggacatccctgcttcacccaacccaaaggccagtctggacatatgaactcaaccagctaagagtgatatgattgattgatgagaatcaccagagcacttgccagagtttcagcttctccctgggccaaagtgaagtttgctttacacagtaaatgtgctctgtgcaggtcctgaatttagaaggctgtgctgtgtcatcctgctctgtaaatggccagtaggacccccgccccttctcaaggcacattacccgtttaaaacgggggaggcaagagcacaaagcgcccacctattcaccgaagagcatgtatataacttagggccttccatccttaaacaacaggaccttccttgctcttacggaaaaggaaacaggttcagagacgttaattcattgccaaggtcacacagataatgggtccagcgaagagtggtgtccgagcccaaggcagcaggcctttggccactgcagtgttaaacagcacagctggtgtggaagtccggtgctgagtcctgggtacctggactcggagggaagctggctgcagggggaaggggctgcgcagttgtggatgtacctgtcgtctgctggggggcgtgcgggtggacacagtcccccggcctggggagcctcgtgggagaattaagagttactccgggccaaatggccggagttgtcagatctggcagcgtcttcgctggggctccagggagctgctgctggggtggaagctctcacactctttctccacgtgccctttccagttccctgacatcatggagttctgcgaggccatggccaacgccgggaagaccgtaattgtggctgcactggatgggaccttccagaggaaggtaaggcgtctgatccaggtctggagctgggattgaggagggcaagaggcttctggatgggcacagagacaccagctctgggtgaccagggctcagccaccacagggttacggccgagctgctcaggcttggctgagccaagggactccatggtctgtgcagactgcgtgccatctgttgtggcaggtgctttgaattggcaaagggacagagccgggcatggtgctctgggggttgggggaaggactaaggtcagagcaaactctcctggcttcagtacttgtgaatcagagggtttaaaagaaaaacccacctggtaaggtgctgagcgccctctgtctttccatgggagcacagccatttggggccatcctgaacctggtgccgctggccgagagcgtggtgaagctgacggcggtgtgcatggagtgcttccgggaagccgcctataccaagaggctcggcacagagaaggaggtagctccacctgccttccctgcaggccggcggggtgggggtatggctctgcctccttcctgtcctggcccttcacccatcccctgtccctgcggccaggtcgaggtgattgggggagcagacaagtaccactccgtgtgtcggctctgctacttcaagaaggcctcaggccagcctgccgggccggacaacaaagagaactgcccagtgccaggaaagccaggggaagccgtggctgccaggaagctctttgccccacagcagattctgcaatgcagccctgccaactgagggacctgcaagggccgcccgctcccttcctgccactgccgcctactggacgctgccctgcatgctgcccagccactccaggaggaagtcgggaggcgtggagggtgaccacaccttggccttctgggaactctcctttgtgtggctgccccacctgccgcatgctccctcctctcctacccactggtctgcttaaagcttccctctcagctgctgggacgatcgcccaggctggagctggccccgcttggtggcctgggatctggcacactccctctccttggggtgagggacagagccccacgctgttgacatcagcctgcttcttcccctctgcggctttcactgctgagtttctgttctccctgggaagcctgtgccagcacctttgagccttggcccacactgaggcttaggcctctctgcctgggatgggctcccaccctcccctgaggatggcctggattcacgccctcttgtttccttttgggctcaaagcccttcctacctctggtgatggtttccacaggaacaacagcatctttcaccaagatgggtggcaccaaccttgctgggacttggatcccaggggcttatctcttcaagtgtggagagggcagggtccacgcctctgctgtagcttatgaaattaactaattgaaaattcactggttggtggacgcacatttctctttcacctgggtttccctgggtctcatggacagctccaacttgatttggg

SEQ ID NO: 1213 - DNA, 1160 bp, Homo sapiens
cctccgacagcctctccacaggtaccatgaaggtctccgcggcacgcctcgctgtcatcctcattgctactgccctctgcgctcctgcatctgcctccccatattcctcggacaccacaccctgctgctttgcctacattgcccgcccactgccccgtgcccacatcaaggagtatttctacaccagtggcaagtgctccaacccagcagtcgtctttgtcacccgaaagaaccgccaagtgtgtgccaacccagagaagaaatgggttcgggagtacatcaactctttggagatgagctaggatggagagtccttgaacctgaacttacacaaatttgcctgtttctgcttgctcttgtcctagcttgggaggcttcccctcactatcctaccccacccgctccttgaagggcccagattctgaccacgacgagcagcagttacaaaaaccttccccaggctggacgtggtggctcagccttgtaatcccagcactttgggaggccaaggtgggtggatcacttgaggtcaggagttcgagacagcctggccaacatgatgaaaccccatgtgtactaaaaatacaaaaaattagccgggcgtggtagcgggcgcctgtagtcccagctactcgggaggctgaggcaggagaatggcgtgaacccgggagcggagcttgcagtgagccgagatcgcgccactgcactccagcctgggcgacagagcgagactccgtctcaaaaaaaaaaaaaaaaaaaaaaaaaatacaaaaattagccgcgtggtggcccacgcctgtaatcccagctactcgggaggctaaggcaggaaaattgtttgaacccaggaggtggaggctgcagtgagctgagattgtgccacttcactccagcctgggtgacaaagtgagactccgtcacaacaacaacaacaaaaagcttccccaactaaagcctagaagagcttctgaggcgctgctttgtcaaaaggaagtctctaggttctgagctctggctttgccttggctttgcaagggctctgtgacaaggaaggaagtcagcatgcctctagaggcaaggaagggaggaacactgcactcttaagcttccgccgtctcaacccctcacaggagcttactggcaaacatgaaaaatcgggg

SEQ ID NO: 1214 - DNA, 1452 bp, Homo sapiens; identical to SEQ ID NO: 1008

SEQ ID NO: 1215 - DNA, 1658 bp, Homo sapiens
ctctctctctatctctctcagaatgacaattctaggtacaacttttggcatggttttttctttacttcaagtcgtttctggagaaagtggctatgctcaaaatggagacttggaagatgcagaactggatgactactcattctcatgctatagccagttggaagtgaatggatcgcagcattcactgacctgtgcttttgaggacccagatgtcaacaccaccaatctggaatttgaaatatgtggggccctcgtggaggtaaagtgcctgaatttcaggaaactacaagagatatatttcatcgagacaaagaaattcttactgattggaaagagcaatatatgtgtgaaggttggagaaaagagtctaacctgcaaaaaaatagacctaaccactatagttaaacctgaggctccttttgacctgagtgtcatctatcgggaaggagccaatgactttgtggtgacatttaatacatcacacttgcaaaagaagtatgtaaaagttttaatgcatgatgtagcttaccgccaggaaaaggatgaaaacaaatggacgcatgtgaatttatccagcacaaagctgacactcctgcagagaaagctccaaccggcagcaatgtatgagattaaagttcgatccatccctgatcactattttaaaggcttctggagtgaatggagtccaagttattacttcagaactccagagatcaataatagctcaggggagatggatcctatcttactaaccatcagcattttgagttttttctctgtcgctctgttggtcatcttggcctgtgtgttatggaaaaaaaggattaagcctatcgtatggcccagtctccccgatcataagaagactctggaacatctttgtaagaaaccaagaaaaaatttaaatgtgagtttcaatcctgaaagtttcctggactgccagattcatagggtggatgacattcaagctagagatgaagtggaaggttttctgcaagatacgtttcctcagcaactagaagaatctgagaagcagaggcttggaggggatgtgcagagccccaactgcccatctgaggatgtagtcgtcactccagaaagctttggaagagattcatccctcacatgcctggctgggaatgtcagtgcatgtgacgcccctattctctcctcttccaggtccctagactgcagggagagtggcaagaatgggcctcatgtgtaccaggacctcctgcttagccttgggactacaaacagcacgctgccccctccattttctctccaatctggaatcctgacattgaacccagttgctcagggtcagcccattcttacttccctgggatcaaatcaagaagaagcatatgtcaccatgtccagcttctaccaaaaccagtgaagtgtaagaaacccagactgaacttaccgtgagcgacaaagatgatttaaaagggaagtctagagttcctagtctccctcacagcacagagaagacaaaattagcaaaaccccactacacagtctgcaagattctgaaacattgctttgaccactcttcctgagttcagtggcactcaacatgagtcaagagcatcctgcttctaccatgtggatttggtcacaaggtttaaggtgacccaatgattcagctattt

SEQ ID NO: 1216 - DNA, 2206 bp, Homo sapiens
ctagtctttcagccttcaggctgtttttggcttgaagctctcttggcctcctagtttctacctaatcatgtccctggtggaggccatcagcctctggaatgaaggggtgctggcagcggacaagaaggactggaagggagccctggatgccttcagtgccgtccaggacccccactcccggatttgcttcaacattggctgcatgtacactatcctgaagaacatgactgaagcagagaaggcctttaccagaagcattaaccgagacaagcacttggcagtggcttacttccaacgagggatgctctactaccagacagagaaatatgatttggctatcaaagaccttaaagaagccttgattcagcttcgagggaaccagctgatagactataagatcctggggctccagttcaagctgtttgcctgtgaggtgttatataacattgctttcatgtatgccaagaaggaggaatggaaaaaagctgaagaacagttagcattggccacgagcatgaagtctgagcccagacattccaaaatcgacaaggcgatggagtgtgtctggaagcagaagctatatgagccagtggtgatccctgtgggcaagctgtttcgaccaaatgagagacaagtggctcagctggccaagaaggattacctaggcaaggcgacggtcgtggcatctgtggtggatcaagacagtttctctgggtttgcccctctgcaaccacaggcagctgagcctccacccagaccgaaaaccccagagatcttcagggctctggaaggggaggctcaccgtgtgctatttgggtttgtgcctgagacaaaagaagagctccaggtcatgccagggaacattgtctttgtcttgaagaagggcaatgataactgggccacggtcatgttcaacgggcagaaggggcttgttccctgcaactaccttgaaccagttgagttgcggatccaccctcagcagcagccccaggaggaaagctctccgcagtccgacatcccagctcctcctagttccaaagcccctggaaaaccccagctgtcaccaggccagaaacaaaaagaagagcctaaggaagtgaagctcagtgttcccatgccctacacactcaaggtgcactacaagtacacggtagtcatgaagactcagcccgggctcccctacagccaggtccgggacatggtgtctaagaaactggagctccggctggaacacactaagctgagctatcggcctcgggacagcaatgagctggtgcccctttcagaagacagcatgaaggatgcctggggccaggtgaaaaactactgcctgactctgtggtgtgagaacacagtgggtgaccaaggctttccagatgaacccaaggaaagtgaaaaagctgatgctaataaccagacaacagaacctcagcttaagaaaggcagccaagtggaggcactcttcagttatgaggctacccaaccagaggacctggagtttcaggaaggggatataatcctggtgttatcaaaggtgaatgaagaatggctggaaggggagtgcaaagggaaggtgggcattttccccaaagtttttgttgaagactgcgcaactacagatttggaaagcactcggagagaagtctaggatgtttcacaaactacaaagctgaagaaaatgaagccctattacttgtttgtaagatttagcacccttctgctgtatactgtactgagacattacagtttggaagtgttaactatttattccctgttaaaatttaacctactagacaatgatgtgagtacccaggatgatttcctggggcacagtgggtgaggagatggggacaggtgaatggaggagttaggggagaggaaaagtggatggaagtgtctggaaagggcacgagagagtcttccaggtactgatcctgtttcttgctctgagtgctagctagccagctgtgttcacactgtaaacattcatcaagctgtacatttggtgcacttttctgtgtcataccacaataaaaaaaaacctatcatcatcttacaaaaacaagacacccaagtccaggcccaaggagtaagtacaaatattcctgtttctgaaccattactgtaattggctcttaaggcttgaagtaaccttataggttactcataaggcatatacaaataaacttgtttgttttcttttttc

SEQ ID NO: 1217 - DNA, 2798 bp, Homo sapiens
gccctctcccacagcggagtccaaaacaggcctaccagtcagttcttatttctattgggtgtttccatgctccaccatgttaagagctaagaatcagctttttttactttcacctcattacctgaggcaggtaaaagaatcatcaggctccaggctcatacagcaacgacttctacaccagcaacagccccttcacccagaatgggctgccctggctaaaaagcagctgaaaggcaaaaacccagaagacctaatatggcacaccccggaagggatctctataaaacccttgtattccaagagagatactatggacttacctgaagaacttccaggagtgaagccattcacacgtggaccatatcctaccatgtatacctttaggccctggaccatccgccagtatgctggttttagtactgtggaagaaagcaataagttctataaggacaacattaaggctggtcagcagggattatcagttgcctttgatctggcgacacatcgtggctatgattcagacaaccctcgagttcgtggtgatgttggaatggctggagttgctattgacactgtggaagataccaaaattctttttgatggaattcctttagaaaaaatgtcagtttccatgactatgaatggagcagttattccagttcttgcaaattttatagtaactggagaagaacaaggtgtacctaaagagaaacttactggtaccatccaaaatgatatactaaaggaatttatggttcgaaatacatacatttttcctccagaaccatccatgaaaattattgctgacatatttgaatatacagcaaagcacatgccaaaatttaattcaatttcaattagtggataccatatgcaggaagcaggggctgatgccattctggagctggcctatactttagcagatggattggagtactctagaactggactccaggctggcctgacaattgatgaatttgcaccaaggttgtctttcttctggggaattggaatgaatttctatatggaaatagcaaagatgagagctggtagaagactctgggctcacttaatagagaaaatgtttcagcctaaaaactcaaaatctcttcttctaagagcacactgtcagacatctggatggtcacttactgagcaggatccctacaataatattgtccgtactgcaatagaagcaatggcagcagtatttggagggactcagtctttgcacacaaattcttttgatgaagctttgggtttgccaactgtgaaaagtgctcgaattgccaggaacacacaaatcatcattcaagaagaatctgggattcccaaagtggctgatccttggggaggttcttacatgatggaatgtctcacaaatgatgtttatgatgctgctttaaagctcattaatgaaattgaagaaatgggtggaatggccaaagctgtagctgagggaatacctaaacttcgaattgaagaatgtgctgcccgaagacaagctagaatagattctggttctgaagtaattgttggagtaaataagtaccagttggaaaaagaagacgctgtagaagttctggcaattgataatacttcagtgcgaaacaggcagattgaaaaacttaagaagatcaaatccagcagggatcaagctttggctgaacattgtcttgctgcactaaccgaatgtgctgctagcggagatggaaatatcctggctcttgcagtggatgcatctcgggcaagatgtacagtgggagaaatcacagatgccctgaaaaaggtatttggtgaacataaagcgaatgatcgaatggtgagtggagcatatcgccaggaatttggagaaagtaaagagataacatctgctatcaagagggttcataaattcatggaacgtgaaggtcgcagacctcgtcttcttgtagcaaaaatgggacaagatggccatgacagaggagcaaaagttattgctacaggatttgctgatcttggttttgatgtggacataggccctcttttccagactcctcgtgaagtggcccagcaggctgtggatgcggatgtgcatgctgtgggcgtaagcaccctcgctgctggtcataaaaccctagttcctgaactcatcaaagaacttaactcccttggacggccagatattcttgtcatgtgtggaggggtgataccacctcaggattatgaatttctgtttgaagttggtgtttccaatgtatttggtcctgggactcgaattccaaaggctgccgttcaggtgcttgatgatattgagaagtgtttggaaaagaagcagcaatctgtataatatcctctttttgttttagcttttgtctaaaatattattttagttatgatcaaagaagagagtaaagctatgtcttcaatttaatttcaatacctgatttgtactttccttgaaagctttactttaaaataccttacttataggcctggtgtcatgctataagtatgtacatacagtttcacttcaaaaataaaaaaaaatccctaaaaactctctatactctctataacaatactttatcaagaactctggacaatggtattatttttaaaaatcatggtgatgtatttattagaatgtttcttataaatctctttcatttttatattaagaattaaactgtacctaaaaaaactctgactattcccatttctcagtttagcattacattgtcttgagcaccagaaaataaaatccatatattaattaaaacctatcttgaaaaaaaaaaaaaaaaaaaaaaaaaaaa

SEQ ID NO: 1218 - DNA, 3984 bp, Homo sapiens; identical to SEQ ID NO: 448

SEQ ID NO: 1219 - DNA, 1446 bp, Homo sapiens
ctgccatttaggacaagctggatgatgatggtttgatagctccaggggttcgtgtataggagatgatgaatctgcttcatccagaatcacaatcttaaaaggcgggaactgaggcgactgtggggacatcagtgatcgtaagtctcctgggcccgttattctcagattaggtgacggagctaagacttcgagaccatctcgtcctttttgtatcgcggaaacctgaggaacgagccggcggcggtgacctgcacgagaagccaggctaactgggtgaagtaccatgcaagcatttcttaaaggtacatccatcagtactaaacccccgctgaccaaggatcgaggagtagctgccagtgcgggaagtagcggagagaacaagaaagccaaacccgttccctgggtggaaaaatatcgcccaaaatgtgtggatgaagttgctttccaggaagaagtggttgcagtgctgaaaaaatctttagaaggagcagatcttcctaatctcttgttttacggaccacctggaactggaaaaacatccactattttggcagcagctagagaactctttgggcctgaacttttccgattaagagttcttgagttaaatgcatctgatgaacgtggaatacaagtagttcgagagaaagtgaaaaattttgctcaattaactgtgtcaggaagtcgctcagatgggaagccgtgtccgccttttaagattgtgattctggatgaagcagattctatgacctcagctgctcaggcagctttaagacgtaccatggagaaggagtcgaaaaccacccgattctgtcttatctgtaactatgtcagtcgaataattgaacccctgacctctagatgttcaaaattccgcttcaagcctctgtcagataaaattcaacagcagcgattactagacattgccaagaaggaaaatgtcaaaattagtgatgagggaatagcttatcttgttaaagtgtcagaaggagacttaagaaaagccattacatttcttcaaagcgctactcgattaacaggtggaaaggagatcacagagaaagtgattacagacattgctggggtaataccagctgagaaaattgatggagtatttgctgcctgtcagagtggctcttttgacaaactagaagctgtggtcaaggatttaatagatgagggtcatgcagcaactcagctcgtcaatcaactccatgatgtggttgtagaaaataacttatctgataaacagaagtctattatcacagaaaaacttgccgaagttgacaaatgcctagcagatggtgctgatgaacatttgcaactcatcagcctttgtgcaactgtgatgcagcagttatctcagaattgttaacgtgatatatctggatggggggttttgtaaataatgaagttgtaataaaaataaaatgaccaaaagcaccg

SEQ ID NO: 1220 - DNA, 5102 bp, Homo sapiens
gcttctgcgactccagttgtgagagccgcaagggcatgggaattgacgccactcaccgacccccagtctcaatctcaacgctgtgaggaaacctcgactttgccaggtccccaagggcagcggggctcggcgagcgaggcacccttctccgtccccatcccaatccaagcgctcctggcactgacgacgccaagagactcgagtgggagttaaagcttccagtgagggcagcaggtgtccaggccgggcctgcgggttcctgttgacgtcttgccctaggcaaaggtcccagttccttctcggagccggctgtcccgcgccactggaaaccgcacctccccgcagcatgggcaccagcctcagcccgaacgacccttggccgctaaacccgctgtccatccagcagaccacgctcctgctactcctgtcggtgctggccactgtgcatgtgggccagcggctgctgaggcaacggaggcggcagctccggtccgcgcccccgggcccgtttgcgtggccactgatcggaaacgcggcggcggtgggccaggcggctcacctctcgttcgctcgcctggcgcggcgctacggcgacgttttccagatccgcctgggcagctgccccatagtggtgctgaatggcgagcgcgccatccaccaggccctggtgcagcagggctcggccttcgccgaccggccggccttcgcctccttccgtgtggtgtccggcggccgcagcatggctttcggccactactcggagcactggaaggtgcagcggcgcgcagcccacagcatgatgcgcaacttcttcacgcgccagccgcgcagccgccaagtcctcgagggccacgtgctgagcgaggcgcgcgagctggtggcgctgctggtgcgcggcagcgcggacggcgccttcctcgacccgaggccgctgaccgtcgtggccgtggccaacgtcatgagtgccgtgtgtttcggctgccgctacagccacgacgaccccgagttccgtgagctgctcagccacaacgaagagttcgggcgcacggtgggcgcgggcagcctggtggacgtgatgccctggctgcagtacttccccaacccggtgcgcaccgttttccgcgaattcgagcagctcaaccgcaacttcagcaacttcatcctggacaagttcttgaggcactgcgaaagccttcggcccggggccgccccccgcgacatgatggacgcctttatcctctctgcggaaaagaaggcggccggggactcgcacggtggtggcgcgcggctggatttggagaacgtaccggccactatcactgacatcttcggcgccagccaggacaccctgtccaccgcgctgcagtggctgctcctcctcttcaccaggtatcctgatgtgcagactcgagtgcaggcagaattggatcaggtcgtggggagggaccgtctgccttgtatgggtgaccagcccaacctgccctatgtcctggccttcctttatgaagccatgcgcttctccagctttgtgcctgtcactattcctcatgccaccactgccaacacctctgtcttgggctaccacattcccaaggacactgtggtttttgtcaaccagtggtctgtgaatcatgacccagtgaagtggcctaacccggagaactttgatccagctcgattcttggacaaggatggcctcatcaacaaggacctgaccagcagagtgatgattttttcagtgggcaaaaggcggtgcattggcgaagaactttctaagatgcagctttttctcttcatctccatcctggctcaccagtgcgatttcagggccaacccaaatgagcctgcgaaaatgaatttcagttatggtctaaccattaaacccaagtcatttaaagtcaatgtcactctcagagagtccatggagctccttgatagtgctgtccaaaatttacaagccaaggaaacttgccaataagaagcaagaggcaagctgaaattttagaaatattcacatcttcggagatgaggagtaaaattcagtttttttccagttcctcttttgtgctgcttctcaattagcgtttaaggtgagcataaatcaactgtccatcaggtgaggtgtgctccatacccagcggttcttcatgagtagtgggctatgcaggagcttctgggagatttttttgagtcaaagacttaaagggcccaatgaattattatatacatactgcatcttggttatttctgaaggtagcattctttggagttaaaatgcacatatagacacatacacccaaacacttacaccaaactactgaatgaagaagtattttggtaaccaggccatttttggtgggaatccaagattggtctcccatatgcagaaatagacaaaaagtatattaaacaaagtttcagagtatattgttgaagagacagagacaagtaatttcagtgtaaagtgtgtgattgaaggtgataagggaaaagataaagaccagaaattcccttttcaccttttcaggaaaataacttagactctagtatttatgggtggatttatccttttgccttctggtatacttccttacttttaaggataaatcataaagtcagttgctcaaaaagaaatcaatagttgaattagtgagtatagtggggttccatgagttatcatgaattttaaagtatgcattattaaattgtaaaactccaaggtgatgttgtacctcttttgcttgccaaagtacagaatttgaattatcagcaaagaaaaaaaaaaaagccagccaagctttaaattatgtgaccataatgtactgatttcagtaagtctcataggttaaaaaaaaaagtcaccaaatagtgtgaaatatattacttaactgtccgtaagcagtatattagtattatcttgttcaggaaaaggttgaataatatatgccttgtgtaatattgaaaattgaaaagtacaactaacgcaaccaagtgtgctaaaaatgagcttgattaaatcaaccacctatttttgacatggaaatgaagcagggtttcttttcttcactcaaattttggcgaatctcaaaattagatcctaagatgtgttcttatttttataacatctttattgaaattctatttataatacagaatcttgttttgaaaataacctaattaatatattaaaattccaaattcatggcatgcttaaattttaactaaattttaaagccattctgattattgagttccagttgaagttagtggaaatctgaacattctcctgtggaaggcagagaaatctaagctgtgtctgcccaatgaataatggaaaatgccatgaattacctggatgttctttttacgaggtgacaagagttggggacagaactcccattacaactgaccaagtttctcttctagatgattttttgaaagttaacattaatgcctgctttttggaaagtcagaatcagaagatagtcttggaagctgtttggaaaagacagtggagatgaggtcagttgtgttttttaagatggcaattactttggtagctgggaaagcataaagctcaaatgaaatgtatgcattcacatttagaaaagtgaattgaagtttcaagttttaaagttcattgcaattaaacttccaaagaaagttctacagtgtcctaagtgctaagtgcttattacattttattaagctttttggaatctttgtaccaaaattttaaaaaagggagtttttgatagttgtgtgtatgtgtgtgtggggtggggggatggtaagagaaaagagagaaacactgaaaagaaggaaagatggttaaacattttcccactcattctgaattaattaatttggagcacaaaattcaaagcatggacatttagaagaaagatgtttggcgtagcagagttaaatctcaaataggctattaaaaaagtctacaacatagcagatctgttttgtggtttggaatattaaaaaacttcatgtaattttattttaaaatttcatagctgtacttcttgaatataaaaaatcatgccagtatttttaaaggcattagagtcaactacacaaagcaggcttgcccagtacatttaaattttttggcacttgccattccaaaatattatgccccaccaaggctgagacagtgaatttgggctgctgtagcctatttttttagattgagaaatgtgtagctgcaaaaataatcatgaaccaatctggatgcctcattatgtcaaccaggtccagatgtgctataatctgtttttacgtatgtaggcccagtcgtcatcagatgcttgcggcaaaagaaagctgtgtttatatggaagaaagtaaggtgcttggagtttacctggcttatttaatatgcttataacctagttaaagaaaggaaaagaaaacaaaaaacgaatgaaaataactgaatttggaggctggagtaatcagattactgctttaatcagaaaccctcattgtgtttctaccggagagagaatgtatttgctgacaaccattaaagtcagaagttttactccaggttattgcaataaagtataatgtttattaaatgcttcatttgtatgtcaaagctttgactctataagcaaattgcttttttccaaaacaaaaagatgtctcaggtttgttttgtgaattttctaaaagctttcatgtcccagaacttagcctttacctgtgaagtgttactacagccttaatattttcctagtagatctatattagatcaaatagttgcatagcagtatatgttaatttgtgtgtttttagctgtgacacaactgtgtgattaaaaggtatactttagtagacatttataactcaaggataccttcttatttaatcttttcttatttttgtactttatcatgaatgcttttagtgtgtgcataatagctacagtgcatagttgtagacaaagtacattctggggaaacaacatttatatgtagcctttactgtttgatataccaaattaaaaaaaaattgtatctcattacttatactgggacaccattaccaaaataataaaaatcactttcataatcttgaaaaaa

SEQ ID NO: 1221 - DNA, 3260 bp, Homo sapiens; identical to SEQ ID NO: 227

SEQ ID NO: 1222 - DNA, 1873 bp, Homo sapiens
caaactacgtgctgtacagctgcatcagctgctcgtagacatgtccagcagctggtcgaggtccacgccgcggtaggtgaagttgcggaaggtccggcgagggatctgaaacttgccccttacccttcgggatattgcaggacgctgcatcatgagcgacagtaaatgtgacagtcagttttatagtgtccaagtggcagactcaaccttcactgtcctaaaacgttaccagcagctgaaaccaattggctctggggcccaagggattgtttgtgctgcatttgatacagttcttgggataaatgttgcagtcaagaaactaagccgtccttttcagaaccaaactcatgcaaagagagcttatcgtgaacttgtcctcttaaaatgtgtcaatcataaaaatataattagtttgttaaatgtgtttacaccacaaaaaactctagaagaatttcaagatgtgtatttggttatggaattaatggatgctaacttatgtcaggttattcacatggagctggatcatgaaagaatgtcctaccttctttaccagatgctttgtggtattaaacatctgcattcagctggtataattcatagagatttgaagcctagcaacattgttgtgaaatcagactgcaccctgaagatccttgactttggcctggcccggacagcgtgcactaacttcatgatgaccccttacgtggtgacacggtactaccgggcgcccgaagtcatcctgggtatgggctacaaagagaacgttgatatctggtcagtgggttgcatcatgggagagctggtgaaaggttgtgtgatattccaaggcactgaccatattgatcagtggaataaagttattgagcagctgggaacaccatcagcagagttcatgaagaaacttcagccaactgtgaggaattatgtcgaaaacagaccaaagtatcctggaatcaaatttgaagaactctttccagattggatattcccatcagaatctgagcgagacaaaataaaaacaagtcaagccagagatctgttatcaaaaatgttagtgattgatcctgacaagcggatctctgtagacgaagctctgcgtcacccatacatcactgtttggtatgaccccgccgaagcagaagccccaccacctcaaatttatgatgcccagttggaagaaagagaacatgcaattgaagaatggaaagagctaatttacaaagaagtcatggattgggaagaaagaagcaagaatggtgttgtaaaagatcagcctccagatgcagcagtaagtagcaacgccactccttctcagtcttcatcgatcaatgacatttcatccatgtccactgagcagacgctggcctcagacacagacagcagtcttgatgcctcgacgggaccccttgaaggctgtcgatgataggttagaaatagcaaacctgtcagcattgaaggaactctcacctccgtgggcctgaaatgcttgggagttgatggaaccaaatagaaaaactccatgttctgcatgtaagaaacacaatgccttgccctactcagacctgataggattgcctgcttagatgataaaatgaggcagaatatgtctgaagaaaaaaattgcaagccacacttctagagattttgttcaagatcatttcagttgagcagttagagtaggtgaatttgtcaaattgtactagtgacagtttctcatcatctgtaactgttgagatgattgtgcatgtgaccacaaatgcttgcttggacttgcccatctagcactttggaaatcagtatttaaatgccaaataatcttccaggtagtgctgcttctgaagttatctcttaatcctcttaagtaatttgg

SEQ ID NO: 1223 - DNA, 3143 bp, Homo sapiens
ggggaagtgtgggagcaggtgggctgggcagtggcagaaacctgatgacacaatctcgccgcctccctgtgttggtggaggatgtctgcagcagcatttaaattctgggagggcttggttgtcagcagcagcaggaggaggcagagacagcatcgtcgggaccagactcgtctcaggccagttgcagccttctcagccaaacgccgaccaaggtacagcttcagtttgctactgggttgtgcattcagctgaatttcatggggaagtccaaattctaaggaaaaaaatgtggtagtataaaaaggtatcactgttgtaacctatgaagatgtcagctattcctttgaaatattttgcaggaaaactcactaccatgagaattgcagtgatttgcttttgcctcctaggcatcacctgtgccataccagtgagtacagttgcatcttaaagaaaattcctgaaaataactgaattgtgtgcttccatgtgctaggaggacattcttgtaatctttcttcatcttttctgtttctaaggttaaacaggctgattctggaagttctgaggaaaagcaggtaagcatcttttatgtttttatatagttaaatcatttactcaattatggcgagaggtgcaagaaacgtatttgctgcgatcaaatgagttcatatttgtaaagcaatttgaaagagtgcctagcccacagtaagtgctacataagagtttgttaaatgaatctgcaaaaaaaaaaaaaattacaaaaaggtacctaagggtccgggtgactatatgcttccatcaagactagtgaagaatggttgttttttccattcatccctacatttctttttttaataatgataaacatgcaacttttttgtagctttacaacaaatacccagatgctgtggccacatggctaaaccctgacccatctcagaagcagaatctcctagccccacaggtatttttaaacttctcataattaaactacagtgatgaaagatagccacactcaggccatttgggctgctcagatgaatcctgccctgcctgctggcaaacatgtgcttaggacattgactgatctgccatgttggcttctctctgtgttaagccatccacagatgaggctgaaaaataaaaactgctttggattaaaaaggttaacttttgaataaaaaagctaggcatgtgtgatgcgcactaacacgtgccattccttcttcagaatgctgtgtcctctgaagaaaccaatgactttaaacaagaggtaagttctcattttcaatcagaggcccatcatgccttgaagagatgaaagaaggcattgcctggattctcttctgatgaaatttcattagcaagttttccagctaattggcagtctaaaacttgctcataaataaaacatgtatttactaaatatcagaaatactaggtttcctcggataacctaaaagccatggtatgtactgtgaatgcaaagattctgaaactaaataaaaagaaagatagtaaaagactaatgtgctataaaggctaagggaaaataaaaacccatatattaattttcccggccatcttaattttcagacccttccaagtaagtccaacgaaagccatgaccacatggatgatatggatgatgaagatgatgatgaccatgtggacagccaggactccattgactcgaacgactctgatgatgtagatgacactgatgattctcaccagtctgatgagtctcaccattctgatgaatctgatgaactggtcactgattttcccacggacctgccagcaaccgaagttttcactccagttgtccccacagtagacacatatgatggccgaggtgatagtgtggtttatggactgaggtcaaaatctaagaagtttcgcagacctgacatccaggtaaatcctttaacagacacacctgatggttctgactagcgctcaagtctaggaaaccacagtttgcatattcattcattcattcatccattcattcatccattcagcaagaattcattcatattctactttatgaccattgaatacaaatctttttctgcttggcggtttttgtaagtctacataatttctctctagatttgattctcaaacacaattctactttttgaaatcctggatcaaagtaacatgctagtattatttcagccagatttagacaatttttagtataagatgacctaaaagctagagagtggaaaaggattaccatattcccatccctagccgttcatataattattcttcatttgtgccgtgattcagtaccctgatgctacagacgaggacatcacctcacacatggaaagcgaggagttgaatggtgcatacaaggccatccccgttgcccaggacctgaacgcgccttctgattgggacagccgtgggaaggacagttatgaaacgagtcagctggatgaccagagtgctgaaacccacagccacaagcagtccagattatataagcggaaagccaatgatgagagcaatgagcattccgatgtgattgatagtcaggaactttccaaagtcagccgtgaattccacagccatgaatttcacagccatgaagatatgctggttgtagaccccaaaagtaaggaagaagataaacacctgaaatttcgtatttctcatgaattagatagtgcatcttctgaggtcaattaaaaggagaaaaaatacaatttctcactttgcatttagtcaaaagaaaaaatgctttatagcaaaatgaaagagaacatgaaatgcttctttctcagtttattggttgaatgtgtatctatttgagtctggaaataactaatgtgtttgataattagtttagtttgtggcttcatggaaactccctgtaaacaaaagcttcagggttatgtctatgttcattctatagaagaaatgcaaactatcactgtattttaatatttgttattctctcatgaatagaaatttatgtagaagcaaacaaaatacttttacccacttaaaaagagaatataacattttatgtcactataatcttttgttttttaagttagtgtatattttgttgtgattatcttttgtggtgtgaataaatcttttatcttgaatgtaataag

SEQ ID NO: 1224 - DNA, 1584 bp, Homo sapiens
cgggatgcggcgcgccgcgcgttgaacctccttggcctgggcgaagctgtgtggaccaagcaagtcaggagtgtggccatgttttctgagcaggctgcccagagggcccacactctactgtccccaccatcagccaacaatgccacctttgcccgggtgccagtggcaacctacaccaactcctcacaacccttccggctaggagagcgcagctttagccggcagtatgcccacatttatgccacccgcctcatccaaatgagacccttcctggagaaccgggcccagcagcactggggcagtggagtgggagtgaagaagctgtgtgaactgcagcctgaggagaagtgctgtgtggtgggcactctgttcaaggccatgccgctgcagccctccatcctgcgggaggtcagcgaggagcacaacctgctcccccagcctcctcggagtaaatacatacacccagatgacgagctggtcttggaagatgaactgcagcgtatcaaactaaaaggcaccattgacgtgtcaaagctggttacggggactgtcctggctgtgtttggctccgtgagagacgacgggaagtttctggtggaggactattgctttgctgaccttgctccccagaagcccgcacccccacttgacacagataggtttgtgctactggtgtccggcctgggcctgggtggcggtggaggcgagagcctgctgggcacccagctgctggtggatgtggtgacggggcagcttggggacgaaggggagcagtgcagcgccgcccacgtctcccgggttatcctcgctggcaacctcctcagccacagcacccagagcagggattctatcaataaggccaaatacctcaccaagaaaacccaggcagccagcgtggaggctgttaagatgctggatgagatcctcctgcagctgagcgcctcagtgcccgtggacgtgatgccaggcgagtttgatcccaccaattacacgctcccccagcagcccctccacccctgcatgttcccgctggccactgcctactccacgctccagctggtcaccaacccctaccaggccaccattgatggagtcagatttttggggacatcaggacagaacgtgagtgacattttccgatacagcagcatggaggatcacttggagatcctggagtggaccctgcgggtccgtcacatcagccccacagccccggacactctaggttgttaccccttctacaaaactgacccgttcatcttcccagagtgcccgcatgtctacttttgtggcaacacccccagctttggctccaaaatcatccgaggtcctgaggaccagacagtgctgttggtgactgtccctgacttcagtgccacgcagaccgcctgccttgtgaacctgcgcagcctggcctgccagcccatcagcttctcgggcttcggggcagaggacgatgacctgggaggcctggggctgggcccctgactcaaaaaagtggttttgaccagagaggcccagatggaggctgttcattccctgcagtgtcggcattgtaaataaagcctggcacttgctgatgcg

SEQ ID NO: 1225 - DNA, 3172 bp, Homo sapiens
gctgggtttagtaggagacctggggcaaggccccctgtggacgaccatctgccagcttctctcgttccgtcgattgggaggagcggtggcgacctcggccttcagtgtttccgacggagtgaatggcggcggcggctgggatgctgctgctgggcttgctgcaggcgggtgggtcggtgctgggccaggcgatggagaaggtgacaggcggcaacctcttgtccatgctgctgatcgcctgcgccttcaccctcagcctggtctacctgatccgtctggccgccggccacctggtccagctgcccgcaggggtgaaaagtcctccatacattttctccccaattccattccttgggcatgccatagcatttgggaaaagtccaattgaatttctagaaaatgcatatgagaagtatggacctgtatttagttttaccatggtaggcaagacatttacttaccttctggggagtgatgctgctgcactgctttttaatagtaaaaatgaagacctgaatgcagaagatgtctacagtcgcctgacaacacctgtgtttgggaagggagttgcatacgatgtgcctaatccagttttcttggagcagaagaaaatgttaaaaagtggccttaacatagcccactttaaacagcatgtttctataattgaaaaagaaacaaaggaatactttgagagttggggagaaagtggagaaaaaaatgtgtttgaagctctttctgagctcataattttaacagctagccattgtttgcatggaaaggaaatcagaagtcaactcaatgaaaaggtagcacagctgtatgcagatttggatggaggtttcagccatgcagcctggctcttaccaggttggctgcctttgcctagtttcagacgcagggacagagctcatcgggaaatcaaggatattttctataaggcaatccagaaacgcagacagtctcaagaaaaaattgatgacattctccaaactttactagatgctacatacaaggatgggcgtcctttgactgatgatgaagtagcagggatgcttattggattactcttggcagggcagcatacatcctcaactactagtgcttggatgggcttctttttggccagagacaaaacacttcaaaaaaaatgttatttagaacagaaaacagtctgtggagagaatctgcctcctttaacttatgaccagctcaaggatctaaatttacttgatcgctgtataaaagaaacattaagacttagacctcctataatgatcatgatgagaatggccagaactcctcagactgtggcagggtataccattcctccaggacatcaggtgtgtgtttctcccactgtcaatcaaagacttaaagactcatgggtagaacgcctggactttaatcctgatcgctacttacaggataacccagcatcaggggaaaagtttgcctatgtgccatttggagctgggcgtcatcgttgtattggggaaaattttgcctatgttcaaattaagacaatttggtccactatgcttcgtttatatgaatttgatctcattgatggatactttcccactgtgaattatacaactatgattcacacccctgagaacccagttatccgttacaaacgaagatcaaaatgaaaaaggttgcaaggaacgaatatatgtgattatcactgtaagccacaaaggcattcgaagagaatgaagtgtacaaaacaactcttgtagtttactgtttttttaagtgtgtaattctaaaagccagtttatgatttaggattttgttaactgaatggttctatcaaatataatagcatttgacacattttctaatagttatgatacttatacatgtgctttcaggaagttccttggtgaaacaattgttgaggggggatctaggtaattggcagattctaaataatataatttccagatagtaattttaagagtactcatcgctcttgccaaataagttcagggtattcaaatcttggactagtcctgcaaggtataaagaataaaaatcccagtgagatacttggaaaccacagtttattattatttatctgggcaattattgtgtgtgtgaggatggaagggtagggaataatcgaacatctaaagccttgaataagagaatactaattgttttggtatgatgatactcagaaatggagatattataggaaaaagaaatcctttggaattttaactaaaatcactgcatatgggaaattaagagatccaggaccatatttgataagagttcctaaaaataatgtaattattaatgctaaagactgctcatgtatcttgatctaattactaaataaattacatatttatttacctgataaatatgtatctagttctacaaggtcacatttatgtggaagtccaaagtcaagtccttaggggataattttgttttgggctcagttgttccctgcttccttttttttttttttttttttttgagatggagtctcgctctgttgcccaggctggagtgcagtggtgcgatctcagctcactgcatcctctgcctcccgggttcaagcaattctctgcctcagcctcccaagtagttgggattacaggcacctgccaccatgcctggctaattttttgtatttttagtagagacgggggtttcactatgttggctaggctggtcttgaactcctgagcctcgtgagtccacccgccttggcctcccaaagtgctgggattacaggcatgagccaccgcacctggccttccctgcttcctctctagaatccaattagggatgtttgttactactcatattgattaaaacagttaacaaacttttttctttttaaaatgtgagatcagtgaactctggttttaagataatctgaaacaaggtccttgggagtaataaaattggtcacattctgtaaagcacattctgtttaggaatcaacttatctcaaattgtaactcggggcctaactatatgagatggctgaaaaaataccacatcgtctgttttcactaggtgatgccaaaatattttgctttatgtatattacagttctttttaaaacactggaagactcatgttaaactctaattgtgaaggcagaatctctgctaatttttcagattaaaattctctttgaaaaaat

SEQ ID NO: 1226 - DNA, 1146 bp, Homo sapiens
ggcacgagctcgtgccgattctgttttgaatatagccagaggaaaaaagcatggagaaaaaactaggagagtgtcttctcataaacaaccagccttgaaggctacaagtgacaaggaaaattctgttccgaatatggccacagaaacaaaggatgaacaaatatctgggacagtgtcttctcagaaacaaccagccttgaaggctacaagtgacaagaaagattctgtttcgaatatacccacagaaataaaggatggacaacaatctggaacagtgtcttctcagaaacaaccggcctggaaggctacaagtgtcaagaaagattctgtttcgaatatagccacagagataaaggatggacaaatacgtgggacagtgtcttctcagagacaaccagccttgaaggctacaggtgatgagaaagattctgtttcgaatatagccagagaaataaaggatggagaaaaatctgggacagtgtctcctcagaaacaatcggcccagaaggttatatttaaaaagaaagtttctcttttgaatattgccacaagaataacgggcggttggaaatctggaacagagtatcctgagaatctgcccaccttgaaggctacaattgaaaataaaaattctgttctgaatacagccaccaaaatgaaagatgtacaaacatccacaccagaacaagacttagaaatggcatcagagggagagcaaaagaggcttgaagaatatgaaaataaccagccacaggtgaaaaaccaaatacattctagggatgaccttgatgacataattcagtcatctcaaacagtctcagaggacggtgactcgctttgctgtaattgtaagaatgtcatattactcattgatcaacatgaaatgaagtgtaaagattgtgttcacctattgaaaattaaaaagacattttgtttatgtaaaagattaacagaacttaaagataatcactgtgagcaacttagagtaaaaattcgaaaactgaaaaataaggctagtgtactacaaaagagactatctgaaaaagaagaaataaaatcgcagttaaagcatgaaacacttgaattggaaaaagaactctgtagtttgagatttgccatacagcaagaaaaaaaaaaaaaaaaaaa

SEQ ID NO: 1227 - DNA, 2200 bp, Homo sapiens
cgggattactgccaggcacagcacgacctctatgcagacaagtgaactgtagaaactgattactgctccaccaagaagcccccataagagtggttatcctggacacagaagtgttgaattgaaatccacagagcattttacaagagttctgacctggatggggtaaacctcagtgcacttcttttctgttggcctcagtattactggattgaagaattgctgcttcttgttaggaggttcatttcacttatcattacttacaacttcatactcaaagcactgagaatttcaagtggagtatattgaagtagacttcagtttctttgcatcatttctgtattcaatttttttaattatttcataaccctattgagtgtttttaactaaataacatggctcgaatgaaccgcccagctcctgtggaagtcacatacaagaacatgagatttcttattacacacaatccaaccaatgcgaccttaaacaaatttatagaggaacttaagaagtatggagttaccacaatagtaagagtatgtgaagcaacttatgacactactcttgtggagaaagaaggtatccatgttcttgattggccttttgatgatggtgcaccaccatccaaccagattgttgatgactggttaagtcttgtgaaaattaagtttcgtgaagaacctggttgttgtattgctgttcattgcgttgcaggccttgggagagctccagtacttgttgccctagcattaattgaaggtggaatgaaatacgaagatgcagtacaattcataagacaaaagcggcgtggagcttttaacagcaagcaacttctgtatttggagaagtatcgtcctaaaatgcggctgcgtttcaaagattccaacggtcatagaaacaactgttgcattcaataaaattggggtgcctaatgctactggaagtggaacttgagatagggcctaatttgttatacatattagccaacatgttggcttagtaagtctaatgaagcttccataggagtattgaaaggcagttttaccaggcctcaagctagacagatttggcaacctctgtatttgggttacagtcaacctatttggatacttggcaaaagattcttgctgtcagcatataaaatgtgcttgtcatttgtatcaattgacctttccccaaatcatgcagtattgagttatgacttgttaaatctattcccatgccagaatcttatcaatacataagaaatttaggaagattaggtgccaaaatacccagcacaatacttgtatatttttagtaccatacagaagtaaaatcccaggaactatgaacactagaccttatgtggtttattccttcaatcatttcaaacattgaaagtagggcctacatggttatttgcctgctcactttatgtttacatctcccacattcataccaatatacgtcaggtttgcttaaccattgattttttttttttttaccaagtcttacagtgattattttacgtgtttccatgtatctcactttgtgctgtattaaaaaaacctccattttgaaaatctacgttgtacagaagcacatgtctttaatgtcttcagacaaaaaagccttacattaatttaatgtttgcactctgaggtgcaacttaacagggagggcctgagaaaagaatgggagggggctattaattattttttagcaaaatgttgcctttgtcttgtgcaaacatgtagaatatgctctttaatctagtaaaatatttttttaaaaggtagagatgctttgttattgtaatcataaacttcctgaaattcttgtaattttttcccatacttatcagaagtgtgtttaccaacttatttttgtttgaaagtgtgattttttttttccttcccaacctctcttgcaaaaaaagaaatgggtttctgctaatgaattgagcagagatctaatattttatatgccttttgagctgtgtaagttaatatttgatacttgacaatttgttttattatgtaattgataaaatggtgatgtgtattaatgttagttcaaccatatatttatactgtctggggatgtgtggttatagttctgtgggagaaataattttgtcagtgttcaccagcttgtaaaaacttagtgcgagagctgaaacatctaaataaataatgacatgcatttatcatcattgaaa

SEQ ID NO: 1228 - DNA, 997 bp, Homo sapiens
ttcaccgacctcaatctggtgcagtccctcaggcagtttctatggagctttcgcctacccggagaggcccagaaaattgaccggatgatggaggccttcgcccagcgatactgcctgtgcaaccctggggttttccagtccacagacacgtgctatgtgctgtccttcgccgtcatcatgctcaacaccagtctccacaatcccaatgtccgggacaagccgggcctggagcgctttgtggccatgaaccggggcatcaacgagggcggggacctgcctgaggagctgctcaggaacctgtacgacagcatccgaaatgagcccttcaagattcctgaggatgacgggaatgacctgacccacaccttcttcaacccggaccgggagggctggctcctgaagctgggagggggccgggtgaagacgtggaagcggcgctggtttatcctcacagacaactgcctctactactttgagtacaccacggacaaggagccccgaggaatcatccccctggagaatctgagcatccgagaggtggacgacccccggaaaccgaactgctttgaactttacatccccaacaacaaggggcagctcatcaaagcctgcaaaactgaggcggacggccgagtggtggagggaaaccacatggtgtaccggatctcggcccccacacaggaggagaaggacgagtggatcaagtccatccagtcggctgtgagtgtggaccccttctatgagattctgacagcgagagagaagcggatttcagtcaagaagaagcaggagcagccctgaccccctgcccccaactccattatttattacggagctgccccgcctgggtggccggacccctgggccttggggctgtggatcctggttccctgtttggaaaattcaccacctctagctcctcactgttctttgtaattaacacgctgttggtaatcttattaattatttaaaaaaaaaaaaaaaaaaaaaaaaaaaa

SEQ ID NO: 1229 - DNA, 3054 bp, Homo sapiens
agcatttcaggccccggacaggaggcagtgccgcttcggccgaaggccgagccgcccgagggctctgggatggtgtgggaccggcaaaccaagatggagtatgagtggaaacctgacgagcaagggcttcagcaaatcctgcagctgttgaaggagtcccagtccccagacaccaccatccagagaaccgtgcaacaaaaactggaacaacttaatcagtatccagactttaacaactacttgatttttgttcttacaaaattaaaatctgaagatgaacccacaagatcattgagtggtcttatcttgaagaataatgtgaaagcacactttcagaacttcccaaatggtgtaacagactttattaaaagtgaatgtttaaataatattggtgactcctctcctctgattagagccactgttggtattttgatcacaactatagcctccaagggagaattgcagaattggcctgacctcttaccaaaactctgtagcctgttggattctgaagattataatacctgtgagggagcatttggtgcccttcagaagatttgtgaagattctgctgagattttagacagtgatgttttagatcgtcctctcaacatcatgattcccaaatttttacagttcttcaagcatagtagtccaaaaataaggtctcacgctgttgcatgtgtcaatcagtttatcatcagtaggactcaagctctaatgttgcacattgattcttttactgagaatctctttgcattagctggtgatgaagaaccagaggtacggaaaaatgtgtgccgagcacttgtgatgttgctcgaagttcgaatggatcgcctgcttcctcacatgcataatatagttgagtacatgctacagaggactcaagatcaagatgaaaatgtggctttagaagcctgtgaattttggctaactttagctgaacagccaatatgcaaagatgtactcgtaaggcatcttcctaagttgattcctgtgttagtgaatggcatgaagtactcagacatagatattatcctacttaagggtgatgttgaagaagacgaaacgattcctgatagtgaacaggatatacggccacgttttcaccgatcgaggacggtggctcagcagcatgatgaagatggaattgaagaggaagacgatgatgatgatgaaattgatgatgatgatacaatttcagactggaatctaagaaaatgttctgctgctgccctggatgttcttgcaaatgtgtatcgtgatgaactgctgccacatattttgccccttttgaaagaattactttttcatcatgaatgggttgttaaagaatcaggcattttggttttaggagcaattgctgaaggttgcatgcagggcatgattccatacttgcctgagcttattcctcaccttattcagtgcctctctgataaaaaggctcttgtgcgttccataacatgctggactcttagccgctatgcacactgggtggtcagccagccgccagacacgtacctgaagccattaatgacagaattgctaaagcgcatcctggacagcaacaagagagtacaagaagctgcctgcagtgcctttgctaccctagaagaggaggcttgtacagaacttgttccttaccttgcttatatacttgataccctggtctttgcatttagtaaataccagcataagaacctgctcattctttacgatgccataggaacattagcagattcagtaggacatcatttaaacaaaccagaatatattcagatgctaatgcctccactgatccagaaatggaacatgttaaaggatgaagataaagatctcttccctttacttgagtgcctatcttcagttgccacagcactgcagtctggattccttccgtactgtgaacctgtgtatcagcgttgtgtaaacctagtacagaagactcttgcacaagccatgctaaacaatgctcaaccagatcaatatgaagctccagataaagattttatgatagtggctcttgatttactgagtggcctggctgaaggacttggaggcaacattgaacagctggtagcccgaagtaacatcctgacactaatgtatcagtgcatgcaggataaaatgccagaagttcgacagagttcttttgccctgttaggtgacctcacaaaagcttgctttcagcatgttaagccttgtatagctgatttcatgccaatattgggaaccaacctaaatccagaattcatttcagtctgcaacaatgccacatgggcaattggagaaatctccattcaaatgggtatagagatgcagccttatattcctatggtgttgcaccagcttgtagaaatcattaacagacccaacacaccaaagacgttgttagagaatacagcaataacaattggtcgtcttggttacgtttgtcctcaagaggtggcccccatgctacagcagtttataagaccctggtgcacctctctgagaaacataagagacaatgaggaaaaggattcagcattccgtggaatttgtaccatgatcagtgtgaatcccagtggcgtaatccaagattttatatttttttgtgatgccgttgcatcatggattaacccaaaagatgatctcagagacatgttctgtaagatccttcatggatttaaaaatcaagttggcgatgaaaattggaggcgtttctctgaccagtttcctcttcccttaaaagagcgtcttgcagctttttatggtgtttaatctaatacacttaagctgcagtcccaaaattaggggtccttcagtcttggagactataagggagcctctgcacccagggaaaatgttaccctttacaggggggaagggtaaaccagtagggaatacagtacaatcccaaccctactgggaggggcgggagggaggtgttgccgtcactgtattaagtcgatgttgggaaacgttttaacatctggagcctttgtgggtggaaatatgtctccagttacaactccgcagtggatgtgaagaagcaaaaaaaaaaaaaaa

SEQ ID NO: 1230 - DNA, 1743 bp, Homo sapiens
ggcgcggggacgcgggtttctgcctcaggccctgccctgctctactctgcgctctctgcccgcgccgccgccgcctcagcctcggccctgcgctgcgcgcccggcccgtgctgccatggcctgccgcccgcgaagcccgccgaggcatcagagccgctgcgacggtgacgccagcccgccgtcccccgcgcgatggagcctgggacggaagcgcagagccgacggcaggcgctggaggcccgaagacgccgaggaggcagagcaccgcggcgccgagcgcagacccgagagctttaccactcctgaaggccctaaaccccgttccagatgctctgactgggcaagtgcagttgaagaagatgaaatgaggaccagagttaacaaagaaatggcaagatataaaaggaaactcctcatcaatgactttggaagagagagaaaatcatcatcaggaagttctgattcaaaggagtctatgtctactgtgccggctgactttgagacagatgaaagtgtcctaatgaggagacagaagcagatcaactatgggaagaacacaattgcctacgatcgttatattaaagaagtcccaagacaccttcgacaacctggcattcatcccaagacccctaataaatttaagaagtatagtcgacgttcatgggaccagcaaatcaaactctggaaggtggctctgcatttttgggatcctccagcggaagaaggatgtgatttgcaagaaatacaccctgtagaccttgaatctgcagaaagcagctccgagccccagaccagctctcaggatgactttgatgtgtactctggcacacccaccaaggtgagacacatggacagtcaagtggaggatgagtttgatttggaagcttgtttaactgaacccttgagagacttctcagccatgagctaactgccccctggcggccaggaagagaaacagctcctccccgactaggtggaaggctggccaggcaccaagcatgtgtgtgcacttgtacctggtggtttctctgttagcagtccattagctcatgctgaattatttttgccttactttcttaagaaacattaattttatgtatagtgagtatattttgcatgttttaaattgtaaatggagctaagtccaagaaagtacttgaagctctcttccagcgagcttaattgcgtaatccctgttgtcctccagggtaagctgacacgtctacataactggttttccacaggcatcttcagttattgcttgtcaggtggactgttttggatttaaccatgtaatccatgggaccaattgagagtcagctacttttataggcatcaaagtattctcagacacctttaatatctttatggaaacttaatttttggccttttatcaatatgtcataacagcattctgaagtcagacattgttaaattgagctattaaactaatgagttttatgtaagttatatggtcttaatttggtatttgtaaatagcactagttagactctttagaatactccaagagttagggcagcagagtggagcgatttagaaagaacattttaaaacaatcagttaatttaccatgtaaaattgctgtaaatgataatgtgtacagattttctgttcaaatattcaattgtaaacttcttgttaagactgttacgtttctattgcttttgtatgggatattgcaaaaataaaaaggaaagaaccctcaaaaaaaaaaaaaaaaaa

SEQ ID NO: 1231 - DNA, 3768 bp, Homo sapiens
cctctgacccttttggtcgctaggagtcagccgactcagtacacaggactcactgaatggagacacaaggctcctccagggagtggcggctcatggcaatcctagaatggtcaccagccaggctttagagacccacacagagggcgttctgacccaaagttgcactggggaactccaagtttggggattctttgaatttaactctttttctagctacatttcctattatttgtccaattcttaccaaacatctctgttcacattctgaagctgggatctgactggcagagctagtagatgctgactattcagatggagccctgacattggctttctcagcttggctgtgactggcagcaggtttgcgggagaactgtgtgtcccagaacatgactggctacacctgcacctcagcaagattggggcagggcagttatcttcaaaaagctgtgtaggtggggcagtcattactgacaaatccagtgcagacccaggatggcccaaacactggcttatcctttctgaatctcatctcccacagctgtaaagcggggtggtgctcgctacctcacagaggtgttgtaaagattagatgtaatcttgccaagcagccactttgtaaactgtatagtcttatgcagatggaaggaagggcctgtgcctaccttgatcatagcactaaacaaactgtactgtattttcattcctcttagttatctccctaaaaagactctgagttccttgaacacaggaaggtgttttatttgattttgttatcctcagcatgtagcagtgtctgacacacagtaggtgctctatcactgtgagagggatggatggatgggtggagttacagatggatagaaggatagatggagggatgggtggatgatggatggatagatggatggaggggggatgatgaatggagggataatgagtggatgaatgagggaatgggtggatggatggatggagggatggaggaacagatagatagatggagggatgggtgggtgatggatggatagatggatggagggagggatgatgaatggagggataatgaatggatgaatgaggggatgggtggatggatgaatggagggatgatgggtggatgaatgaattgagggatggatggatgaacacatggatggatggatagatggatagatggaggaactggtggattttggatggatgggtggatggatagatgaatgaatgcctggatagacaaagagatgatggatagatgaatagatgaattaagggatgtcggatagatggagggattgatagatgttggatggatgggtggtggatggatagatgagtgaatgcatggatagacaaagagatgatggatggatgaattaagggatgacagatggatggatggatgagtaactggatggacaagtggataaatggatagatggttgaatacctgaatggattgaaggaggatgcatggatgtaagataaggctaatcatcctccactctctttctttgcaaaaccatccacccatttactcaataaacatttattcagttcaaacttggcacaaagcaccatgtgaggcccaagagatacgtgggttaataaaacagagctcctgccctcctgaaaactgcaaagaaaggggcgtggcttcctgagttcaaatcccaactctgccagcgactagctgtacatcagtgatgtttccctactttctctcaattaaatagggataatgtcagtacctatcacattgggaggtcttgcggggattaaatgagttaccaaatgccaagtgtttgggacagggcctggcacccagcaaagtctcttgtgagtgctggctgctattatcctaatggagaagatggcatgaaaaccaggaaataggatgccctttgggaagcaatgcaacaggaacttacacaaagaaaggaaaggaggaagcaattagtggtgtctcaaaggagtatgtcaagaaaaacttttcagagggaaacctttgagcagggccatgaaaacaggagttctctaagagattgtggacttgcctgggaccacctggctataagcacaaaaccatccggttcctttctgtcacttctggcgggtgaggggtctctggcaaaggggcagaaggtgcgtgagaggttgcgaatggcaggactgtcctggccagccggggcacctggtggccaagcttagaaacatgacaggtcctcttgggagggctgaccgcagggagcgttgggtttcaggctgctggcgtcggcttctgtggtgccctttctgtcggctatgagagtccagacagtgcccaacctcctccccttctttccacacgcacaaccaccccaccccctgtggcctgagctgtcctgcctcgccacaatggcacctgccctaaaatagcttcccatgtgagggctagagaaaggaaaagattagaccctccctggatgagagagagaaagtgaaggagggcaggggagggggacagcgagccattgagcgatctttgtcaagcatcccagaaggtataaaaacgcccttgggaccaggcagcctcaaaccccagctgttggggccaggacacccagtgagcccatacttgctctttttgtcttcttcagactgcgccatggggctcagcgacggggaatggcagttggtgctgaacgtctgggggaaggtggaggctgacatcccaggccatgggcaggaagtcctcatcaggtaaaaggaagagattccattgcccctgccacccacaccctaagatcaagggtgttcagctgcaaggtggaaagtttgcacgtggggtaggtcagttggctgcattagttaagggtgttagaacggtcacttgctttttctttgcttttaagtgtcagggattggactcaggagagggaaaggagccatttcaggctgatatcagcagctggaggaagcatgagaatcaaacctaggatgctcagagtccaccaggaagaattttagaattatagacagtcagagttaacaagggtcctgagagattttgtacagccacctctcttacaggatgaggacaaaaagcgactgagaaggggaggacatttccagagtcacagctcattaaatgctcttaaagtgtcaaggttaagacatgctcttcaaggggagacagatctggttctagacttggctctgccactgagccactgggtgacctttgggaaggtactcaacctctcggagcctcaatttcctctcctgtacagtgaggggatatcctaatatctatatcctagaggagatgtgagaattaaataaaataatgcatgcaagaggcctggcatggttcctggcatatactgagtcctagaaatgttagtagctattactgatgaagcccaggctagggacctttcaaagcattgcaattagagaacagaagatagaggctcattagtgaccttcgatgttgagtatgtctctagtttgagaggtctgaatgatgtggtctgcaagtatatcctgccttctaccacaagggattccagaatacaccaaagaaaacaaaattctgaggtttgtaaatagagggtggctgtggtttgtacatagaagctcatctcctcgttgccttctatcccaaaggtgatacactcttctcttggccccttccctcaccattctgagctggttccctcagaagtctaataggttaagaatcaacgtttctgccaacgggaggaaggaagtgggcgccgg

SEQ ID NO: 1232 - DNA, 1172 bp, Homo sapiens
gagacattcctcaattgcttagacatattctgagcctacagcagaggaacctccagtctcagcaccatgaatcaaactgcgattctgatttgctgccttatctttctgactctaagtggcattcaaggagtacctctctctagaaccgtacgctgtacctgcatcagcattagtaatcaacctgttaatccaaggtctttagaaaaacttgaaattattcctgcaagccaattttgtccacgtgttgagatcattgctacaatgaaaaagaagggtgagaagagatgtctgaatccagaatcgaaggccatcaagaatttactgaaagcagttagcaaggaaatgtctaaaagatctccttaaaaccagaggggagcaaaatcgatgcagtgcttccaaggatggaccacacagaggctgcctctcccatcacttccctacatggagtatatgtcaagccataattgttcttagtttgcagttacactaaaaggtgaccaatgatggtcaccaaatcagctgctactactcctgtaggaaggttaatgttcatcatcctaagctattcagtaataactctaccctggcactataatgtaagctctactgaggtgctatgttcttagtggatgttctgaccctgcttcaaatatttccctcacctttcccatcttccaagggtactaaggaatctttctgctttggggtttatcagaattctcagaatctcaaataactaaaaggtatgcaatcaaatctgctttttaaagaatgctctttacttcatggacttccactgccatcctcccaaggggcccaaattctttcagtggctacctacatacaattccaaacacatacaggaaggtagaaatatctgaaaatgtatgtgtaagtattcttatttaatgaaagactgtacaaagtataagtcttagatgtatatatttcctatattgttttcagtgtacatggaataacatgtaattaagtactatgtatcaatgagtaacaggaaaattttaaaaatacagatagatatatgctctgcatgttacataagataaatgtgctgaatggttttcaaataaaaatgaggtactctcctggaaatattaagaaagactatctaaatgttgaaagatcaaaaggttaataaagtaattataact

SEQ ID NO: 1233 - DNA, 1550 bp, Homo sapiens
tcaacgcctgcctcccctcgagcgtcctcagcgcagccgccgcccgcggagccagcacgaacgagcccagcaccggccggatggagcgtccgcaacccgacagcatgccccaggatttgtcagaggccctgaaggaggccaccaaggaggtgcacacccaggcagagaatgctgagttcatgaggaactttcagaagggccaggtgacccgagacggcttcaagctggtgatggcctccctgtaccacatctatgtggccctggaggaggagattgagcgcaacaaggagagcccagtcttcgcccctgtctacttcccagaagagctgcaccgcaaggctgccctggagcaggacctggccttctggtacgggccccgctggcaggaggtcatcccctacacaccagccatgcagcgctatgtgaagcggctccacgaggtggggcgcacagagcccgagctgctggtggcccacgcctacacccgctacctgggtgacctgtctgggggccaggtgctcaaaaagattgcccagaaagccctggacctgcccagctctggcgagggcctggccttcttcaccttccccaacattgccagtgccaccaagttcaagcagctctaccgctcccgcatgaactccctggagatgactcccgcagtcaggcagagggtgatagaagaggccaagactgcgttcctgctcaacatccagctctttgaggagttgcaggagctgctgacccatgacaccaaggaccagagcccctcacgggcaccagggcttcgccagcgggccagcaacaaagtgcaagattctgcccccgtggagactcccagagggaagcccccactcaacacccgctcccaggctccgcttctccgatgggtccttacactcagctttctggtggcgacagttgctgtagggctttatgccatgtgaatgcaggcatgctggctcccagggccatgaactttgtccggtggaaggccttctttctagagagggaattctcttggctggcttccttaccgtgggcactgaaggctttcagggcctccagccctctcactgtgtccctctctctggaaaggaggaaggagcctatggcatcttccccaacgaaaagcacatccaggcaatggcctaaacttcagagggggcgaaggggtcagccctgcccttcagcatcctcagttcctgcagcagagcctggaagacaccctaatgtggcagctgtctcaaacctccaaaagccctgagtttcaagtatccttgttgacacggccatgaccactttccccgtgggccatggcaatttttacacaaacctgaaaagatgttgtgtcttgtgtttttgtcttatttttgttggagccactctgttcctggctcagcctcaaatgcagtatttttgttgtgttctgttgtttttatagcagggttggggtggtttttgagccatgcgtgggtggggagggaggtgtttaacggcactgtggccttggtctaacttttgtgtgaaataataaacaacattgtctg

SEQ ID NO: 1234 - DNA, 1585 bp, Homo sapiens
acagcagttacactgcggcgggcgtctgttctagtgtttgagccgtcgtgcttcaccggtctacctcgctagcatgtcgggccgcggcaagactggcggcaaggcccgcgccaaggccaagtcgcgctcgtcgcgcgccggcctccagttcccagtgggccgtgtacaccggctgctgcggaagggccactacgccgagcgcgttggcgccggcgcgccagtgtacctggcggcagtgctggagtacctcaccgctgagatcctggagctggcgggcaatgcggcccgcgacaacaagaagacgcgaatcatcccccgccacctgcagctggccatccgcaacgacgaggagctcaacaagctgctgggcggcgtgacgatcgcccagggaggcgtcctgcccaacatccaggccgtgctgctgcccaagaagaccagcgccaccgtggggccgaaggcgccctcgggcggcaagaaggccacccaggcctcccaggagtactaagagggcccgcgccgcggccggccgccccagctccccatgccaccacaaaggcccttttaagggccaccaccgccctcatggaaagagctgagccgcttcagactgcggggcaagcgggccgcggctcccttcccctcccctcccctcgcccgccttcgccgcccggcctcgagtccccgcccgcccccgctcccgtcccgcaccgcctgccgcgtcggcctcgggcctgccctgtccgccgtccgccctccggtagggttcgggccttccggatgcggcttgggcgctcttcggggacctccgtggcgcggaagacccgagcctgccggggggaggccggcggcgccgcacctgcccgcctcggcgttcgtgactcagccgccccatcccgagtcgctaaggggctgcggggaggccgcagcaccttctggaagacttggccttccgctctgacgcagggccgaggtgggcagtccaggccgagagccggcggccctgaaggtgagtgaggccctcggcagctgcagccggggtgtctggtacccccccggcgtggtgcttagcccaggactttcagacggccgctggccgggaggctttggtgggagagacgcgatcgccgatttcggtctggcgccccttctgcggccgggacccaggcctttcacatcagctctccctccatcttcattcataggtctgcgctggggccgggacgaagcacttggtaacaggcacatcttcctcccgagtgactgcctcctaggaggacatttaggggagggcagaggcctgcagtttggcttcacggctggctatgtggacagcaagagtcgttttgcggaacgcgactggcagccaggcctgtcgggcccccgacgccgccccatttcccttccagcaaactcaactcggcaatccaagcacctagataccagcacaagtcggttaatccctgtctggactgagcctccgttggcttctgaactggaattctgcagctaacccttccacgactagaaccttaggcattggggagttttagatggactaattttattaaaggattgtttttttttt

SEQ ID NO: 1235 - DNA, 627 bp, Homo sapiens; identical to SEQ ID NO: 1056

SEQ ID NO: 1236 - DNA, 2161 bp, Homo sapiens
gggcgatcctgccggagccccgccgccgccggcttggattctgaaaccttccttgtatccctcctgagacatctttgctgcaagatcgaggctgtcctctggtgagaaggtggtgaggcttcccgtcatattccagctctgaacagcaacatggggtgcaaagtcctgctcaacattgggcagcagatgctgcggcggaaggtggtggactgtagcccggaggagacgcggctgtctcgctgcctgaacacttttgatctggtggccctcggggtgggcagcacactgggtgctggtgtctacgtcctggctggagctgtggcccgtgagaatgcaggccctgccattgtcatctccttcctgatcgctgcgctggcctcagtgctggctggcctgtgctatggcgagtttggtgctcgggtccccaagacgggctcagcttacctctacagctatgtcaccgttggagagctctgggccttcatcaccggctggaacttaatcctctcctacatcatcggtacttcaagcgtagcgagggcctggagcgccaccttcgacgagctgataggcagacccatcggggagttctcacggacacacatgactctgaacgcccccggcgtgctggctgaaaaccccgacatattcgcagtgatcataattctcatcttgacaggacttttaactcttggtgtgaaagagtcggccatggtcaacaaaatattcacttgtattaacgtcctggtcctgggcttcataatggtgtcaggatttgtgaaaggatcggttaaaaactggcagctcacggaggaggattttgggaacacatcaggccgtctctgtttgaacaatgacacaaaagaagggaagcccggtgttggtggattcatgcccttcgggttctctggtgtcctgtcgggggcagcgacttgcttctatgccttcgtgggctttgactgcatcgccaccacaggtgaagaggtgaagaacccacagaaggccatccccgtggggatcgtggcgtccctcttgatctgcttcatcgcctactttggggtgtcggctgccctcacgctcatgatgccctacttctgcctggacaataacagccccctgcccgacgcctttaagcacgtgggctgggaaggtgccaagtacgcagtggccgtgggctccctctgtgctctttccgccagtcttctaggttccatgtttcccatgcctcgggttatctatgccatggctgaggatggactgctatttaaattcttagccaacgtcaatgataggaccaaaacaccaataatcgccacattagcctcgggtgccgttgctgctgtgatggccttcctctttgacctgaaggacttggtggacctcatgtccattggcactctcctggcttactcgttggtggctgcctgtgtgttggtcttacggtaccagccagagcagcctaacctggtataccagatggccagtacttccgacgagttagatccagcagaccaaaatgaattggcaagcaccaatgattcccagctggggtttttaccagaggcagagatgttctctttgaaaaccatactctcacccaaaaacatggagccttccaaaatctctgggctaattgtgaacatttcaaccagccttatagctgttctcatcatcaccttctgcattgtgaccgtgcttggaagggaggctctcaccaaaggggcgctgtgggcagtctttctgctcgcagggtctgccctcctctgtgccgtggtcacgggcgtcatctggaggcagcccgagagcaagaccaagctctcatttaaggttcccttcctgccagtgctccccatcctgagcatcttcgtgaacgtctatctcatgatgcagctggaccagggcacctgggtccggtttgctgtgtggatgctgataggcttcatcatctactttggctatggcctgtggcacagcgaggaggcgtccctggatgccgaccaagcaaggactcctgacggcaacttggaccagtgcaagtgacgcacagccccgccccccggaggtggcagcagccccgagggacgcccccagaggaccgggaggcaccccaccctccccaccagtgcaacagaaaccacctgcgtccacaccctcactgcag

SEQ ID NO: 1237 - DNA, 2824 bp, Homo sapiens; identical to SEQ ID NO: 1057

SEQ ID NO: 1238 - DNA, 2247 bp, Homo sapiens
ccggggcggatggctccggccgcctggctccgcagcgcggccgcgcgcgccctcctgcccccgatgctgctgctgctgctccagccgccgccgctgctggcccgggctctgccgccggacgtccaccacctccatgccgagaggagggggccacagccctggcatgcagccctgcccagtagcccggcacctgcccctgccacgcaggaagccccccggcctgccagcagcctcaggcctccccgctgtggcgtgcccgacccatctgatgggctgagtgcccgcaaccgacagaagaggttcgtgctttctggcgggcgctgggagaagacggacctcacctacaggatccttcggttcccatggcagttggtgcaggagcaggtgcggcagacgatggcagaggccctaaaggtatggagcgatgtgacgccactcacctttactgaggtgcacgagggccgtgctgacatcatgatcgacttcgccaggtactggcatggggacgacctgccgtttgatgggcctgggggcatcctggcccatgccttcttccccaagactcaccgagaaggggatgtccacttcgactatgatgagacctggactatcggggatgaccagggcacagacctgctgcaggtggcagcccatgaatttggccacgtgctggggctgcagcacacaacagcagccaaggccctgatgtccgccttctacacctttcgctacccactgagtctcagcccagatgactgcaggggcgttcaacacctatatggccagccctggcccactgtcacctccaggaccccagccctgggcccccaggctgggatagacaccaatgagattgcaccgctggagccagacgccccgccagatgcctgtgaggcctcctttgacgcggtctccaccatccgaggcgagctctttttcttcaaagcgggctttgtgtggcgcctccgtgggggccagctgcagcccggctacccagcattggcctctcgccactggcagggactgcccagccctgtggacgctgccttcgaggatgcccagggccacatttggttcttccaaggtgctcagtactgggtgtacgacggtgaaaagccagtcctgggccccgcacccctcaccgagctgggcctggtgaggttcccggtccatgctgccttggtctggggtcccgagaagaacaagatctacttcttccgaggcagggactactggcgtttccaccccagcacccggcgtgtagacagtcccgtgccccgcagggccactgactggagaggggtgccctctgagatcgacgctgccttccaggatgctgatggctatgcctacttcctgcgcggccgcctctactggaagtttgaccctgtgaaggtgaaggctctggaaggcttcccccgtctcgtgggtcctgacttctttggctgtgccgagcctgccaacactttcctctgaccatggcttggatgccctcaggggtgctgacccctgccaggccacgaatatcaggctagagacccatggccatctttgtggctgtgggcaccaggcatgggactgagcccatgtctcctgcagggggatggggtggggtacaaccaccatgacaactgccgggagggccacgcaggtcgtggtcacctgccagcgactgtctcagactgggcagggaggctttggcatgacttaagaggaagggcagtcttgggacccgctatgcaggtcctggcaaacctggctgccctgtctcatccctgtccctcagggtagcaccatggcaggactgggggaactggagtgtccttgctgtatccctgttgtgaggttccttccaggggctggcactgaagcaagggtgctggggccccatggccttcagccctggctgagcaactgggctgtagggcagggccacttcctgaggtcaggtcttggtaggtgcctgcatctgtctgccttctggctgacaatcctggaaatctgttctccagaatccaggccaaaaagttcacagtcaaatggggaggggtattcttcatgcaggagaccccaggccctggaggctgcaacatacctcaatcctgtcccaggccggatcctcctgaagcccttttcgcagcactgctatcctccaaagccattgtaaatgtgtgtacagtgtgtataaaccttcttcttcttttttttttttaaactgaggattgtcattaaacacagttgttttct

SEQ ID NO: 1239 - DNA, 5434 bp, Homo sapiens
cgtccgcgtggggggggtgtgtgcccgccttgcgcatgcgtgttccctgggcatggccggctccgttccatccttctgcacagggtatcgcctctctccgtttggtacatcccctcctcccccacgcccggactggggtggtagacgcgcctccgctcatcgcccctccccatcggtttccgcgcgaaaagccggggcgcctgcgctgccgccgccgcgtctgctgaagcctccgagatgccggcgcgtaccgccccagcccgggtgcccacactggccgtcccggccatctcgctgcccgacgatgtccgcaggcggctcaaagatttggaaagagacagcttaacagaaaaggaatgtgtgaaggagaaattgaatctcttgcacgaatttctgcaaacagaaataaagaatcagttatgtgacttggaaaccaaattacgtaaagaagaattatccgaggagggctacctggctaaagtcaaatcccttttaaataaagatttgtccttggagaacggtgctcatgcttacaaccgggaagtgaatggacgtctagaaaacgggaaccaagcaagaagtgaagcccgtagagtgggaatggcagatgccaacagcccccccaaacccctttccaaacctcgcacgcccaggaggagcaagtccgatggagaggctaagcctgaaccttcacctagccccaggattacaaggaaaagcaccaggcaaaccaccatcacatctcattttgcaaagggccctgccaaacggaaacctcaggaagagtctgaaagagccaaatcggatgagtccatcaaggaagaagacaaagaccaggatgagaagagacgtagagttacatccagagaacgagttgctagaccgcttcctgcagaagaacctgaaagagcaaaatcaggaacgcgcactgaaaaggaagaagaaagagatgaaaaagaagaaaagagactccgaagtcaaaccaaagaaccaacacccaaacagaaactgaaggaggagccggacagagaagccagggcaggcgtgcaggctgacgaggacgaagatggagacgagaaagatgagaagaagcacagaagtcaacccaaagatctagctgccaaacggaggcccgaagaaaaagaacctgaaaaagtaaatccacagatttctgatgaaaaagacgaggatgaaaaggaggagaagagacgcaaaacgacccccaaagaaccaacggagaaaaaaatggctcgcgccaaaacagtcatgaactccaagacccaccctcccaagtgcattcagtgcgggcagtacctggacgaccctgacctcaaatatgggcagcacccaccagacgcggtggatgagccacagatgctgacaaatgagaagctgtccatctttgatgccaacgagtctggctttgagagttatgaggcgcttccccagcacaaactgacctgcttcagtgtgtactgtaagcacggtcacctgtgtcccatcgacaccggcctcatcgagaagaatatcgaactcttcttttctggttcagcaaaaccaatctatgatgatgacccgtctcttgaaggtggtgttaatggcaaaaatcttggccccataaatgaatggtggatcactggctttgatggaggtgaaaaggccctcatcggcttcagcacctcatttgccgaatacattctgatggatcccagtcccgagtatgcgcccatatttgggctgatgcaggagaagatctacatcagcaagattgtggtggagttcctgcagagcaattccgactcgacctatgaggacctgatcaacaagatcgagaccacggttcctccttctggcctcaacttgaaccgcttcacagaggactccctcctgcgacacgcgcagtttgtggtggagcaggtggagagttatgacgaggccggggacagtgatgagcagcccatcttcctgacgccctgcatgcgggacctgatcaagctggctggggtcacgctgggacagaggcgagcccaggcgaggcggcagaccatcaggcattctaccagggagaaggacaggggacccacgaaagccaccaccaccaagctggtctaccagatcttcgatactttcttcgcagagcaaattgaaaaggatgacagagaagacaaggagaacgcctttaagcgccggcgatgtggcgtctgtgaggtgtgtcagcagcctgagtgtgggaaatgtaaagcctgcaaggacatggttaaatttggtggcagtggacggagcaagcaggcttgccaagagcggaggtgtcccaatatggccatgaaggaggcagatgacgatgaggaagtcgatgataacatcccagagatgccgtcacccaaaaaaatgcaccaggggaagaagaagaaacagaacaagaatcgcatctcttgggtcggagaagccgtcaagactgatgggaagaagagttactataagaaggtgtgcattgatgcggaaaccctggaagtgggggactgtgtctctgttattccagatgattcctcaaaaccgctgtatctagcaagggtcacggcgctgtgggaggacagcagcaacgggcagatgtttcacgcccactggttctgcgctgggacagacacagtcctcggggccacgtcggaccctctggagctgttcttggtggatgaatgtgaggacatgcagctttcatatatccacagcaaagtgaaagtcatctacaaagccccctccgaaaactgggccatggagggaggcatggatcccgagtccctgctggagggggacgacgggaagacctacttctaccagctgtggtatgatcaagactacgcgagattcgagtcccctccaaaaacccagccaacagaggacaacaagttcaaattctgtgtgagctgtgcccgtctggctgagatgaggcaaaaagaaatccccagggtcctggagcagctcgaggacctggatagccgggtcctctactactcagccaccaagaacggcatcctgtaccgagttggtgatggtgtgtacctgccccctgaggccttcacgttcaacatcaagctgtccagtcccgtgaaacgcccacggaaggagcccgtggatgaggacctgtacccagagcactaccggaaatactccgactacatcaaaggcagcaacctggatgcccctgagccctaccgaattggccggatcaaagagatcttctgtcccaagaagagcaacggcaggcccaatgagactgacatcaaaatccgggtcaacaagttctacaggcctgagaacacccacaagtccactccagcgagctaccacgcagacatcaacctgctctactggagcgacgaggaggccgtggtggacttcaaggctgtgcagggccgctgcaccgtggagtatggggaggacctgcccgagtgcgtccaggtgtactccatgggcggccccaaccgcttctacttcctcgaggcctataatgcaaagagcaaaagctttgaagatcctcccaaccatgcccgtagccctggaaacaaagggaagggcaagggaaaagggaagggcaagcccaagtcccaagcctgtgagccgagcgagccagagatagagatcaagctgcccaagctgcggaccctggatgtgttttctggctgcggggggttgtcggagggattccaccaagcaggcatctctgacacgctgtgggccatcgagatgtgggaccctgcggcccaggcgttccggctgaacaaccccggctccacagtgttcacagaggactgcaacatcctgctgaagctggtcatggctggggagaccaccaactcccgcggccagcggctgccccagaagggagacgtggagatgctgtgcggcgggccgccctgccagggcttcagcggcatgaaccgcttcaattcgcgcacctactccaagttcaaaaactctctggtggtttccttcctcagctactgcgactactaccggccccggttcttcctcctggagaatgtcaggaactttgtctccttcaagcgctccatggtcctgaagctcaccctccgctgcctggtccgcatgggctatcagtgcaccttcggcgtgctgcaggccggtcagtacggcgtggcccagactaggaggcgggccatcatcctggccgcggcccctggagagaagctccctctgttcccggagccactgcacgtgtttgctccccgggcctgccagctgagcgtggtggtggatgacaagaagtttgtgagcaacataaccaggttgagctcgggtcctttccggaccatcacggtgcgagacacgatgtccgacctgccggaggtgcggaatggagcctcggcactggagatctcctacaacggggagcctcagtcctggttccagaggcagctccggggcgcacagtaccagcccatcctcagggaccacatctgtaaggacatgagtgcattggtggctgcccgcatgcggcacatccccttggccccagggtcagactggcgcgatctgcccaacatcgaggtgcggctctcagacggcaccatggccaggaagctgcggtatacccaccatgacaggaagaacggccgcagcagctctggggccctccgtggggtctgctcctgcgtggaagccggcaaagcctgcgaccccgcagccaggcagttcaacaccctcatcccctggtgcctgccccacaccgggaaccggcacaaccactgggctggcctctatggaaggctcgagtgggacggcttcttcagcacaaccgtcaccaaccccgagcccatgggcaagcagggccgcgtgctccacccagagcagcaccgtgtggtgagcgtgcgggagtgtgcccgctcccagggcttccctgacacctaccggctcttcggcaacatcctggacaagcaccggcaggtgggcaatgccgtgccaccgcccctggccaaagccattggcttggagatcaagctttgtatgttggccaaagcccgagagagtgcctcagctaaaataaaggaggaggaagctgctaaggactagttctgccctcccgtcacccctgtttctggcaccaggaatccccaacatgcactgatgttgtgtttttaacatgtcaatctgtccgttcacatgtgtggtacatggtgtttgtggccttggctgacatgaagctgttgtgtgaggttcgcttatcaactaatgatttagtgatcaaattgtgcagtactttgtgcattctggattttaaaagttttttattatgcattatatcaaatctaccactgtatgagtggaaattaagactttatgtagtttttatatgttgtaatatttcttcaaataaatctctcctataaaccaaaaaaaaaaaaaaaaaaaaaaaaaa

SEQ ID NO: 1240 - DNA, 1817 bp, Homo sapiens
ctgtcagaatggccaccatggtaccatccgtgttgtggcccagggcctgctggactctgctggtctgctgtctgctgaccccaggtgtccaggggcaggagttccttttgcgggtggagccccagaaccctgtgctctctgctggagggtccctgtttgtgaactgcagtactgattgtcccagctctgagaaaatcgccttggagacgtccctatcaaaggagctggtggccagtggcatgggctgggcagccttcaatctcagcaacgtgactggcaacagtcggatcctctgctcagtgtactgcaatggctcccagataacaggctcctctaacatcaccgtgtacgggctcccggagcgtgtggagctggcacccctgcctccttggcagccggtgggccagaacttcaccctgcgctgccaagtggagggtgggtcgccccggaccagcctcacggtggtgctgcttcgctgggaggaggagctgagccggcagcccgcagtggaggagccagcggaggtcactgccactgtgctggccagcagagacgaccacggagcccctttctcatgccgcacagaactggacatgcagccccaggggctgggactgttcgtgaacacctcagccccccgccagctccgaacctttgtcctgcccgtgacccccccgcgcctcgtggccccccggttcttggaggtggaaacgtcgtggccggtggactgcaccctagacgggctttttccagcctcagaggcccaggtctacctggcgctgggggaccagatgctgaatgcgacagtcatgaaccacggggacacgctaacggccacagccacagccacggcgcgcgcggatcaggagggtgcccgggagatcgtctgcaacgtgaccctagggggcgagagacgggaggcccgggagaacttgacggtctttagcttcctaggacccattgtgaacctcagcgagcccaccgcccatgaggggtccacagtgaccgtgagttgcatggctggggctcgagtccaggtcacgctggacggagttccggccgcggccccggggcagccagctcaacttcagctaaatgctaccgagagtgacgacggacgcagcttcttctgcagtgccactctcgaggtggacggcgagttcttgcacaggaacagtagcgtccagctgcgagtcctgtatggtcccaaaattgaccgagccacatgcccccagcacttgaaatggaaagataaaacgagacacgtcctgcagtgccaagccaggggcaacccgtaccccgagctgcggtgtttgaaggaaggctccagccgggaggtgccggtggggatcccgttcttcgtcaacgtaacacataatggtacttatcagtgccaagcgtccagctcacgaggcaaatacaccctggtcgtggtgatggacattgaggctgggagctcccactttgtccccgtcttcgtggcggtgttactgaccctgggcgtggtgactatcgtactggccttaatgtacgtcttcagggagcaccaacggagcggcagttaccatgttagggaggagagcacctatctgcccctcacgtctatgcagccgacagaagcaatgggggaagaaccgtccagagctgagtgacgctgggatccgggatcaaagttggcgggggcttggctgtgccctcagattccgcaccaataaagccttcaaactccctaaaaaaaaaaaaaaaaaaaaaaaaaaaaaaaaaaaaaaaaaaaaaaaaaaaaaaaaaaaaaaaaaaaaaaaaaaaaaaaaaaaaaa

SEQ ID NO: 1241 - DNA, 2545 bp, Homo sapiens
atccaatacaggagtgacttggaactccattctatcactatgaagaaaagtggtgttcttttcctcttgggcatcatcttgctggttctgattggagtgcaaggaaccccagtagtgagaaagggtcgctgttcctgcatcagcaccaaccaagggactatccacctacaatccttgaaagaccttaaacaatttgccccaagcccttcctgcgagaaaattgaaatcattgctacactgaagaatggagttcaaacatgtctaaacccagattcagcagatgtgaaggaactgattaaaaagtgggagaaacaggtcagccaaaagaaaaagcaaaagaatgggaaaaaacatcaaaaaaagaaagttctgaaagttcgaaaatctcaacgttctcgtcaaaagaagactacataagagaccacttcaccaataagtattctgtgttaaaaatgttctattttaattataccgctatcattccaaaggaggatggcatataatacaaaggcttattaatttgactagaaaatttaaaacattactctgaaattgtaactaaagttagaaagttgattttaagaatccaaacgttaagaattgttaaaggctatgattgtctttgttcttctaccacccaccagttgaatttcatcatgcttaaggccatgattttagcaatacccatgtctacacagatgttcacccaaccacatcccactcacaacagctgcctggaagagcagccctaggcttccacgtactgcagcctccagagagtatctgaggcacatgtcagcaagtcctaagcctgttagcatgctggtgagccaagcagtttgaaattgagctggacctcaccaagctgctgtggccatcaacctctgtatttgaatcagcctacaggcctcacacacaatgtgtctgagagattcatgctgattgttattgggtatcaccactggagatcaccagtgtgtggctttcagagcctcctttctggctttggaagccatgtgattccatcttgcccgctcaggctgaccactttatttctttttgttcccctttgcttcattcaagtcagctcttctccatcctaccacaatgcagtgcctttcttctctccagtgcacctgtcatatgctctgatttatctgagtcaactcctttctcatcttgtccccaacaccccacagaagtgctttcttctcccaattcatcctcactcagtccagcttagttcaagtcctgcctcttaaataaacctttttggacacacaaattatcttaaaactcctgtttcacttggttcagtaccacatgggtgaacactcaatggttaactaattcttgggtgtttatcctatctctccaaccagattgtcagctccttgagggcaagagccacagtatatttccctgtttcttccacagtgcctaataatactgtggaactaggttttaataattttttaattgatgttgttatgggcaggatggcaaccagaccattgtctcagagcaggtgctggctctttcctggctactccatgttggctagcctctggtaacctcttacttattatcttcaggacactcactacagggaccagggatgatgcaacatccttgtctttttatgacaggatgtttgctcagcttctccaacaataagaagcacgtggtaaaacacttgcggatattctggactgtttttaaaaaatatacagtttaccgaaaatcatataatcttacaatgaaaaggactttatagatcagccagtgaccaaccttttcccaaccatacaaaaattccttttcccgaaggaaaagggctttctcaataagcctcagctttctaagatctaacaagatagccaccgagatccttatcgaaactcattttaggcaaatatgagttttattgtccgtttacttgtttcagagtttgtattgtgattatcaattaccacaccatctcccatgaagaaagggaacggtgaagtactaagcgctagaggaagcagccaagtcggttagtggaagcatgattggtgcccagttagcctctgcaggatgtggaaacctccttccaggggaggttcagtgaattgtgtaggagaggttgtctgtggccagaatttaaacctatactcactttcccaaattgaatcactgctcacactgctgatgatttagagtgctgtccggtggagatcccacccgaacgtcttatctaatcatgaaactccctagttccttcatgtaacttccctgaaaaatctaagtgtttcataaatttgagagtctgtgacccacttaccttgcatctcacaggtagacagtatataactaacaaccaaagactacatattgtcactgacacacacgttataatcatttatcatatatatacatacatgcatacactctcaaagcaaataatttttcacttcaaaacagtattgacttgtataccttgtaatttgaaatattttctttgttaaaatagaatggtatcaataaatagaccattaatcag

SEQ ID NO: 1242 - DNA, 15000 bp, Homo sapiens
ctgagatcacaccactgcattaccagcctgggcgacagagcaagactctgtctcaaaaacaaaatacacacacaacaatataatagtatttgtttgtttgtttgtttttgagatgcctcggattacagtgcggggattacagacgtgagccatcaagcccggacaatattattatattgttcattgcactcccacaacacccctaaggggcaggaacttttcttcccagccccctccccccgaccccaccgagagacagggtctcgctctgtcgcccaggcctggagtgcattggcgcgatcaaagctcactacagctcagaccctctggcctcaagcgatcctccagcctgggcctcccaaagcgctaggattacaggcgtgggccaccgcgcctgaccagtcttctcttcttgcagctgagccttaagagcctgtccaaagagcagaggtgggctgaaggcacaaagcgaatgaaagaataggcccccgggcaccgttgcacgccccacctcctcccaggggcgttgcactccagcccctcccgcacatgcgcactgggccttccaccgccccccgcccccagcaaagccccccgctcggagcatgcgcgggccgcttggcgccaattgctgaccgccacagccacagccagggctagcctcgccggttcccgggtggcgcgcgttcgctgcctcctcagctccaggatgatcggccagaagacgctctactcctttttctcccccagccccgccaggaagcgacacgcccccagccccgagccggccgtccaggggaccggcgtggctggggtgcctgaggaaagcggagatgcggcggtgaggcgcggcttgggccggggctagggggtgaagggggaggaaggcggtgggccccgcctgacggagggcgtgcaggatcgcgcctctgactcggtaaacccgggctccgctttccaaatagcctccacgtgttcaaaatagccgccgctgtcccccatgggccgccatgctaaagggccagccaatgggaacgcgtctcggggcccatggcgccaatccgcgcgccgcaggccctcctggctcggtgcgctgtccaatcagaggggagagggggcgggacccagagggaggttttttgccgcgaaaagaccacgtggggacgcggtggggcgggtctggcgggggcggggcacctctgtgcagggttcccagtcaccgcgacgctcctcgggaagccatagggcgcctcccagcccgtctccccgctccagtttagaacctaattcccaattcccggaccgggcccagccctgggctcttactgtccgcttttgctgggacctgttccacaaatgggcgtcttctgccttgggccgtgggggttgggccggaagctgcggacgcctgggaaggggccgctgcagctcttgagccgcctctgcggggaccacttgcaggccatcccagccaagaaggccccggctgggcaggaggagcctgggacgccgccctcctcgccgctgagtgccgagcagttggaccggatccagaggaacaaggccgcggccctgctcagactcgcggcccgcaacgtgcccgtgggctttggagagagctggaagaagcacctcagcggggagttcgggaaaccgtattttatcaaggtaaatatggaaatgcaccttccataagggtaaatgtggaggctgccggcccttttgtcttgttagtgtagccggccaagttcatgtttccgtaggcttaggttgtacccccttcaacctcctttactcacaaagggggtaaaagaaagccatgatgtttcactctgcagctttatattggttaaagttgttaacgacccgcgagatgatatcatggattcatttaagtcacatagtctattgtccaggaaaggctggcgtagtaaaatcaccaaccatcctgaatgaaacctggcttgagctttaaaaagccgagaggagtggcactgtcaggacccagcccagagaaagaggcaaggaattgacctgattgaaccacttaggtgggggggcaggcactgtttttgtttgttgttttttaaaagaatttggacataacatgacaaagaactaatgatgttccaaataacttgcactagaagctttctaattgaattcttatggtttccaatgagcaatctgattttaagtctagtttatctttaaatcagctaatgggatttgttgcagaagaaagaaagcattacactgtttatccacccccacaccaagtcttcacctggacccagatgtgtgacataaaagatgtaagtacaacttgttgataatttttattggggagaaggagtcaaatagtatttttaaattagggacactggagttaagccacagtccatcattcagtagtaaataaaacactgaaatcccgaggtttggctgactgtatttcagcctgtatttactctttttaatgtttaccacgtggtatttatgtggcaaaaaggaaaactatgtacatcctgtgctcttatttcttgtattttttttaaatcctgaaactaacctcccgcggtgtcagatgttatggtggtggtgaagttcaaactgacacacaaagcagtaaatcttttgcagcttgttatagtcaaccccaccttgacctgaccacactgccttatagttagcactttcaagctcttgacttctggcctgaacagttttgtggttctgttatcagatccctttgctttagtttgtcttatataacagttgctggttgtcggctctcatccatcttgtgttcagaagttcgtggggctgggcacggtggctcatgcctgtaatcccagcactttcggaggccaaagtgggaggatcatttgaggtcaggagttcaagaccaatgaaacctggtctctcctaaaatacaaaaattagccgggcatggtggcgcacgcctgtaattccagctacttgggaggctgaggtgggagaatcgcatgagcccaggaggcggaggttgcagtgagctgagatcacaccacttcactccagcgtgggcgacagagccagaccctgtctcaaaacaaaaaaaaaaccgtggcttctcactgttgaactatgaaagcagagcaaccctctttaaatagggccacgtcctacctctcagccttacctccacctcccactctcccactccagagttggacagtgtggcaaacccctccccacttctgtctcttaaaaatcaagtagatgcctctgtggcacctccttgaattgaagtccgttgcctgccacctctgtgatccagttttcctctgagctgctacgatgcatttagcacctgctgacactggacttttaggtttcttacccgttttcctcccccgttttgtaaactggggcaagaatcttgtgatttaatgaatatctgtgaaatgacatagaagtgaaataggtgaataaatcatcttgataaggcagccacacctaatacttagaaaatctcgtaagcttaattttagagtaagaatttagaatctagctctttggttttgaagctaaattaaatcctattaagatcaatactaatttgcttcttgtttgaatgccctattctgaataccagtaatcagtataaacagggaatattaaaaggaatattgtgagggaatgctcaaaaaccagtttcaaacctatgaggatcagatgggccagcagggcttcttgacagaccagcattgggagagttgtttcacaagagaatatgttggcatggtgtgaacaccaaggggagggacaagaggtccccaaaagcctcctggtcatggaacatctggagctggattctgaaagatagagtatgtcagctgtggaggaagattctaagaacgcaatggcagaagcttgagaatgaagactaggtgggtgggccctggatgggaaggacgaggcggcctatgtttcaacacctcccgtgacaggaacttcatttcatttcattgtctcttgccacctactcccatggcccttttgatctgacctcattctcttctggctccacctgttagaggatataggggagcagacaccctcatatgctgctggtgggaaatctgaattgcttttttttttttttttttttttttgagatggagtgcagtggtgcaatctcggcttactgcaacctccaccccctgggttcaagcgattctcctgcctcagcctcccgagtagctgggactacaggtgtgcgccaccacacccagctaatttttgtttttttagtagagatggggtttcaccatgttggccagatggtttcgatatcttgacctcgtgatctgcctacctcgccctcccaaagtgctgggattacaggcgtgagccaccatgccaggccctaaattgctttaattcatcgaaaagtaactgggggctaggcacagtggctcatgcctgtaatcccagcattttgggaggccgaggagggaggatcccttgatctcaggaatttgagaccagcctcagcaacataagggaggccgtgtgtctacaaaaagtaaaaaaaaaattaggtgggcatagtggtgcactcctgtgggcccagctactctggaggctcaggtgggaggaccacttgagcccaggagggcgaggctgccatgagctgtgatggcaccactgcacatcagcctgagcaacacagcaaacccgtgtctcaaaaaattaaaaaagcagctaggtacatatctttacaagtttaaaatacgcttagcctttgaccagcaactctgttattagcaatctatgccatagaagtgttttatttgttttgtttatgtttgtttgaggcagggtctgtgctgcttacattacagtattgtttaattcctgacccctggtggttcacaggtgaaggttgtcatcctgggacaggatccatatcatggacctaatcaagctcacgggctctgctttagtgttcaaaggcctgttccgcctccgcccaggtacagttgctttacaggtgactgcagtccagacatgattcctttcagatgtgtacttagcttattacaagtgggactatctggggcactgttcactagccttggaggaggatttctcggcctcagcaccattgacatttggggctgagtcattctttgttgtggaggaggagaggagtcctgtgctattgcaggatcttgtgccacatccctggcctctaccactggaaaccaggagcaacccccagctcgtgataatgaaaaatgtgcagacattgccaaaagtcccttgggggcgtaaaatcacccctggttaagaaccactgctttgggccgggcgcggtgactcacgcctgtaatcccagcactttgggaggctgaggcaggagaatcgctggatcccgggaggcggaggtggcagtgagccgagatcctgctactgcactctagcctgggtgacacagcaagactggaaaaaaaaaaaaaagaaccactgcttttggaggatttggtgtatgatatacataaatatgctaaggacagaaaactgtccctgagcaacagtgggggtctgggttgtaactgctgggttgatttacttaggttttccagagtgctgttaaatccaagtacagactaaagtaaaggtctttggcagagtcacctgttagaaggaggactggcagtgttgatctcattaatcggcgccatatgtgccagtgtcccttccaagggctggctgtaacttctaaccttttcacatatgtcttagacgttactgagctttcaaaattatgcttaagattctgttttttgtttttcttgtggcttgctttcagtttggagaacatttataaagagttgtctacagacatagaggattttgttcatcctggccatggagatttatctgggtgggccaagcaaggtaagccagcgactgctagattttttttttttttttttttgagaccgagtctcactctgttgcccaggctagagtgcagtggtgcaatctcagcttactgcaacctctgcctcccaggttcaggcgattctcatgcctcagcctcctgagtagctgggaccacaggcatgagccaccatagctggctaattttttaatgtatttttagtagagacagggtttcaccatgttggccaggctggtctcgaactcctgacctcaggtgatccgcccgactcggcttcccaaagtgctgggattacaggcataagccaccacgcccagccccgactccattgttgatggtagtggctgctgccattatgccggctgcagcagggaagcacagcttgctacactggatcccatcaagcattggtttcatcatggatttagcccctgttgctgggtattgggctgatttgcctgagcctacatttaacctgtttctctcatgtgtataggtgttctccttctcaacgctgtcctcacggttcgtgcccatcaagccaactctcataaggagcgaggctgggagcagttcactgatgcagttgtgtcctggctaaatcagaactcgaatggccttgttttcttgctctggggctcttatgctcagaagaagggcagtgccattgatagggtatgttttgttttctttcttttttttcttttttttttaacactataaaaacaatgtaaagaattctaggagtccctgctgtgtttggtcctggaaaatccatgttataaaataacttttattttcccttaggcctgttataagggtttcccattgaaaactgagaagaatttggacaaattataggggtgatgagttgtgtatgaggaaagcaaagcaactggccaacttgtgactgaatgcagttggtgctgtaggcatgaacttggtgtctacaagatacaagtccctgggtaccattcacttaacaagtgatggatgaggcatgtttctggcttccaagaaatttggggacatatagaaaacacaaagaattccactcaatcacaaatttaacttgcccatgaaaatactatcagtgatcattattgtttggtttctgggttttttgttttttgatggagtctcgctctgttgcccaggctgtagtgcagtggtatgatttgggctcactgcaacctccgcctgctgggtttaagtgattctgcctcagcctcccgagtagctgggactacaggcgcccgccaccacacccggctgatttttttttattttttagtagagacagggtttcaccatgttggccaggctggttttgaactcctgacctcaagcgatctgtcctcctcaacctccaaagtgctaggattacaggcatgagccaccacacccggcctatcggtgatcattattaaccccaaggtctaattgcagatacccaacacgaccaaaccagtggctcccctccctacatcttccccctatctgctacctccctctttcccttcactcactgaagcacttctacacctggttgtggaaatcagagacctaaaagtcatccttgaatcctccatcccatcagtaaatcccatcaactctgcctcccaaaacaccccagtctactgcttctcattcgccactgctgcccttcaggcatgagtcaccatcatctttctccaggagaaccgtgatggactagagatggaggcttgatggagagccgcagagtggaggagggagagatagggggtgggaaggagacgagccaggggtgtgttcatccctggcaaatgggagagacattgggtgggggagaaattatagagtaaatgcttcaatgatcgaaggcaagggcttagcagaggtaacctgacaatagtttttggtgtatcagcaggaggtaacgggggtatcagaaatgtgcacgtatatttacccctaccttgtgtgggtactaggttgagcacttttgttttttgagatggagtctttctgtcacccaggctggagtgcagtggcatgatctcggctcactgcaacttcgcctcctgggttcaagcacttctcctgcctcagcctcctgagtagctaggattacagttgcctgccaccacacccagctaatattttttatttttagtagagactgggtttcaccatgttgacaaggctggtcttgaactcctgacctcaagcgatcctcccatcttggtctcccaaagtgctaggattacagatgtaagccaccgcacccgaccaggttgagtactttgcatgcagaatcttacttaactctcagaaaggctttgaggtaggcatacacttgtatgagtgacctaagatctgactggtatgaactgctaagatgtgatcatctaggtatgtaagaagtgtgcgtgagagtaattgctaatctctatcccttagggaggtttacggccagtgttgctcttccgcagtatattggtaatctttaatcatggtttggtctgaaagtaaacagttgttaaagtagcttggtcattaaagccaaattgcatatctccagcccagtgtctcttctgatctgtgccttgttactactgccccatgaacatgccaaattcaacattttccaaacgaagtttctccttttctcatccatgcttcactaaacttcctcctctgcactccctagcagcaaaaagcaccatcatctgcccagttgtccagccagatctattactgacacctgcctacctctctttctcccctcttctgtcctttttttccaccttcccagtcagtcagtcattcatatctgtgttctttcttccccctccaaatctacccctgcctgaccacctttgccttcattcaggccctcacctgatcttgcctggagggttctgatgctttctccctggaaggccttgccttaggctgaagatctgatttcaggggggtaggggggttggcccccaatcggcctcccagacttaactctatccctctttgcactccgatccctaggctgacccattcccctttactttttcacggtgccccacttccctgcctttgcatatcctgctttctctgcctacagtgtagaggtcattttcttctgggattctttagagctctgcagggctgacatttacaggggcctgtgctgcttgcgtgtgtgttcagcatttggtgtgcatgacttcttatcacactcagcccctgtgatcctcatttgattggtcacagtaacttcataagctgggcggtattgttattcccagtctacagatgaaaactgaagcagcttagagttgcagcaacttctctgtggtacagctactgagggtagaggtaggcctcgaccccgggcagtctggctccaggctctgtactcttaaccacactggattgcctggctttagtccccctcatcgcccctcctggactgagccccttgaaggcaagagtgttttgagaaacagtgatttgttcgttagtttttatatacagaaaagaagaggaaaacaaaaatggtctatatctccctgttaaaataactatagttgatattttaaaaaaatcaaagtagtcatttgccacataatgatgtttcagtcataaactgtatatatgacgatggtcccataagattataatattctggccgggtgtggtggctcatacctgttatcccagcactttgggtggccgaggcgagtggattgtctgagctcaggagtttgagaccagcctgggcaacatagtgaaaccctgtctctactaaaatacaaaaaattagccaggtgtggcggcgtgtgcctgtagtccagctacttgggaggcagaggttgcagttagctgagatcatgcgactgcactccagcctggcaacagagtgagactctatctcaaaaaaaaaacatatatatatatacacatatatatatacgtatatatatatacacatatatatatacgtatatatatatatgtgtatatatatatatacgtatatatatatgtgtatatatatatacgtatatatatgtgtatatatatatgttttttttttgagatagatatatgtatatatatatatacgtatatatatatgtgtatatatatatacgtatatatatgtatatatatgtgtatatatatatgtatatatatgtgtatatatatatatacgtatatatatatgtgtatatatatatatataaaaaatatttttactgcatcttttctatgtttagatacacaaatgcctaccattgtgtcacagttgcctatagtatttagtacagtaacatgctacacaggtttgtagaccaggagcaataagctacactatatagcctaggtgtgtagtggtaggttatcccatttgggtttgtgtaaagatgccctgtggtgtacggatagcagtgaaattgcctaacaacacacttctcagaatgcatccctgtcattaggtgatgtatgactattgctttttttcttttgaaacagggtctagctctgtcacccaggctggaatgcactggcttgatctcaactcactgcggcctcaacctcccaggctcaagcaatcctcccaccttagtcacctgagtagcagggaccacaggcgtgcgccaccacacctggctaatttttgtatttttttttgtggagacagggtttcaccacgttgcccaggctggctcttgaactcctggacttaaacgatcctcctgcctcggcctcccaaagtgctgggattacaggcgtgagctaccacacctggccactgactattcctcttttttttttttttttttttttttctgagacagtttcactcttgttgcccaggctggagtgcaatggcgtgatctcagttcactgcagcctccccctcctgggttcaagtgattctcctgcctcagcctcctgagtagctgggattacaggcatgtaccaccacatccagctaattttgtatttttagtagagacggagtttcttcatgttggtcaggctggtcttgaactcctgacctcaggtgatccacctacctcagcctcccaaagtgctgggattacaggtgtgagccaccacgcccggccaactattccatttttgtggcgagatttttttgtttttgtttttgttttttaattcttccttcttaggagctgtaagactattcagagagttcagaaaggcacaaaatggaaagtaaatggcttccactctttctcttaaaggaactactaaatacagtgtcttgggtatttttctaaagtttttaaaaaatgaaattattttgcattttgttcacttggtaaattttggaggtcatctcatcagtatatttatctttcgcatgtttttctaggagttatgtggttttacattgtaagaactttagaaaaatacatttagccagttctgtaacactgaattgtatactaggttttagctgacataagcagtgtgtcagtccctttatatgtacctatttgtgtaggtacaactggtccctggcttatgaagtttgacctgatttttttcgactttacaatggtgtataaccatactttgagcactcacacgttgtttttttttctttctttaagagacagggtctcttggctgggagcagtggctcacgcctgtaatcccaacactttgagaggccagggtggcggatcacttgagctcaggggtttgagaacagcctgggcaacatagtgagaccttgtctctaaaaaacacaaaaaattagcctggtgtagtggcacgcacctgtggtcccaggtactcaggaggctgaggtgggagagtaacttgagcctaggaggtggaggctacagtgggccacagtcatgccactacactctagcctgggtgacagagtaagaccccatctcaaaaaataaaaaattaaaaaaaaagatcttgctctgtcacccaggctggagtgcagtggcacaattatagctttttgcagcctcgaactcctgggctcaagtgatcctgccacctcagtcttctgtgtagctaggactgcaggtgcatgccatcacacttggctaactttttaatttttttgtagagatggggtctcgctatgttgcctcagttggttgtaaactcttggtcccatgcagttgtcctaccttggcctcccaaagcactgggattacaggtgtaagccaccgtgactggccccgttctatttttcactttcagtacagtgttcaatgagttacatgaggtactaaacacttcattgtaaaagaagctttgttttgcccagctgtaggctaatgtaggtgttctgagcatgtttaaggtagggtaggttaagctatgatgttcagcaggttatatgtcataaatatatcttcaacttaggatattttctacttaggatgggttttccaagatgttaaccccatccattgtgttaataagttgaggagtttatctgtgtgtgtatgcatcatggtgtcctttagcaaatacagtcttagcagtggaaattgctggcagtatgatagggacacttgaaaattgcatagataattgccaacttgaaggcagagggtggtgctctttgcatctcagagcctagcaaaggtaggtagttgctcaacaaacggactaatgttctaatgcaaatgctgaatgctccactttggaagggggagaatttagagggcaaaggggaatcgcacagggtcttaaagtgcaacagccacagtccttcctttttggggaaaaaaaaaaaaagtcccggccgggcatggtggttcacgcctgtaatcccagcactttggggaggccaaggcgagcggatcacgaggtcaagagatcgagaccatcctggccaatatgatgaaaccccatctctactaaaaatacaaaaattagctgggtgtggtggcacgcgcctgtagtcccagctacttgggaagctgaggcaggagaatcgcttgaacccgggaggcggaggttgcagtgagtcgagatcacgccactgcagcaagactctgtctcaaaaaaaaaaaaaaaaaatttaaaaagtcccaaatctgccaccatttattcttgatctttttcagaagcggcaccatgtactacagacggctcatccctcccctttgtcagtgtatagagggttctttggatgtagacacttttcaaagaccaatgagctgctgcagaagtctggcaagaagcccattgactggaaggagctgtgatcatcagctgaggggtggcctttgagaagctgctgttaacgtatttgccagttacgaagttccactgaaaattttcctattaattcttaagtactctgcataagggggaaaagcttccagaaagcagccatgaaccaggctgtccaggaatggcagctgtatccaaccacaaacaacaaaggctaccctttgaccaaatgtctttctctgcaacatggcttcggcctaaaatatgcagaagacagatgaggtcaaatactcagttggctctctttatctcccttgcctttatggtgaaacaggggagatgtgcacctttcaggcacagccctagtttggcgcctgctgctccttggttttgcctggttagactttcagtgacagatgttggggtgtttttgcttagaaaggtccccttgtctcagccttgcagggcaggcatgccagtctctgccagttccactgcccccttgatctttgaaggagtcctcaggcccctcgcagcataaggatgttttgcaactttccagaatctggcccagaaattagggctcaatttcctgattgtagtagaggttaagattgctgtgagctttatcagataagagaccgagagaagtaagctgggtcttgttattccttgggtgttggtggaataagcagtggaatttgaacaaggaagaggagaaaagggaattttgtctttatggggtggggtgattttctcctagggttatgtccagttggggtttttaaggcagcacagactgccaagtactgttttttttaaccgactgaaatcactttgggatattttttcctgcaacactggaaagttttagttttttaagaagtactcatgcagatatatatatatatatttttcccagtcctttttttaagagacggtctttattgggtctgcacctccatccttgatcttgttagcaatgctgtttttgctgttagtcgggttagagttggctctacgcgtaggtttgttaataaaagtttgttaaaagtttgttttgtgcaagtgtcctttgtgcgtccaggccagggcatccatggacgtccttgggctgccctttcccttggcgcctcccagggttcccatagcaaccaccgtctgcaggaggggccgcccttgcccctcctccccgccctgccgctcagtggaacggcccaaccctcccctggctgcggtgagcgctgggcccaacccccggcctggagcagcgccccaactccgagcaccgtggagcaccggctgccagctgagaccccagaggggtaactaacggcctgaggaaggcatttcttcggggaaacatggcgtgcccgtcgtggctacgttctgccaagccctgtgacgttggaggggagccgcctgcatcccccgctcagccagtgtttctagatccgagacatctggaactcggaagtgaggccagggctccaggaagactccctgatgacgcactggcccgcagcccaggctcaggtagtgggggctgtcaggatgatctgtgggatcccccagtgtccgaagaaagaagccacaattgtgtttttttttctttctttctttttctttttttttttttgagcgagtctcactctgtcgctcaggctgaagtacagtggcgcgatctcggctcactgcaacctctgcctccaggggtcaagcaatcctcccacctcagcctcccaagtagctgggattacgagcatgcactaccacgcccggctaatttttgtacttttagtatagaa

SEQ ID NO: 1243 - DNA, 599 bp, Homo sapiens
cgggacgcggatgcagacgcaggcggaggcgctgacggcggggatggccggggtggccacagctgccgcgggggcgtggacacagccgcagctccggccggtggagctcccccagcgcacgcgccaggtccgggcagagacgccgcgtctgccgcagggggtcacgaatgcggccgcacatattcaccctcagcgtgcctttcccgacccccttggaggcggaaatcgcccatgggtccctggcaccagatgccgagccccaccaaagggtggttgggaaggatctcacagtgagtggcaggatcctggtcgtccgctggaaagctgaagactgtcgcctgctccgaatttccgtcatcaactttcttgaccagctttccctggtggtgcggaccatgcagcgctttgggccccccgtttcccgctaagcctggcctgggcaaatggagcgaggtcccactttgcgtctccttgtaggcagtgcgtccatccttccctagggcaggaattcccacagttgctactttcctgggagggcctcatgttttatctggttcttaaatgtttgttactacagaaaataaaactgaggtattatt

SEQ ID NO: 1244 - DNA, 2457 bp, Homo sapiens
cgctgttgcctccgccacctcctccgccgccgcgcgcccctcggagttccgcgccccaccatgcccaacatcgtgctgttcagcggcagctcgcatcaggacctatcccagcgcgtggccgaccgcctgggcctggagctgggcaaggtggtcacgaagaagttcagcaaccaggagaccagcgtggagattggtgaaagcgtgagaggggaagatgtctacatcatccagagcggctgcggggaaattaacgacaacctgatggaactcctcatcatgatcaatgcctgcaagattgcgtcatcatccagagtaactgccgtgatcccgtgtttcccatacgcccgacaagataaaaaggacaagagtcgtgccccaatttctgcaaaacttgtggccaatatgctgtcggtggctggggcggatcacatcatcaccatggacctgcatgcttctcagatacagggattctttgatattcctgtggataatttgtatgcggagcccgcagtcctgcagtggattcgggaaaacattgccgagtggaagaactgtatcattgtttcacctgacgcagggggagccaaaagggttacatcaattgcagacaggttgaatgtggaatttgctttgatccacaaagagaggaagaaggcgaatgaagtggaccggatggtcctggtgggcgacgtgaaggaccgtgtggccatcctcgtggatgacatggctgacacttgcggcaccatctgccatgctgcggacaagctgctgtcagctggagccaccaaagtgtatgctatccttacccatgggatcttctctggaccagctatttccagaataaataatgccgcctttgaggctgttgtcgtcacaaacacaattccgcaagaggacaaaatgaaacactgcaccaagattcaggtcattgacatttccatgatcttggccgaagcaatccgaaggacacacaatggggaatccgtgtcctacctgttcagccatgtcccgctataaatccagaatgggaagtgtccagcaagcctactctgacttctgacttgtttttgttttctggatttttagctgtaggtattcagcaatgataggttaatcactggcaaaagcatcagatctttgtatatgctaagatttattgtttccccttctaaagctcaagatcatttctttccagtttttggggaaatggtggtggttatttggtctttaagtgaactgtcttaaatgagaaacgtttttgtcattttgacttttaacaggtacaggtgatctcttcctttgttctttcagtactttgaggcgacaactttcaagtatataatttcattgtggaagtcatagtttatatatttcgaggttgccaaaggtgacttcacattaaagccttctgtgtaaatatatactgataatgcctatggacatttgggtaaaaccctgtatagaattaattatccttttactttggagtgaaccttggaaaatttataattataataccatggattttgaattttccttttttttttttttttttggataactcagtttcagataaaccatcttggttactgtgcttaatttggaccaaattttatttagcttaatatggacactgacacattttggggggtatacattagacatatcagagcagtgtatttctggatcattttttaaatgacctcttctaaaacataactgtcacttacctgaaatgctgcatcctaaaattccaaaattatattgagcaatcgccaaggcctaaagccaactgacttaaaggtaatcatttcagctaagattaaatttaaagcctaagaatgtatagagctagttttaaaataatgatctcagatttttaaaaaggatataggaacctgcattgtcattctctgaattaagaactgatggtttctatcattatttagccccacctttgtattttaaaatccttcagaatacatttatgaaccaatgcgactggacttagccacacacaatggaaattcagaccttgactatttggtgtttccagttcacaaaggtgatgaagactgtcttgggagcagcttaatcccaaaatttgtacatttcttgctgctcctggcgtggaaacttaagtgagaccaccaaatacattggtcctgtccaattctactgaatgggggtggacctggcatttatctggccaaaaacaggagccagagaaatatgaatataccaaagttgtttgtttagcctccaacttaaattacattagtcaacttatagatactcatatgatcacttttctttttagatactacatcaactagattcaggagtatatcatttgcagtgcttgtattggtttaaaatgtaagattttaagatcctctaacactgtactaaaacatttcaataaaatcattctgactgcgttcaaaaaaaaaaaaa

SEQ ID NO: 1245 - DNA, 1882 bp, Homo sapiens
gggcaggaagacggcgctgcccggaggagcggggcgggcgggcgcgcgggggagcgggcggcgggcgggagccaggcccgggcgggggcgggggcggcggggccagaagaggcggcgggccgcgctccggccggtctgcggcgttggccttggctttggctttggcggcggcggtggagaagatgctgcagtccctggccggcagctcgtgcgtgcgcctggtggagcggcaccgctcggcctggtgcttcggcttcctggtgctgggctacttgctctacctggtcttcggcgcagtggtcttctcctcggtggagctgccctatgaggacctgctgcgccaggagctgcgcaagctgaagcgacgcttcttggaggagcacgagtgcctgtctgagcagcagctggagcagttcctgggccgggtgctggaggccagcaactacggcgtgtcggtgctcagcaacgcctcgggcaactggaactgggacttcacctccgcgctcttcttcgccagcaccgtgctctccaccacaggttatggccacaccgtgcccttgtcagatggaggtaaggccttctgcatcatctactccgtcattggcattcccttcaccctcctgttcctgacggctgtggtccagcgcatcaccgtgcacgtcacccgcaggccggtcctctacttccacatccgctggggcttctccaagcaggtggtggccatcgtccatgccgtgctccttgggtttgtcactgtgtcctgcttcttcttcatcccggccgctgtcttctcagtcctggaggatgactggaacttcctggaatccttttatttttgttttatttccctgagcaccattggcctgggggattatgtgcctggggaaggctacaatcaaaaattcagagagctctataagattgggatcacgtgttacctgctacttggccttattgccatgttggtagttctggaaaccttctgtgaactccatgagctgaaaaaattcagaaaaatgttctatgtgaagaaggacaaggacgaggatcaggtgcacatcatagagcatgaccaactgtccttctcctcgatcacagaccaggcagctggcatgaaagaggaccagaagcaaaatgagccttttgtggccacccagtcatctgcctgcgtggatggccctgcaaaccattgagcgtaggatttgttgcattatgctagagcaccagggtcagggtgcaaggaagaggcttaagtatgttcatttttatcagaatgcaaaagcgaaaattatgtcactttaagaaatagctactgtttgcaatgtcttattaaaaaacaacaaaaaaagacacatggaacaaagaagctgtgaccccagcaggatgtctaatatgtgaggaaatgagatgtccacctaaaattcatatgtgacaaaattatctcgaccttacataggaggagaatacttgaagcagtatgctgctgtggttagaagcagattttatacttttaactggaaactttggggtttgcatttagatcatttagctgatggctaaatagcaaaatttatatttagaagcaaaaaaaaaaagcatagagatgtgttttataaataggtttatgtgtactggtttgcatgtacccacccaaaatgattatttttggagaatctaagtcaaactcactatttataatgcataggtaaccattaactatgtacatataaagtataaatatgtttatattctgtacatatggtttaggtcaccagatcctagtgtagttctgaaactaagactatagatattttgtttcttttgatttctctttatactaaagaatccagagttgctacaataaaataaggggaataataaa

SEQ ID NO: 1246 - DNA, 2969 bp, Homo sapiens
ctaaattacccactacgttgcttgtatatttaaagttggagttcgttgctaaagatggcagacccagatgtcctcactgaagttccagcagcattgaagcggttagccaagtatgtgatccggggattttatggcattgagcatgccttggccttggacatcttgatcaggaactcctgtgtgaaagaggaggatatgctggagctgctcaagtttgatcggaagcaacttcgatcagttttgaataatttaaagggagacaagtttatcaaatgcagaatgagggtagagactgctgcagacgggaaaaccactcgccataactactacttcatcaattatcgtactcttgttaatgtggtaaaatataaactggaccacatgagaagaagaattgagaccgatgagagagattcgaccaaccgggcttccttcaaatgtcctgtctgtagtagtactttcacagacttagaagctaatcagctctttgatcctatgacaggaactttccgctgtactttttgccatacagaggtagaagaggatgaatcagcaatgcccaaaaaagatgcacgcacacttttggcaaggtttaatgaacaaattgagcccatttatgcattgcttcgggagacagaggatgtgaacttggcctatgaaatacttgagccagaacccacagaaatcccagccctgaaacagagcaaggaccatgcagcaactactgctggagctgctagcctagcaggtgggcaccaccgggaagcatgggccaccaaaggtccttcctatgaagacttatacactcagaatgttgtcattaacatggatgaccaagaagatcttcatcgagcctcactggaagggaaatctgccaaagagaggcctatttggttgagagaaagcactgtccaaggggcatatggttctgaagatatgaaagaagggggcatagatatggacgcatttcaggagcgtgaggaaggccatgctgggcctgatgacaacgaagaggtcatgcgagcactgctcattcacgagaaaaagacttcctctgccatggctggttcagtgggggcagctgctccagtgaccgctgccaatggcgatgactcagaaagcgagaccagtgagtcagatgatgattctccaccccgtccggcagctgtggctgtgcataaacgagaagaggatgaagaggaagatgacgagtttgaagaagtagcagatgaccccattgtcatggtggctggccgtccgttctcctacagtgaagtgagccaacggccagagctagtggcccagatgacaccagaagaaaaggaagcatatatagcaatgggacaacgcatgtttgaggacctctttgagtgagctttccctaattctttctcctttctctaatgctcagttcaaaaaggaatgtctcatctttgaagaaaagtatttaagtggctttctgcccctcttgatgtaagcaactgtccatccttgtgcaaagattgatggtagagagcttgacttttatgccagaaactttcccagcaaggtagggtgctgagaatcctacccttccttgctgtcactacagtattaatattttactgtattttcttttcttttttttttttttttggagatgaagtctcactcttgtaccccaggctggagtgcaatggcgtgatctcggctcactgcaacctctgcctcctgggttcaagcgattctcctgcctcagcctcccgagtagctgggattacaggtgcctgccaccatgcctggctaatttttgtatttttagtagaggcagggtttcaccatgttagccaggatgatctcgatctcctgacctcatgatccacccgcctcggcctcccaaagtgctgtattttcttatctgatttttttcttgccttattaagacataattttctcccttctgaaatgagtgagggaagttcataaggtaaatccttcccatccatctgtttactacaataggttacaataattcactgatcacatccattttatctgttctagccaggcattccaaacaatttcttatactgctgcccaccaaagcagcttgccaacagtcaaatcactgattgggggaaaaaatcctgaaattttgcttagaatttgagcatttcctcaaaattgagatggatcaatatgtaaggggaggtgggagcgtgtgtggaagggggagagatatacttgagtcttatgattaatgtctaaaccagaatttgtgtctttagaactgaccagactggtagattttattgtattgcttaatgtcttttggtttggatttaggatgatagaaaacagaagtataattggtaaacccttaggaagaaattagaaaaacatggacgtaagacaaaaagtctctgtgaagggttgaagagtgacaagcattggtaacagtgccttagaactgtgtcagttagtctgatttggaaatcctttatgtaaagctgagactggtcctggttttgttccctttggtacagacctcttgtcagtgctataaattgtttaatgaggccattccagcagaaatcaacagaataattgattactcttctctctctctgtcactctccctctttctaaacatcattgaaggctgtctctctttaattttgtcagacacagtattttagggtgcatccagtataccattgagcattgtaacctcaggaaacagtttattttgggttctgatatgtagcatggtattttccctaaggcagaactttaaaaataaagaactttcacacaagggtctgtaacaattgtatatcttacaatatttttccttgcattgtaatttttaagtatttatcattttatagtacacatgtaaagaatatatgagccttgtatggagtgatgtttcatttacctgggttgtgttaatgactgaatgttgacaataaatctgttttatactg

SEQ ID NO: 1247 - DNA, 65608 bp, Homo sapiens
  misc_feature (1)..(65608): n=a,t,g or c
ccgcccccagccccagccccgccgggccccgccccccgtcgagtgcatgaggttgacgctactttgttgcacctggagggaagaacgtatgggagaggaaggtgcgcgggccgcggggtgtggggcgagggcctggagggggtgcccgggcagcgtggggcacgggagggggccgggtctgccaggaggccgcgccctgcctcctccgggatgagctcgtccttacgaagcccgcaggcccctccctgtccccctcccgcccgggatccccctccccggcccccggcgagctgccctcctgcgggtctgggggcccctggaccctttttcctcctcccacgtccccccgcgaaggactcccagacactgcccaccccgcgtcggcctccatccgcgtgctctgtccaccacccgggcctcgctggggccaccctttatccagtctcggaagaaagagcggctggggacacagccccgggtcccagtggccgcctgcccggctctgtgaccttgagccaggcgctgacttcctggtcctcagtttccccttctgtacatttggaaactgggtagttgcccccccggtgtcggtgattgggggccagatgggtagagcggagataggcgtccaggaagccggaggccgtgtactgcgggagcctcatccactctccctgtccgtgccccaaacccggtgcctgccctcagtcttggctgggagcatgactcatcctaacctcctctttagccccttctccctcactggggcccaaggcgcagtactgcactgcagttagggttcaaggactcccccagcctaggacagggtctgggggcccctccttggatctccttcgctgacctgtcacttagatccacctggccccaaggcagggcctgactccacacctccccctgccaccaactcttcccaggcccatgaaaacctgattggggtaggggcccaccttcctgtagcccctgcctacctaaggtacctgcgtcttcacagagggtcaggctgttgtggccttgggacctagctatgtgactgggcaagccatgccatctctggggctcagtctccccttctgtacagtggagaggggcaggtctggggcattttccagggcccaccagctccaagggtgccaggccccaaggatgactaagcatcgtgtggctggctagaggaggtgccaggcctccctgggacaggtgtctgggagtacccacgtctgcagccccttccccttgccaagccagggcattcattgccaaggatctgttagggccggcacctccaggcttcctgcccttgacctcccagctggcttcagcccaggatgcactaatccagccctgtccagtccctgcctttgaagggccctcttagtacttcttcctgggcaggagagggaagaaaggaggctgtgataggaatgtcacccactgccttatccctaaagccactgcttcctttctcctcatttaccttgccagatccaatgctatagcgggaggatggacctgatcctcctcctaagctgatacatagggaaacagggccagagaagcttggcaacctagtcagtatctcagcaagactcaggccagcgccctttcttctcctatttggcacagcgactgccctgcctgggcgctgcacatgtgcagtgtgcgaggattggtgcaggtgtaggtatatgtggggtgggcagggcaagctgggcctgcaccagatcacacttcctgagaatgcttcccaactcccttcccaccctgcaggaagcgagttgcccgtgtgtgcaagctgcggccagaggatctatgatggccagtacctccaggccctgaacgcggactggcacgcagactgcttcaggtagggtggggtgcccagggcctgtgttgccctaaacaaggcctgccagagaggacaggctggtcaaggaatgggggaggccgggatatgcctcctggtgccgtcccctattgtgacttcgtggccttaatttaccatttatgacatgaggtgttttgactagaaaatccctacaggccttcctgttgtcattttatttatctatttttttttctttttgagacggagtctcgctctgtcacccaggctggagtacagtggtgcgatcttggctcattgcaacctcttcctcctgggctcacgcagttctcctgtgtcagcctctggagtagctgggattacaggcgtgcaccaccacgcccagctaatttttgtatttttagtagagacgggttttgccatgttagccaggctggtctgaaacttctgacctcaagtgatcttcccacctcagcctcccaaagtgctgggatgacagacataaaccaccgctcctggcctcattttattttcttttatgtatttttcttttttcgaaatggtcttgctctgttgcccaggctggagtgcagtggtgccatctcggctcattgcaacctccatctcccgggctaaagtgatcctcctacttcagcctcccgagtagctgggattataggtatacaccacaatgctcagctaattttttaaattttgtgtaaagacagggtctcactattgagacccaggctggtcttgaacttgtgacctcaagcaatcctcctgccttggcctccgaaagtgctaggcttacaggcgtgagctaacgccttggcctctgttgtcatcctagatctctgagatctaaatcttagagaggatgggagagacctccaattgagccagtgcctgcaattcagccccctgctggcacccagacagggggaagagttggaaggaatgtccctcctgccttctgggtgttcatgctcttgcagggagggaagacaaaccaggccttaagggaaaccaggccaccctcagtgtcttcccaggctgcttgcgaacatgcataacccagtcacaccagccccagtgtccagacacacacccacaggtaggaagaaagtagggtcagggttgtggcggaggataaagagtacatgaggacctgaaggtcacccagtaggaccatcctgagaagccaggagcaggggtctacctgccttgagccagagcagggccagagcaggggtctcaaaggatgtgagatttcctgggtagaaaagtagagtggaggtggggcgtggtggctcacacctataatcccatcactttttggggctgaggtgggcagatcacttgagttcaggagttcgagacaagcctgggcaatatggcaacaccctgtctccactgaaaatacaaaaaattagccgggcgtggtgcgcatgcctgtagtcccagctactcaagaggctgaggtggcagggttacttgagcctgggaggtggaggctgcagtgagctatgatcgcaccactgcactctagcctgggcaatagagcgagacccagtctcaatttttaaaaaagaaagaaagaaaaacaaatggtgtgggagagaattacaggcatagtcaccaaacagcaaggttcaggggagaaaactccataaaagggtagaaggtgaagcttctgggatgcccagcaggggtcaagacatccaccactaggactttattttaggcttctgccttggtttattttttggtttttggtttttttgagacagtcttgttgtgtcgcccaggctggggagcagtggcgcgatccctcctcactgcaacctccgcctcccaggttcaagcgattctcctgcttcagcctcccaagtagctgggattacaggtgtgcaccaccacgcccggctaagttttgtattttcagtagagatagggttttgccatgttggccaggctggtctcgaactcctgacctcaagtgatctgcccgcctcagcctcccaaaatgctggaattacaggcatgagccactgcacctggcctcggtttgtttttttgtttcttcttttctttttttttacacagggtcttgctgtgtcacccaggctggcgtgcagtggtgagatcatagcccactgtagcctccagctccaactggttcaagcgatccttctgactcagcctcccaaagtgctgggattacaagcataagccaccatgcccagcctgttttttcttttttaggaataacgtctaacgttttctaacattcagtaagggacaacccctgttctaagtactttgcatagttagatattagtgctgtctttgttttgccagagagaaaattgggacacagagaggttaattctcttgatgaaagtcacacagccagtgagtgaaatgaacacactcagtgtggctgaaaggagacagacagcatgccctgggattctgcatcaggtgctcagaaagaggccttcggggggcaagagggctctcaacaggcagaggaaaccatctgcacagcggtgggatggtgcggactgctgagggaacaggaacagttcccttggaaggaacagaataagctgagggatccaacaagaaacaaagttgagaccgattcgtgaagggccttgaatgccaagataaggagtttcagaagtcaggatgggggtggtggctcatccccgtaatcccagcactttgggaggccgaggcaggcagatcacttgaccccaggagcttgagaccagcctggccaacgtggtgaaacccccgtctctactaaatattcaaaaattagccaggcatggtggcacatgactgtaatccaagctactcgggaggctaaggaaggagaatcacttgaacctgggaggcggaggctgcagtgagctgagatcacgtcactgcactccagcctgggagacagagcgagactccatctcaaaaaaaaaaaaaaaaaaaaatagaagggagtcggcagaaagccagggaggggctggggtgacatgctgttgaagaatgccatcccagtgggccggtggtggtatctaggcagggaagggactgtcccagtaactcaagggtctgagctcataggacctgacctgggacagtgactgaggatggagagaatttcaggcagaagggacagtttttggtgagtatttgtcatattggctaccatgcattgagcactcttcatgctaatttgttaaatcttcatcataactctatgagggactgtatgtgcccagtttgcatgggagaaacagagattccatgcaatcaagtgcctcgctgaaggttgtaacatctagagctgggactaaaaccttctcactccacatcgccacagagtaggaaaggcaggggctggcggtggcacatgcctataatcccagccctttgggaggcggaggcaggtggatctcttgagcccaggagtttgagaccagtgtgggcaacatagtgaaaccttgtctctacaaaaaaattagctgagcatggtggtggtgcctgtagtcccagctactcaagggcgctgacatgggagggttgcttgagcctgggaggtggaggttgcagtgagctatgatcacaccactgcaagccagcctgggtgacagagtgaaatcccatctcaaaaaaaagaaagaaaggaagaaagaaaaaggcaggggcttcggggagggcatgggcactggcgaatggcagggtggaacctgaagccatctggttttctaacctgggcactggggagttggtggtttgttgactctgatggaattgggggtcatgttggggaggagacatgctcatctgtgttgagctggaggggacatgggctatccatggtggctgtgtcctgcccagagctagccatgggagcctgagtccagttggaggtaggaaagtcagaaaaaacggccgcctcggagctggccctgagatggtgagtgggatttgtgatagggccaagacgaatgaagggaagaactttggggacccctgtgtctgcggtgaggggggagatggagccttgggtgatggagagagggtcaggagtagagccacagaagccacaggagggaagccgtgttacaggatgggtgtacctggctttggagtggcctgtcccaaatcactcaccaggagaggggtgagtccccgggtcagggcagtaaagaggaggcatgtttgtgctgtccctggtgtagtgaaactcaagaaggaagccaggtgcagtggctcacgcctgtaatcccagcactttgggaggccaaggcaggcagatcacctgaggtcgggagtttgagaccagtctggccaacatggtgaaaccccatctctactaaaaatacaaaaattagccgggcctgttggtgggcgcctgtaatcccagctactcaggaggctgaggcagaagaatcgcttgaacccgggaggcagtgattgcagtgagtcaagaatcgcgccactgcactctagcctgggtgacagagcaagactccatctcgaaaaaaaaaaagtctcaatatggggaaagatccactagaagtaagagccatggcttctacctcgtggcttgtgggtgtgatactcccaacagtccccaaagctggtggtcctcaccgcgtgacagtgagcagagcagctcagagggggtcactgctcacctgggtgcatggctgaccacagccaggctggctctcagtgggatgcccaaggtgctagactctgcttagtctccctcgggccctgggcttgaggcattgggcccggcccagacctcatttcatgcactgagacctttgttccagggcccctcacccctctgaaggtgttcgggcaggggcaatgtgataaggccatgaggggtctgcagcctccagccccactggggaggtggccagtgatttccaccttcctggcccctctgcatgcccctcccagtggaacttcctagggtccctgagtcagtcacttgcaaataattatggcgtgcccactctgcattaggcccctctcacaacaacccagtaagggggtgctatttatttattaaagcgattttttttttgagtctcgctctgtcgcccaggctggagtgcggtggcgcaatctcggcttactgcaagctctgcctcccgggttcacaccattctcctgcctcagcctcccaagtagctgggactacaggcgcccaccaccacacccggctaatttttttttgtttgtttgtatttttagtacagacgaggtttcgctgtgtgagccaggatggtctcgatctcctgacctcgtgatccgcccacctcagcctcccaaagtgctgggattacaggcgtgagccaccgtgcccggcaatattaaagcgattttaaggccaaggctggtaactcacgcctgtaatcccagcactttgggaggctgaggcaggaggactgcttgaggccaggagtttgagatcaacctaggcaacatagtgagactccatctctacaaaaaaattagccaggcgtggtggtgcgtacctgtagtcccagctactcaggaggctgagatgggaggatcatttgaacccaggatgtcgaagctgcagtgagctgtgatcacgccactgcactctggcctgggcaacagagcgagacactgtctcaaatttttaaaaagcgattttacaaatgaggtgcagagttcagtcacttgccaaaagtctcacagcgcgtgaggagtagaatcaggactcgaaccgaggcagcctggcttcagagcctacagtgtaaccacagcttagtcccacacctcccagaccaacagggtccctgccttctagtgggcaagacactcagtgaacaaatgtagtgtcaggtattgggggacagcactctcaggaagtgatgtttaagggacagaattgaagggagcagtgtttagaggatgtcgggggtagggccggtgcatgtgcaaaggccttggggtgggaatgtgcttggcacaactgaggaccacaaagccagcgtgcgggagtgcagtcagtggccaggggtgcatagagccttgtgggccccgtggaaggtgccgttggctgtacactttttttttttttttttttttttttttttgagacagagtctcgcttttgttgcccaggctggagtgcagtggcgtgatctcagctcactgcaacctccgcctcccgggttcaagcgattctcctgcctcagcttcctggtagctgggactacaggcgcccaccaccacacctggctaatttttgtgtttttaatagagacggggtttcaccatgttagccaggctggcctcaaactcctgacctcaagcgatctgtctacctcagcctcccaaagtgctggggttacaggcatgagccactgcgcacaggcagctgtgcatctttgaatgtcataacctgagcatctgagagctgctcctgtcccctggcccctgctcttgaggaagtcccacgctgataggacagacagggtcataagtgctgtgatgggggcctgcaggctgctggagggctcagccgggaccagatgctgcccctctttgtagagtgggacaattgctgcaggcccatgggacctctggtattagccctgagggttgtcactccggggcctgcccctttctgtgttctgacctcccagccccttgcaggccccgcctcccggaaggttatgaccaggcttggactggtccaggcttccctttggctcacatactgcctctgcgaggtcccctccaggaagcctcctgtgcacaacccccagggctgccgcatccctggtagcatctccttggcagctgggtgggctggccctgggcaaggagggctgagcatgctgctggcctgtggggttggagcagcggcgggatgcaacctccctttcttcaggggacctttttggcgaagacaaactgtccataggaagtcgacctctgttcccttgggggcagcagtggaagaggcagctgcttttgagcttgtccctgtccccagagaagcctgaggccttcagtgccgttgccagggccgaggctgaggagcctacagcgtgtgttcaggactgagggccagggacgggcacaggctccctgcctggggtccaagcctagatcgctcgctccccacccgcaccaaagcccaggcaaagggtgcttcagccacttcctgttgcaggctcagaccaagtcccctggcacccacgcggctgcagctcctcctgtgcgctgcagccacgctggccccaccctctgcagcctccaatcctgagcccctgagggaggatggggaagcagctggtctggccacccctgccctcccttagacctccagagcccccagtgtagccacagaggatgctgttggcttcagccccaagaagacgccgcttcctccagagggctaagtaagtgggaatccccctccctacttgtcctgggctccaggcagggcccctggtgtaaggcctgggctggaagccgacccacctaggtccaggctctggggcagaactgaaactccttggttactgtcggctgcagctgggagcaggccactccaaagctgtgggtccttccaggacagtctccccatgaggccggtcctccacctgctgtttcttcacacctggtggccagggatgtggccctgggtagaacgatgattctccactcctgtcattatggaagccaccgctgtctcccagcccagccagccacctgggctgcagagcacccctttcatgccctccgggtgcctcccccttctcctgccccagcctggctttgtcctaccctgctctcagggaggggtaccctggagtggggccagggcatggctctcccccgagggagttcctctctggctgtccccagggcagctctgcacagcctcagtacctggcgcacctcccttgacatccttcttagggacagtcaggcactctgtgtggggcactcaagagagccaggcccgtcagcctctagctcctgccagaatgcaggcctgaggggtgaggggcggggcaggggcaggggcagggacaggaactccggcttgctctccatccgcaaaggttcactgaggccccgagccccagccactgagccaccaagtcagcctgggccaggcctgggtgccctgtctgcaatggaggcagagacggggtctcggggcagttctgaggatgctgggtgcacagcgggggcctcgccggcaggaatcacttatgctctctcctgggccaagctttgtggatgcccagcctggggccgcggggagctggcaggtcagtggcagacactggtgggcagacctagtgtctggtagaacaggcatcaaggaagtggtgaccggagggaagccaagtgcactcaaaccctcgggtgagtcatcaccgccgggtctttcacagctgctgaaagtgagcaacagtgatgaaggtttgtgagtttctgcgtgagcgagtgaatggaccagtagcagtttccaggttgtggaagagcgttccctccccgggatggggacacttggttacagcaattcctaatcccccacccacccaccgcccactgcagaggtatgcgggggccctgcttcctgcaggcaggagtgaggggcactcctgtgatgtggcacccctgtgaccgaggtcatgtgtgatcggtgtaagggcaggaagcgagtcattggtctgcaccaggcgtgggggcttctgcgagggcaggacccaaagtcggcctggcctcccggctgcagcactcctttccctttcgaattaggttagagccctgggacgggaggtgccctgtagaccacccccctcaccaacttccgtcctccgccccacccccgcggtgatccggtgaactgccggccccctgctgtgcaccgagtggggcagtgaccctgacgtggcgtctcctgccgcccctgccaccgccaccacctccggtggcccagcctccgcattccccacccccatggaggaatgcaccaggcctcccttcctggatgcacccctcacccacatgcttccaaaccctggcattttctgctccccctttactcccaccccttcccctaggctcccagacaaaggggaactggctggatcctcttaaagggacagtgtcccaccagcttactgctgaactcccctcctcaaccccagttccctagttacagttaattagcattagcagacagcccatgagtgatacccatgcaggccccaggctgtggagagtttcctgggtaggaaacagcccttaaggtccctcatctcatccaggtcccagtctttcctacctgcctctctcctagattgtggccctttggagcctggttcttctgtccctgtgtgaccgacacatagcacccaaacagtggcagagcgggacggaccccctagcctgttctctgtgtgggtctgtaccctgacccagacatgcccccccacagcaggacccaggggggcacatgtgtgcctgcgggttcactggggcacccgcatttggtttattttattttttagagagagggtcttgctgtgtcacccagctggagtgcagtggtgtaatcatagcacactgcagccttcaactcctgggctcaagcgatcctccctccccagcctccctagtagctgggagtacaggacccactgtatcctggctaattttttaataattttttaagagatggggtcttactgtgttgcccaggctggcctcaaacctctggcctcaagtgaacctcccaccttcgcctcctgaagtgctgagattacagcatgagccaccatgcccatcccagactgacatttctatatttgttcatcctggctgggcagggctgctggtccccacccaccgggatgcttggctgggaaaaagccgggaatgtaggtctaaccctggcctgtgttgtggcacctacagcctggcattcctccccatctgcccttcaaggccccaccaaccaggcctccttggtagcctctagtgaggaaacaggcgaaccgtggctttgatgaccctgcacacctggggattctcctctatttttctttttcttttttttttttttggagacagagtctcactctgtcgccaggctggagtgcagtggcacaattttggctcactgcaacctctgcctcccaggttcaagcgattcttctgcctcagcctcccgagtagctgggattacaggtgcccaccaccatgcctggctagtttttgtatttttagtggagactgggttttgccatgttggccaggctggtctcagactcctgaccccaagtgatctgcccacctcggcctcccaaagtgctgggattacaggtgtgagccaccgctttgggaggccgaggtgggcggatcacgaggtcaagagctcaagaccatcctggccaagatggtgaaaccccatctctactaaaaatacaaaaaattagctgggcatggtggtgtgtgcctgtagtcccagctactcaggaggctgaggcaggaggatcacttgaacctggaaggcagaggttgcagtgagccgagatcgagccactgcactgcagcctggcgacagagcaagactccgtctcaaaaaacaaacaaaaagaaaacttgttctaattcttacaaaggtgcctgtagccgaggcagcggcccaggtgaggtggaggagggcgggagtggacgtctcagcccggcccctctcctgcaggtgttgtgactgcagtgcctccctgtcgcaccagtactatgagaaggatgggcagctcttctgcaagaaggactactgggcccgctatggcgagtcctgccatgggtgctctgagcaaatcaccaagggactggttatggtgagcgccccctgccttgcacactcacctggggtgggggtatccaagcagaccccatgctccaggtctctctcccatcattgtctctcctggtctcctttttgctggtctttggagctgctttctgagcctgactgtctgtctgtatccctcagcgcccccatctatggagccagctctgtccaggagctcagcagctggccagccgggtccctgcagttgtttttttggtgacacccttggaagaggcctaggggaggatctgtgggggttgttgggtctgctgagctgggctgttccctcctcacccccgcaccaggtggctggggagctgaagtaccaccccgagtgtttcatctgcctcacgtgtgggacctttatcggtgacggggacacctacacgctggtggagcactccaagctgtactggtgagtgccttggcccctccctgagcctaggaggcccacctgtgtcacagatctgcaagggtgctgactctcccacacccgggcctcctgccctttcccatggggtgaggtttgttggggcaaatgttcatatctcctttcccatcccggcatggaaacaagtgagaaataacacacagaagtcagtgtgaaaaagcctcagacggccaggcatgctggctcacgcctgtaaacccagcactttgggattccgaggtgggtggatcccttgaggctaggagttcaagaccagcctggccaacatggtggaaccccatctctattaaaaatacaaaaattaaccaggtgtggtggcgggtgcctgtaatcccagctactcaggaggctgaggcaggagactctcttgaacctgggaggtggaagttgcagtgagccaagattgcaccactgccctccagcctaggcaacagagcaagactctgtctcaaaacagaaaacctcagacgtcagctttcttactggccatgactgcagcatggtgctggcacaaaccaccagaggtggggtggatgccacaagttaaggacaccatccccagcataactgctccctctttagacaccagccacaagttcaggggtccccaacccactcacacttctgaccgactggctacaaattcagggactcccaagaccctgccaagtttgatcgtttgctaacagactcacagaactcaggaaatcctccatttttatcccagttttattatgaaggacacagctcaggtccgaccaaatgaagaagcatctcccctccctcccctagcacatcaatgtgatcaccaaccaggaagcttcactgagcttcagcagccagagtttttattgggatttcattacatcgtcatgactgattgagtcattggccgtatgatcaagcttagtctctagcccccgttcttggaggtcaggctggatgaaagctgcaaccctcttcaaatcacatgatgtatctttgcggggctgagtcatctcattagtatcaactcaggaatagtctgaggggctcatgaataacaaagataccccattccaaggacttagagtctccctcccaggaatcaggacaaaacccagacagattctttcttatacaacactgatcaagctggattagaggacaacgtggcttgatcccagatgggcttttaatgacttcctcctgaactggatttatcctcaggccttgtcctggccgccttacaggatcacagcgagtagacagacccgaatgactcagagggacgagggctggctgggcacgcacagttcctgctcccagttccataggaagagtgaaagaaaagaaagctggccaggtgcagtggctcacccctataatcccagcactttgggaggccaaggcaggcagatcacctgaggtctggagtttgaggccagcctggccaacatggtgaaaccgtctctactaaaaataagaaattagccaggcatggtggtgcttgcccgtaatcccagctactcaggaggctgaggcaggagaatcgcttgaacccaggaggcggaggttacagtgagccaagatcacaccactgcacttttggacaattgctagctttccttttcttttgagacagagtcttgctttgtcacccaggctggggtgcagtgttgtaatcaacagagtgagactccatctcaaaaaaaaaaaaaaaaaggaagggattgggggaagagcctggggctgggggctgcagagatgctgaaattgatgacgcccttgacactcttttcttcccaccccggcggctcttgcagcgggcactgctactaccagactgtggtgacccccgtcatcgagcagatcctgcctgactcccctggctcccacctgccccacaccgtcaccctggtgtccatcccagcctcatctcatggcaagcgtggactttcagtctccattgaccccccgcacggcccaccgggctgtggcaccgagcactcacacaccgtccgcgtccaggggtgagtggccggcctgccgaggctgccgtcggtgtggctatggctgttgatgtgggtggcagagtctggcactgggggccctgaaaatgaatgggcgagtgtttgggtacagatggggcccagttctgacaacctggtttgccagatttctggcccagtcattcctctgaataccattacaaatgccagatacaataaaaagacattttcaaccgggcatggtggcccacacctgtaatctcagcacttcgggaggccgaagtgggtggatcacctgaggtcaggagttcgagaccagcctgggcaatgtggtgaaaccccgtctctactaaaaatacaaacgtagccaggcatggtagtgtgtgcctatagtgccagctgcttgggaggctgaggcaggagaatcacttgaacccaggaggtggaggtttcagtgagccccgactgccattgcactccaggctgggcaacaagagtgtaactctgtatcaaaaaaataaaaataaaaaaaacacactcaaaaaataaaaagacattttctttagtccatgtctgatccaacaagaaagaggaggaaccaagtcaagaatgagtgaagaagctgggcgcagtaactcacacctgtaatctcagcactttgggaggccaaagtgagaggatcacttaaggccagaagtttgagaccagcttgggcaacatagcgagacctgcatgtctacaaaaaaaaaaaaaaaaattaaaaattagccaggcatggtgaaatcactgaacacataaaggctgggcatggttgctcacacttataatcgaaacactttgggaggctgagatgggaggatcacttgaggccaggagttcgaaaccagcctgggaaacattgtagtcacagctacttgggaggctgaggcagaaggatctcttgagcccaggaagtggctacagtgagctataattgcacgactgcactctaggctgggcaatggagcaaaaccctgtctcaaaaaaatggggcagggctgataaagattagattactgtgtgactttgagcagctgctttctctctaggctttgggggtctgtttgaacaatgagggagttggataccttggagctttctaagatttctgtggcgcctttattgacaccttgagaagtagcatgcagtgtttctacttttgggcaattggtcacttctttttttttgagacagtctcactctgtcgcccagtctggggtgcagtggtgtgataccagctcactgcaacctccacccacaaggttcaagcaattcttgcacctcagccccctgagtagctgggactacaggtgaccacatgtggctaatttttgtatttttagtaaagacagggtttcaccatgttggccaggctcgtttcaaactcctgggctcaagtgatcctcccttctcggcctcccaaagtgccgggattacaggtgtgagccaccgtgcccggcccaagtgctagctttctctctctctttttttttttttcgagacggagtctcgctctgtcgcccaggctggagtgcagtggtgtggtctcggctcactgcaagccccgcctcctgggttcacgccattctcctgcctcagcctcccgagtagctgggactacaggcacctgccaccatgcccggctaattttttttttatatttagtagagacagggtttcaccatattaggcaggatggtctcgatctcctgacctcgtgatccgcccgtctcggcctcccaaagtgctgcgattacgggcatgagccaccacgcccggccctaccaagtgctagctttcatttgacgcagtgaatgtttcttgtacacctggcaggtgcctggcactgcataggcactgttgagatgtgaaggtggccctggggacagaaaattatactgggcttgactgtgtgtctccatcccttgacatcagccaagccagcagctgctttacatacatgatgagcagacagctgcttgaaagagatgaggaaactcccagaccaacggctcttaccagagggccaagggaggtccccacagagtcagaggctgcagctggtccctgaaatccaggcagaattttagaaatgaagacagtcagctgggtgcagcggctcatgcctgttatctcagccacttcggagggctgaggtgagaggattgcttgagcccaggaggtggaggctgcagcaagctatgatgacaccatgcattccagcttgggcgacagagcgagaccctatctctaaaataaaaatgaagaagacagttaatgacgtctcctccctgtctgcctcactgggtaagcattcgcccagccaacatctggaacatcccagttctgcaaagagccacacccttcccagaaagagcccaacttgccaaagatttacttatttgttttaaactggttttagttgaccgcttttcattttgtgtatagcagcgttttaaggaaggtctaatttatccaggccacctgctgctttagcaaaccaagggagaggatgtgagattctaaggaatttacatatgtatgtcatatatatatatatatatagacacacaatttttttttgagacagggtcttgctctgtcatacaggctggagtgcagtggccaatcatagctcactatagcctcagatgcctgtgctcaagcaatccactcacctcggcctcctgagtagtgagactacaggcacacaccaccacacccagctaattttttaattttttgtagagactgagtcttgctgtgtcgcccaggctagtcttgaactcctgggctcaagcaatcctcccacattggcttcccaaagtgctaggattacaagcgtgagccactatgcctggcttatttttaaggttatatgcatgcaaagcctgtatcaatgaaaatattttctttggtttttttcaacttttcatcttcgcattttgcagatttatagaaaatttgctaaaataataagtccattgaatacatacacacccttcaccaaggttcaccaattcgtaactgccatatttgggagttatatgtgtgtctctctatatatacatatatggatacagatacatatacatgtttagtgacttgtttatatttgtacatacatgtacatgttgttatttattgatcgtttgggagtaagttgcagggatcattgactcccccacaattatgctagatattctcaaaagaaggaccttctcttttttttttttttttttttttttttggagacagggtatcactgtcattgaggctggagtgcagtgatgcgatcacagctcactgcagcctcaacctcccaggctcaagtgatcctcccacctctgcctcccaagtagctgggactacaggcacgggccaccacgcctggctaggcattctgttatgtaattatccaattgtatcttatagttcagtgatcacattttggaaatgtaacattgataccattatctaatacacagaccatattcaaattttgcctattgtctctatactgaactactgaactgtcctttatagcaatctccccctcatccacagtccagtccatgatcaacattgcatttaatcgtcatgtgtcatcagtatcttttttttttttttttttgagacggaattttgctcttgttgcccaggttggagcgcaatggcgcaatcttggcttattgcaacctccgcctttgggcttaagtgattctcctgcctcagcctcctaagtagctgagattacaggcgtgcaccattatgcatgcctaatttttgtatttttattagagacggggttttaccatgttgccctggctggtcttgaactcctgacctcaaatgatccacccacctcagcctcccaaaatgctgggtttacaggcatgagccactgcgtctggccatttcctcagcctttcattgcccttcatgatcttgacatttttgaagtgtacaggccagtcattaaagtaaaatgtttttccttttttttttttttttttttaaaaagagacagggtctcactgtgttgcccaggctggtctcagactcctaggctcaagtgatcctcccgcctcagcttcccaaagtgctgggattacaggcgtgagccatcgtacctgccctcgcatttgggtttgactgatgtttcctcttagggagacaggctctgcaggtttggcctgatactgcataagtgatcctctgtccttccgagtggatcttgccaggagacatatgatgtcagtgtgcccttggctgaggatgttcactttgattacttgttttttctgtactgtaaggatttttttccctttgtcatcaataaaccatttgtgagatttgagtctgtaaatatcctgttcccaaaaacccttccccaaatgatttgagcatctattgatgattcttgcctgtagcgattattactagggtggctaccaaatgctgaatttctaactctgttcttccttctgcatttgttactgtaaggaagagcttctcccccatacgagaatagtctttttgtttgcttggttgtttttttgagatagggtctcactctgttgcccaggctggagtgcagtgacatgatcatagctcactgcagcctcgacctcatgggctcaagcgatcctcctgcctcagcctctcgagtagctgggactacaggcagcaccaccatgcctggctaattttttattttttgtaatggtgaggtctcactattttgctcaggctggtctcgaactcctgacctcaagtgatcttcccacctcagcctcccaaatagctgggattacaggagtgtgccaccatgctcagctaattttctgtaaaaaatgtcatagagatggggtcttgctatgctgcccaggctggtctcaaacccctagtctcaagcaatcctcccaccttggcctcccaaagtgctgggattccaggcatgagccaccacacctggccctgtttttcttaaagttctcagtctcctctctgccttacccccatccccttttccatctccaggacctagggcagagacaaagtgagcattccctaaaaagcttttatgaggcaaaatgaaaaccagctcacgcctataatcccagcactttgggaggccaaggtgggtggattacctgaggtcaggagttcaagaccagcctgaccaacatagagaaaccccatctgtactaaaaatacaaaattagccaggcatggtggcacatgcctgtaatcccagctactcaggagcctgaggcaagagaatcacttgaacctgggaggcggaagttgcaatgagccgagatcactccattgcactccagcctgggcaacaagagcaaaactctgtctcaaaaaaaaaaaagaaaagaaaagaaaaccaggtccctaacaccgaagagttaaaagaaataagtaaatttggcaaattggtctttttgtgagttagcttataggcaactgatcgagggtctctttcccgtcttcaccctgcaattgtggctcagggcaagctgccagctccctcctgccaatgcaggagcaatagagcttggcctcctcttgcagggcgagtttgggagtcagatatgaagccactaatccgggacctttttgggacccaaggcactcatctgccccaagcataccaggcaggccaggtgcaatgactcatgtctgtaatcctagcactttgtttttgcgacggagtctcgctctgtccacccaggctggagtgcagtggcagaatcttgactcactgcaacctccacctcccaggttcaagcaattcctgcctcagcctcccaagtagctaggactacaggcgcccactgccacgctcggctaatttttgtattttcagtagagacggcgtttcaccatgttggccaggctggtctcaaactcctgacttcaagtaatccatccaccttggcctccccaactgttgggattacaggtgtgagccactgcgcccggccagtcctagccctttgggaggctaaggcgggcggattgcatgagctcaggagttcgagaccagcctgggaaatgtggtgtaaccccgtctctactaaaaatacaaaaaaaattagctgggtgtggtggtgtgcacctgtaatcccagctactcaggaggctgaggtacgagaatcgcttgaactcaggaggcagaggctgcagtgagctgagattgtgccattgcactccagcctgggtaacagagtgagattctgtctccaaaaaaaaaaaaaaaaaaaattcgagaccaaacatacctgggatttggaaggatagatctgttcccccagggtggagacaatggtccattgaatgggaacagctgagcatcttgtgtgggtggccagtgcctacaagcgtgccacctttctccagctcacacctgtggcagacatcagtaattgattacagaattcctcccctgaaaccagaactcggtgttctggccatctgctacttcccagtcacacgaagtagaatcctccacctgctcaccctggatctggtgcccttcgccttggtttcctgttggggctctgagggacaggtgggcactggcctgacccctgccttacccacagagtggatccgggctgcatgagcccagatgtgaagaattccatccacgtcggagaccggatcttggaaatcaatggcacgcccatccgaaatgtgcccctggacgaggtacggtcctgagtctgtggggcaggacgggaggtagtgccttcatgcctagccccctccccactccacccccattcacatgcctgctgtccccagattgacctgctgattcaggaaaccagccgcctgctccagctgaccctcgagcatgaccctcacgatacactgggccacgggctggggcctgagaccagccccctgagctctccggcttatactcccagcggggaggcgggcagctctgcccggcagaaacctgtcttgtaagtcagcctgctcctcggttcagctgggtgctttcactcctgctggggctcaggggctgtgggacctaggtcggggagccagccctgcacaaatgcagcccaggcttgagccagggaggtggaggctgcagtaagctgtcatcacaccactgctctccagcttgggtgacaaaacaagacccactctcaaaaaaaaagaggaaacacacattttttaaaaagccggggacggggccaggcgtggtggctcatgcctgtaatcccagcactttgggaggccgaggcaggtggatcacctgaggtcaggagttcaagaccagcctggccaacatgggaaacctcatctttactgaaaatacaaaaattagccgggcttggtggcaggtgcctgtagtcccagctactcaggaggctgaggcagatgaatcacttgaacccaggagatggaggttgcagtgagccaaggtcacgccactatactccagcctgggcaacagtgtgagactctgtctcaaaaaaaaagaggatgacagagcaggatctgaggggttgaggggagctgggggctgccactagagccaggataggccgagacactgggatgggcagcctttggactgtcccaggcgggccctcccaaagcagggggtgattgcatagactggcatggacaggggcatgcaggcaggaggaggaaggggcagggccttggccgggtgctacctgtcccccggtggcacttggcaccatgtgtgccccccaggaggagctgcagcatcgacaggtctccgggcgctggctcactgggctccccggcctcccagcgcaaggacctgggtcgctctgagtccctccgcgtagtctgccggccacaccgcatcttccggccgtcggacctcatccacggggaggtgctgggcaagggctgcttcggccaggctatcaaggtacagagcatgccagggtctcaggggacagtctgggtgggacccctccatcctccttccttcccagtctatggaaacacagtggaaggggtatctggcttccagactccctggccagtgccctctcctcccttggcctcctggagctaattaggaacaggggacctcctacaggtagactgagaccttatgtgcgggaggtcattgaaaggtggctcctagccaggcacagtagtttatccctgtaatcccagcaccatgagaggctaaggctgtaggatcgcttgagcccaggaattcaagaccagccttgacatcatctctacaaaaaatttaaaaattaattgggtatagtggtgcatgcctgtggtcccagctacttgggaggcttaggcaggaggattgtgagccaggagttcaaggctgcagtgagctatgatcatgccacagcactccagcctgggcaatagagcaagaccccatctcaaaaaaaaaaaaaaaagacaagggattaatacatcccatccacttgggtatttgggaacatcccatgcacagcctagagtatgaagccatctgcacatctccctggcagtcctggggtggagatggggcttcctagaaggcgggcttacagcagagcttctgtcttcacacctctgtgtcccacacgcaggtgacacaccgtgagacaggtgaggtgatggtgatgaaggagctgatccggttcgacgaggagacccagaggacgttcctcaaggaggtcagtgagcggaatgccctcttccctccagagggacttccaggtgctcacccctgccccatcaacacaggtcggaaaagggctctgggaaccattgaaagaagagcgagcaggccaggcatagtggctcacgcctgtaatcccaacactttgggaggttaaggagagaggatactttgagaccaacctgggcaacatagcaagaccccgtctctacaaaaaaattttaaattaaccgagcttggcaatgtgcacctgtcatcccagctactcggggggctgaggtgggaggctcgcttgagcccaggagttggaggctgcaatgagccatgatcgcaccactgcactccagcctggggaacaaggcaagaccctgtgtccaaaaaaaataaaagtaactgcattggtcgggcatagtggctcacgcctgtaatcccagcactttgggaggctgagccgggcggatcacctgaggtcaggagttcgagactaccctggccaacatggcaaaaccccgtctctactaaaaatacaaaaattagcccagcatgatggtggtgagtgcctgtcatccaggctactcaggaggctgaggcaggagaatttcttgaactcaggaggcggaggttgcagtgagccaagatcgtgccgctgccctccagcctgggcgacagagtgagactccttctcaaaaaaaaaaaaaagaaaagaaaaaagaaagtaactgcaggcaggggactgggaaaaagagcatcgctgggggtgggggcagctcaagcagagggcacaggacgccagagggtgtggcagaggcaggagaggggagctgggggttccgtatctttgagaccgcctacagcccctggtgggatggaaaagggagaagcagacccaagcacagctgggaccacacagagcccgggcccagcctgtttgtgccccgccaggtgaaggtcatgcgatgcctggaacaccccaacgtgctcaagttcatcggggtgctctacaaggacaagaggctcaacttcatcactgagtacatcaagggcggcacgctccggggcatcatcaagagcatggtgagtcctgggcagagccagccacccccgctgtgcggccccgggcaaagcagctccctctgtgagcctcagtctcatctcttcaatggggggaagccacaggggtctcaaaggccctctgaaccctgattcctaatcaaaaaggggagcgactgactccatctaaagctaggaaaggccaggtacaatggtgcacacctgttattctggcactttgggagcccaaggcaagaggatcactcgaggccaggaattcaaggctgcagtgagctgtgatctcaccactgcactccagcctggaccacacagcaagaccctatctcaaaaactaaaataaaattcagagctttccttaaggatttgaataaaattacaaatccatctttagaaataaagtgctcaggccaggtgcagtggctcatgcctataatctcagcactttcagaggctgaggccagcagatcacctgaggtcaggagtccaagaccagcctggccaacatggtgaaaccccgtctctactaaaaatacaaaaattagctgggcctggtggcaggcacctgtaatcccagcactttgggagactgaggttggcagatcacctgaggtcaggagttcgagaccatcctggtaacccgtctctactaaaaatacaaaaaattagccgggcaaggtggcaggtgcctgtagtcccagctactcgggagactgaagcaggagaatggcgttgaacccagggggcagagcctgcagtgagccaagatcgcaccactgcgctctagcctgggtgacagcgagattccgtctcaaaaaaaaagcacttggaggaagcctcacagagtcctgtgctggaccacaccctggggatccagtcctggcctccagccccatttctgtaccaccctgagaccatgggatcttcctcaggttggattaccttgtatccaaggtgtggaccctatgggctcctgctaggtgtaacttgacacaacgggttccgttgtcaggtgcaatttagaaactctgggctaggccaagcgcagtggctcacacctgaattcccaaactttggaaggccgaggcaggagggtcactagaggtcaggaggtcaagaccagcttggacaacataatgagatcccaatcccatctctacaaaaaaaattaaaaaattagccaaatgtggtgacacatgcctgtggttccagctccacaggaggctgaggcagaaggatcacttgagcacaggaggtcgaggctgcactccagcctgggtgatagagtgagaccctgtctcaataaaaaataaagatctccaaggggatgaggtttgagaatgaggcgtctcccccaaatgatttgagcccaaagccccgttctcctggcatggctcagtgctgccactgcgcaggtgaccttgctgggcccttctacctcttacctgtctgtgaaagtaggttctaattttttaaaaacctagaaagatgagttttttgtttttgtttttgtttttcccgagatggagttttgctcttactgtccagcctgaagtgcaatggcgtgatctcggctcactgcaacctccacctcccaggttcaatcgattctgcctcagcctcccgagtagctgggattacaggagcccaccaccacacccggctaatttttgcgtttttagtagagacagggtttcaccatgttggtcaggctggtctcaaactcctgacctcgtgatccaaccactctgacctcccaaagtgttgggattacaggcgtgagccaccacacctgacagaaagatgagattttatagaaaataaatatagcttgttttctcagaggaggcagattgggagctatagaggaatatccctgcttagagtttgaaatcagttctgttaggaaataatgtttgtaggggccgggtgcggtggctcacgcctgtaatgccagcactttgggaggctgaggcaggtggatcacttgaggttaggagtttgagaacagcctggccaacatggtgaaaccctgtctctactaaaactacaaaaattagctgggtttggtggtggacacctgtaatcccagctacttgggaggctgaggcgagagaattgcttgaggccgggtgcagtggctcatgcctgtaatcccaacactgggaggccaaggtgggcagatcacctgaggtaaggagttcaagaccagcctgaccaacatggtgaaaccccgtctctactaaaaatacaaaaaattagctgggtgtggtggcgcatgcccatagtcccagctactcaggaggctgagacacaagaatcacttgagccccggaggcgaaggttgtagggagctgagatggtaccactgcactccaccctgggtgacagagtgagactccatctaaagaaaaaaaaaaaaggaaataatgtctgtgagctgtgttgactcatactccttagaagcagacagttgtgggtgcccgaagaaatcggggtgttggggagcccagggaccctctaggacgcttgcctcttcctgcctctgtctcatgcaaccatccctgccatcggggcccccaccggccccaccctggccattctttctccatcccaggacagccagtacccatggagccagagagtgagctttgccaaggacatcgcatcagggatggtgagtgagccgggtgctctagctccattcataatcccaccaggaatttgcaaacagaacccacaaagaagctttgaaagagggcagagggggtcgatgggagagtgggaagaatcgtcccgactggcctgattggggtgggagcagagggagttcctggggagccaggatgggctggggtccctctgcacagctgccccctgactcccgtgtccccgtccctaggcctacctccactccatgaacatcatccaccgagacctcaactcccacaactgcctggtccgcgaggtgagtaccagggccccacgtggctgggtgtcaggagacagcaggagcccatccaaccccagcctcagggccttcccagaactggaggcccctccatgttgcctccatgacttcaatttgaggtgggggtggggggcagcagcccgtggggaagagcgcagggtcaggaggcagacagacctgggtttgagtcctgtctctgccactgactcatggtggaccatcagagtcccaggctggtaggagggtctcataaatcaatgaaggagaaagtgacatgtaagctacaaaggaccaggaccgtggtcttcatagagcacagcccatggcagagtggccatgggctacaccagacagcaccagcatctgggggccacagagtgggggcataggcgtatgggctggagtggtcagggcaggcttcctgaaagaggaggcttggccagacacagtggctcacacctgtaatcccagcactttgggaggccgaggcaggcggatcacgaggtcaggagatcgagaccgtcctggctaacatgggcactgtggctcacacctacaatcccaacactttgggaggccgaggtgggtggatcacttgaagccaggagttcaagaccagcctggccaacatggctaacacggtgaaaccccatctctactaaaaatataaaaaattagccgggcgtggtggcaggtgcctgtagtcccaactacttgggaggctgaagcaggagaatggtgtgaacccgggaggcggaacttgcagtgagccaagatcgcgccaccgcactccagcctgggtgacagagcgagactccatctcaaaaaaaaaaagaggaggctttaggtggatatttaagcaggggacgggcaggcaaagagcccagtgtctaaggattgtcaagggaggagagcccggttctccaccaaaagcacaggagcgagtaaccatgcccatctggagaggtggtgtattcgtgtcctggggctgccatcatgaagtactgtgaaccagatggctcaaaacaacagaaatgtgctgggcacagtggctcacacctaaaatcccagcaatttgggaggccaaggcaggtggattgcttgagctcaggagtttgagaccagcctgggcaacattacgaaagcccatctctgccaaaaatacaaaacggaatagccagccgtggtggcataagcctatggtcccaactacctgggaggctgaggtgggaggatcacttgagcctgggaggtagaggttgcagtgagccaagattgtgctactctactccagcctgggagacagagccagaccctgtctcaaaaaaacaaaacaaaacaaggccaggcactgtggctcacgcctgtaatcccagcactttgggaggccgaagtgggtggatcacttgaagccaggagttcaagaccagcctggccaacatggcaaaaccctgtttctactaaaaattcaaaaattagcaggcatggtggcgcatgcctgtaatcccagctactcgggaggctgaggcaggagaattgcttgaacccaggaggcagaggttgtagtgagctgagattatgccactgcactccagcctgggtgatagagtcagacaccgtctcaaaaaaaaaaaagcatcacatggcaagaggggctgacaagagacccccaaactgaccattatacagacccactcttgtgataactaacctggtccctcaataacccattaatctgttaattcatacagagccctcatgacccaatcacctcttacaggccctgcctcttaataccgttagagtcaggccaggcatggtgacatgggcctgtagtcccagctagttggaaggctaggtgggaggatcccttgagtccaggaggtaaatgttacagtgagctctgattgtgtcactgcactccagcctgggcaacagagcgagcccctgtttttaaaacagcaacaagccaggcacagtggctcacgcctgtaatcccaacactttgggagactgaggcaggcagatcacttgaggtcaggagttcaagaccagcctcaccaacacagtgagacccctctctactaaaaatacaaaaattagctgggcgtagtggtgggtgcctgtagtctcagctactcatgagactgaggcagaattgcttgaacccgggaggtggaggttgctgtgagccgagatcacgtcactgcactccagcaacagagtgggactccatctcaaaaaaaataaaaaataacagagatctgtgttggcttacacctgtaatcccagcactttgggagtccaaggtgggcagattgcttgagcccaggagtttgagaccagccaggcaacatggcaaaaaaataaaaaaatttgtctctacaaaaaaattaaaaaattagctggcatggtggtgagtatctatagtaccagctactcaggaggtggaggtgggaggatcgcttgagcctgggaagttgaggctgcaatgagctgtgttcgtgccactgcactccagcctgggccacgggagggagactctgcctcaaaaaaaaaaaaaaaaaatcaaacccgaaaagcaaaaaacatagacctcacctgcttattgggaatattcaagataaaattaggccaggcacggtggctcacgcctgtaatcccagcactttgggaggccgacgtgggcggatcacgaggtcaggagatcgagaccatcctggctaacacggtgaaaccccgtctctactaaaaatacaaaaaattagctgggcatggtggcaggcgcctgtagtcccagctacttgggaggctgaggcaggagaatggcgtgaacctgggaggcagagcttgcagtgagctgagatcgtgccactgcacttcaacctgggcaatagagcaagactccaactcaaaaaaaaaaaaaaaaagataaaattgggccaggtatggtggcttactcctgtaatcccagcactttgaaaggctgaggcaggtggaccacttgaggccagaagttgaagaccagtctgggcaacatagcaagaccctatctcaatcagtcaatcaacctaaataaatagtaaatctggtggcatgccaagcacaggacctgggtctataatcaaaattcctgtcttgatgggcacagtggctcacacctgtaatcccagcactttggtaggccacagtgggtggatcacctgagatcaggagttcgaaacctgcctagccaagtatggtgaaacccgtctttactaaaaatacaaaaattagccaggcatggtggcaggcgcctgtaatcccagctactcgggagggtgaggcaggagaatcgcttgaacctgggaggcggaggttgcagtgagccgagatcatgccactgcgctccagcctgggtgacagagcaagactccgtctgaaaaaaaaaacaaaagaattcctgtcttctctccgaaacaaagcagcatcagtgcccccgcaggtgggagggagcgcttgcaggagggagcagtgggtccgccacgacggtctggggagcaggtggggagggggcagagggtgcagcgtgtggtgggagggaggaagccacactgctatcttcaggtgcttcccgcagctccatttgcaaagagcggatgggtttggggaaggaaggggtccccaccctgtgccaatacagcgtatcagaggtatgttctctgggctgtctacgggttggcttggggtcctggggaggggcaggccaagcgggcagtactaggatcgggtcccagcatgacccggcttcaccttcccagaacaagaatgtggtggtggctgacttcgggctggcgcgtctcatggtggacgagaagactcagcctgagggcctgcggagcctcaagaagccagaccgcaagaagcgctacaccgtggtgggcaacccctactggatggcacctgagatgatcaacggtgagtggttcagccctgcccatcatggccctcacgggaagccatgggggagcccaggagagctgtaacctcccaagcccctggcccctcccagcctccttggctcttcagttaccctgtgggtcctgttgctcctataacacacttagtggcagccaggcacggtggctcacgcctgtaatcccagcactttgggaggctgaggtgagtggatcacctgaggtcagtagttggagaccagcctagccaacatggtgaaacccccattctttactaaaaatacaaaaattagctgggcatggtggcgggtgcctgtaatcccagctactagggaagctgaggcaggagaatcgcttgaacctgggaggcagaggttgcagtgagccgagatcgcgccattgcactccagcctgggtgacgagcgaaactccatctcaaaaaataaataaatagaagacacttagtggcttaaataaatgatcatacagttctggagtctgaagtccagcgtcagcctcaccgggctgaaatcaaggcgccggtagggtgagctccttctgcaggctccggggcacctgtttcctgaccttttctggctcgtggaggcttcctcattcctcctgttgctgccccctcctctgtcttcagggctggctgcaaagcatcttctcttctctgatctctgcatccatccccgcatctctttccctggctctaaccttcctcctttttttttttttttttaaagagggtctcgctctgttactcaggctggagtgcagtggtgccaccatagctcactgcagcctcaaccttctgggctcaaactgtcatcccaccccagcctcctgaatagctgggaccacaggcatgcaacaccacacccagctaatttttttattttttattttttatttttttttgagacagagtctcgctgtgtctcccaggctagagtgcagtggcgtgatctcagctcactgcaagctccgcctcctgggttcacgccattctcctgcctcagcctcccgagtagctgggactacaggcgcccgccaacacgcctggctaattttttgtatttttagtagaaacggggtttcaccgtgttagccaagatggtgtcgatctcctgacctcgtgatccgcccgtctcggcctcccaaagtgctgggattacaggcgtgagccaccgcgcctggccaattttttaaatttttaatagagacgggggtatcactatgttgcccaggctggtctcaaactcctggcttcaggcgatcctcctgccttgacctttcaaagtgctgggattccaggcatgagccaccatggccctccatccttctgatagggacccttacggtgacattgggcccacctggataatccaaaagcagccctccatctcaagaccctcaacttaatcccatctgcagagtccgatggaaggtgggacgtatacaagtcccagggatcaggacgcagtcatctttggggatcatagttctgcctcccacagggtctgcttccctcagtccatttctttgctgtcaatggtcctatatatgcccagattataggttataaagtccttctacaagcaggtgacacatgaacacaggttcagggcaggcagaccccagccatcacctcatcatagttaacctagttaaattagcctggcatgtggcgtggtgcctaatgcctgtggtcccagctactcaggaagccaaagcgggagatttacttgagccaaggagatcaaggctgcagtgagctatgatcataccactgccttctagcctgggcaacggagtgagaccctgtctcaagaaaacaaaaaataggccaggcacagtggctcacacctgtaattccagcactttgggaggctgaagcaggcggattgcttgaggccaggagttcgagaccagcctggccaacatggtgaaacgctgtctctactgaaaatacaaaaattacccgggtgtggtggcacagctactagggaggctgaggcaggagaatcacttgaacccaggagcagaggttacattgggccaagattgcaccactgcactccagcctgggcaacagaggaagactgtgtctcaaaaagaaaaaaaaaaaaaccttcctgtaatcccagcactttgggaggctgaggtgggcggatcacgaggtcaagagattgagaccatcctggtcaacatgatgaaaccccatctctactaaaaatacaaaaaaattagctgggcgtggttgcacgcgtctgtagtcccagctacccgggaggctggggcaggagaatgatgtgaacccaggaggcggagcttgcagtgagccgagatcgcaccactgtactccagcctgacgacagagtgggactctgtgtcaaacacacacacacacacacacacacacacacacacacacacacacacacacagagttaacatagcccgcaaagaagactataaaacagtcttagtggccgggcgcagtggttcacgcttgtaatcccagcactttgggaggccgaggcaggtggatcatgaggtcaggagtttgagaccagcctggccaacacagtgaaaccccatctctactaaaaatacaaaaattagctggacatggtttcgggcgcccgtaatcccagctactcaggaggctgaggcaggagagttgcttgaacccaggaggcagaggcaggagagttgcttgaacccaggaggcagaggttgcagtgggcgacagagcaagactctgtctcaaaaaacaaaaaagtcttagtgtttcctatgtttagggattagtgtgaggattaaaggttgtaaactcatttccacctagttggcattcagtaaatgagaattgacatttagtactaattgtttcgggtattttgttttttgttttttgttttttgttttttctgagaccgagtcttgctctgtcatccaggctagaatgcatggtgcgatctcggctcactgcaactccgcctcccgggttcacaccattctcctgcctcagcctcccacgtagctgggactacaggcgcccgccaccacgcctggctaattttttgtatttttagtagagacggggtttcaccatgatctcgatctcctgacctcgtgatccacccgcctcagcctcccaaagtgctgggattacaggtgtgagccaccgtgcccggccagttttttgtttttgagatggagtcttgcattgtcacccaggctggagtacagtggcgtgatctcggctcactgcaacctccacctcctgggttcaagtgattctcctgcctcagtttccctagtagctgggattacaggcacctgccaccatgcctggctaatttttctatttttagtagagatggggtttcaccatgttggccaggctgatcttgaactcctgacctcaggtgatccacccgcctcggcctcccaaagtgctgggattacaggtgtgaaccactgtgcccggccatgtaccgattatttttaacatcattaagtagctggtatcattcccattttacaataaggaaactgaggctcagagagtctgtgtcagtttcctgaggttgctgtaataaattgttagaaacttgattatttaaaacagcagaaaatggtcaggcacagtggctcacacctgtaatcccagcactttgggaggccgaggcgggcagatcactggaggtcaggagttcgagaccagcctggccaacatggtgaaacaccatctctactaaaagtacaaaaattagctgggcatggtggcaggcgcctgtaatcccagctactcgggaaattgaggcaggagaatcgcttgaacccaggaggcagaggttgcagtgagccacaatcgtaccactgcactcttgcctggacaacaaagcaagactccatctcaagataaaataaacagcagaaatttattccctcttagttttggaagccagaaggttgaaatccaacagggctgcgctccctccagggcgatctaggggagaatgcattccttgcctcttccaccttctggttgttttgcattcctgggcttgtggccgcatcactccagtctccacccctgtcttcacagggccacctcctcctcttctgctgtgtcttctctgtgtctctctcaagagggcatttgcagtggcatttggggcccacccagatcatccagcatcatctcatctccagatccttaacttaatcccatctgcaaaagaccctttttctgacccagtaacattcacagattccagagacctgacatggttcccttttgggaccagcacagagttcatgacttgtgcaaagtcacgcagctgatcggtgcctcgaactccttgtccagggctctgccccttgctcctcagagctcccaaaggcttgctcagacctggtggggttgggggaaagagcctaagcctgggttcccatagaggttgccggcatctgcctcctgggcctggacctcccggccggggcatcctcccagctggcctggtcccctgccttttggcatccctggcacccccatgtgttcatctgctgacagtcggtctctttatccaggccgcagctatgatgagaaggtggatgtgttctcctttgggatcgtcctgtgcgaggtaggtccagggttgggtagcagcggtgttgaggcctgggctcctccccactcacccaggctgcaggctcagcatctgcaggggcctcatgccaggaagcctgcccacagcaaggcatgggctggcccccatggggtactgcagtcaggctgcagccaggcccagtgccacctgccctcaaaccacctggatggcacccagatgcccaggctgagggccccctggagtaactgccgggccttgtactggacagatcatcgggcgggtgaacgcagaccctgactacctgccccgcaccatggactttggcctcaacgtgcgaggattcctggaccgctactgccccccaaactgccccccgagcttctaccccatcaccgtgcgctgttgcgatctggaccccgagaagaggtgagtggggtggggccctggcctgggagacggtggggccgattcccgggacagccagacccaccgttccccacccacctgtcacccaggccatcctttgtgaagctggaacactggctggagaccctccgcatgcacctggccggccacctgccactgggcccacagctggagcagctggacagaggtttctgggagacctaccggcgcggcgagagcggactgcctgcccaccctgaggtccccgactgagccagggccactcagctgcccctgtccccacctctggagaatccacccccaccagattcctccgcgggaggtggccctcagctgggacagtggggacccaggcttctcctcagagccaggccctgacttgccttctcccaccccgtggaccgcttcccctgccttctctctgccgtggcccagagccggcccagctgcacacacacaccatgctctcgccctgctgtaacctctgtcttggcagggctgtcccctcttgcttctccttgcatgagctggagggcctgtgtgagttacgcccctttccacacgccgctgccccagcaaccctgttcacgctccacctgtctggtccatagctccctggaggctgggccaggaggcagcctccgaaccatgccccatataacgcttgggtgcgtgggagggcgcacatcagggcagaggccaagttccaggtgtctgtgttcccaggaaccaaatggggagtctggggcccgttttccccccagggggtgtctaggtagcaacaggtatcgaggactctccaaacccccaaagcagagagagggctgatcccatggggcggaggtccccagtggctgagcaaacagccccttctctcgctttgggtcttttttttgtttctttcttaaagccactttagtgagaagcaggtaccaagcctcagggtgaagggggtcccttgagggagcgtggagctgcggtgccctggccggcgatggggaggagccggctccggcagtgagaggataggcacagtggaccgggcaggtgtccaccagcagctcagcccctgcagtcatctcagagccccttcccgggcctctcccccaaggctccctgcccctcctcatgcccctctgtcctctgcgttttttctgtgtaatctattttttaagaagagtttgtattattttttcatacggctgcagcagcagctgccaggggcttgggattttatttttgtggcgggcgggggtgggagggccattttgtcactttgcctcagttgagcatctaggaagtattaaaactgtgaagctttctcagtgcactttgaacctggaaaacaatcccaacaggcccgtgggaccatgacttagggaggtgggacccacccacccccatccaggaaccgtgacgtccaaggaaccaaacccagacgcagaacaataaaataaattccgtactccccacccaggtcctgcgtggcgatgtgtgtctggggccctggggaaatagtcaaggtaagaggagttagtcttccctgaccagaagacaaggatgagtgtggtggctcatgcctgtgatcccagcactctgggaggctgagacaggacgatcccttaagcccaggagttcaagaccagtctggacaacatagtgagatcctgtctctacaaaaatttttttttaattagttgggcagaggccaggtgtggtggctcatgcctgtaatcccagcactttgggaggcagaggcgggtggatcacctgaagttaggagttcaagaccagtctggccaacatggtgaaaactcgtctctactaaaaatacaaaaattagccgggcgtggtggcacatgcctgtagtcctagctacttgggagactgaggcaggagaatcgcttgaacccgaaaggcagaggttgcagtgagccgaggtggtgccattccactccagcctgggaaagagcgagactttgtctccaaaaaaaaaaaaaaaaaaattggcaggccaggcacagtggctcacacctgtaatcccagccctctgggaggccgaggcaggaggatctcctgaggtcaggagtttgagaacagcctgactgacatagtgaaaccccatctctactaacaatacaaaattagccaggtgtgatggcacatgcctgaaatcccagctacttggggggttgaggcaggagaattgcttgaacccaggaggcagaggttgcagtgagccgagatcgcaccattgcaccccagcctgggcaacaagagcgaaactccatctcaaaaaaaaaaaaaaaaattagttgggcatggtggcatgcacctatagtcccagctactcaggaggctgaggtgggaggatcctttgagcccaagagatcaaggctgcagtgagccatgtttgcaccactgcactccagcctgggcaacaaaacaagactctgtctcaaaaaaaaaaaaaaaaaaaaaaaaaggcagggatggaggggggaagagaacacagcccagttttaggtggagctgaggtggtggcccagccaggacaagtgaagagtcttcagaggctgggtttggagggccgtgcatattccggaggtactgctttcatacttaaatgttttcttgtaaaactcacacctgtaatcccagcactttgggaggccaaggtgggcggatcatctgaggtcgggggttcaagaccaacctgaccaacatggagaaaccccgtctactaaaaatacaaaaaattagccaggtgtggtgacacatgcctgtaatcccagctactcgggaggctgaggtaggagaattgcttgaacctgggaggcggaagttgtggtgagctgagatcgtgccattacacttcagcctgggcaacaagagcaaaactccatctcaaacaaaactaaactaaactaaactaaagggttctatcaagaagatgggctgcacgtgatggctcacacctagactcccagcgcttcaggaggccgaggtggaaggatcacttgaggccaggagttcaagatctgcctgggcaacatagcaagaccctgtttttacccaaaaaataaaaaaattacccagatgctgtggtgtgtgcctgtagtaccagctactgagaggctgaggcaggaggaccgcttgagcctgggaggtcaaggctgcagtgagctgtgatcgtgccactgcactccagcctgggtgacacagcaagaccttgtctcaaaaataaataaaacattttaaaaacacactaggtattgcaaatacagggcatttaatttggttttttgtttctgttttgttgttgttttgagacaggtctcactctgtcacccaggctggacagcagtggcacagtcatggctcactgcagcctcaacatcccagggttgagtaatcctcccacctcagcttctcaggtagctgactatagatacacgccactacaccaagttaatttaaagaaaaaaaatgtgagaggccaggcgcagtggctcacgcctgtaatcctgacactttgggaggccgaggcaggcggatcacctgaggtcaggagttcaagaccagcctggccaacatggtgaaaccccatctctactaaaaatacaaaaattagccaggtgtggtggcaggcacctgtaatcccagctactcgggaggctgtgacagaagaatcatttgaacctgggaggcggaggttgcagttagccgagatcacgccattgcactccagcctgggtgacaagagtgaaactgcctctcaaaaaaaaagtttagaggcaaggtctcactttcttctctaggctggcctcaaactcctgggctcaagcagtctcctgggcctcccaaagtgctgggattacaggcatgagactccatgctcagccacatttaatacgagaatttttttgttttgtttttttggtttttttttttgagatggagtctcgcactgtcacccaggctagagctcagtggcacgatctccgctcactgtaagctctgccttccgggttcacaccattctcctgcctcagcctcccgagtagctgggactacaggcgcccgccaccatgcccggctaatttttttctatttttagtagagacggggtttcaccatgtgaaccaggatagtctcgatctcctgacctcatgatccacccatctcggcttcccaaagtgctgggattacaggcgtgagccactacacccagccaatacaaggaaatttttacatggctgttgaaagacagaggaaaggccaaaagtggacacttaggtaacccagagatgattgcaggagagagctaccaccctcggtggggggattgaaggggagaggtgatcacttgagttatctaatgttgcatagggaagtcacctctcaacttggttgcttaaagtaacagggatcactcattgctcatgatttctggttttttttttttttttttgagacggagtctcgctctgtcgcccaggctggagtgcagtggcacaatcttggctcactgcaagccattctcctgcctcagcctcccaagtagctaggactacaggcgcccgccaccacacctggctaattttttgtatttttagtagatacagggtttcaccgtgttagccaggatggtctcgaactcctgacctcatgatccgcccaccttggcctcccaaagtgttgagattacaggcgtgagccaccgcgcccagcttgatttctgtttgtcaagaatttgggagtcattttggtggggaatttgtatgtgggggtctctcctggggctgcagtcctttgagggtgtaactggggctgaagttcccttccaagaaccctcatatgtggctcactcacatggcgggcaatttggtgctagcagttgattctacagagaaaaacgggcttgagccaatgtgctacaagccaatactatgacaccaggcttttggttttttgtttttatgatttatgtatgtattttttttttttttgagacagaatctcattctatcaccctggctgcagtgcagtggcacaatctcggctcactgcaagctccacctcccaggttaaagggattctcgtgcctcagcctccctagtagctgggactacaggcgtgcaccaccatgcctggctaatttttgtacctttagtagagacagggtttcactatgttggccagactggtctcaaactcccgacctcaagtgatccacctgcctcagcctctcaaagtgctgggattacaggtgcaggcaaccatgactggccgttttttttgtttttaaagttggggtctcactatgttgtcccggctggtcttgaactccaaggctcaagtgatcctcctgcctcgacctcccaaagtgctaggcttacagtcatgagccaccatgcccagctgacaccaggcttttcagaaaagaatagctttattgcaagtcaaccagtaaggagacagaagtctagctcaaatctgtccccctgtgctggctttaaggcggtaattttattaggaaaggtttagggggtggattctgatattaggtgattggcggaagcaaaggggaggcctggaaagtgctcaggcatgcgcagttccctcttcatgttatctcatggggggcatgtgcaaattccgggggtggttagtatgtaacatgcactggaaattcgggctgtgacatcagcaagcttgttctgtgcaaactgcagttggccatattggtcccaatctatttcagccagcgtgttaatcccaccagcagatgaatttcagcatttctgcaagtcgtttctttttttatctgccatcctgcaaactggaaaatttctgctagtcactggtttctttaactctttggggcacggtttcactggtaggaggcctcagtttatcccatgggcctctccatagggctacttcagagtccccacagcagcctccagaatgaatatcccaagaaagaaaagaaaagtgccactaggggccgggtgtggtggctcacgcctgtaatcccagcactttggaagtctgaggcaggaggatcccttgagcccagaagttcaagccagcctgggcaatgtagggagacgccatctctactaaaaaaaaaaaaaaaaaagaagaagaatttaggccgggcgtggtggctcacgcctgtaatcccagcactttgggaggctgaggcaggcggatcacgaggtcaggagtttgagaccagcctggccaagatggtgaaaccctgtctctactaaaaatacaaaaattagccaggcacggtggcgggcgcctgtaatcccagctactcaggaggctgaggcaggagaattgcttcaacctgggaggcggaggttgcagtgagccaagatcgtgccactgtactccagcctgggtgacaaagcaagactccatctcaaaaaaaaaaaaaaaaaaaaaagaaagaaattagctgggtatggtggcacacacctgtggtcccagctatttgggaggccaaggcaggaggattggttgagcccagaaggtcaaggctacaatgagccagattgtaccattgcactccagcctgggcaacagagtaagacgccatctcaaaaaaagaaaagaggccaggtgcagtggatcacacctgtaatcccaacattgtgggaggccaagacaggatcccttgaggccaggagtttgagaccagcctggccaacttggcaaaaccctgtctttaccaaaaaatacaaaaataagctgggcgtggtggcccactcctgtaatcccacctacttgggaggctgaggcgggagaatcacttgaacctgggaggcagaggttacagtgagccgagactgcgctattgcactccagcctgagcgacagagcgagactccgtctcaaaaaaaaagaaaaaaattaccacaagcgcagctctgggtgcattgcttatgaattaactcctgctttgcaaggagcagctctggttcaataaaagattgctgtgtaacaccaccagcttacccttgaattctttgagtgaaaccaaaaaccctcccaggctaatccacaatttgggggcttagctatatgcctgtatcggtactaattgtcttcattattgtagctttgttgtaacttttgaagttgagaaatgtgagccttccaactttgtttttctttttctagactgttttggctatttgaagtcccttgaatttccacaagaattttttttttttaagtgccaagatctcagctcactgcaacctctgcctcccaggttcaagcaattctcccaacttagcctcccaagtagctgggactagaggcatgcaccaccatgctaatttttgtgtttttagtagagatggggtttcaccatgttgtccaggctggtctcaaactccttgcctcaagtgatccacccaccntcaggctcccaaagtgctgggattatagatgtgagccaccatgcccagcctccacatgaatttttaggatgagcttgtcaatttctgaaaacaagccagctggggatttgtttgtttagacacaagatgtcattctgtcacccagactggagtgcagtggcacaactcctagctcactgcagcctggaacccctaggctcaagtgatcctctcatctcagcctcctgagtaccagggaatacagacacatgccaccatgccctgctaattttttaatttttgtagcgacatggtctcaaactcctgcccaaccaggctgatctctttttttttttgagatggactctcactctgtcgcccaggctggagtgcagtggcgcaacctcgcctcactgcaacctctgcctcctgggttcaagcgattctcctccctcagcctcccgagtagctggtgggcatgggcgcctgccaccatgcccggctaatttttcatatttttagtagagatggggtttcaccatgttggccaggctggtctcgaactcctggcctcaagtgatcctcctgcctcagcctcccacagcactggaattacaggcatgagtcactgttcccggtccagctgaggattttgacagggattggtttatgtctatatgtgaactggggagtattggaatattgacatcgtaataatattaagtctctcaggccaggcatggtggctcacacctgtaatcccagcactttgggagctcgaggcaggtggatcaattgaggtcaggagttcaagaccagcctggccaacatggcgaaaccccgtctctgctaaaaatacaaaaattagccaggtgtggtggtgtgtgcctgtagttccagctacttgggaggccgaggcaagaggatcacttgaacctggtaggcagaggtggcagtgagcctagattgcaccactgcactccagcctgggtgaaagagcaaggctctgtctcaaaaaaaaaaaaaaaaaaaggaagaaggaggaggaggagggggagaaggagaaggggaaggaaggaggaaggaggaagaagaagaaatacctgaaactgggtaattttttttttgagaaaggatcttgctctgtttcccaggctggagtgcagtggcacaatcttggctcactgcaacaaccacctcctgggttcaagcgattctcatgcctcagcctcctgagtagctggaattgagatgtgcacaccacgcccagctaatttttatatttttagtagagacgcggtttcatcatgttggccaggctggtctcaaacccctgacctcaggtgatcaacccacctcagcctcccaagtgccgcaattacaggcgtgtgagccactgcgcccggcttcaaaagtaccatttaatggctgacaattacttgccctgaaatgtgaaacaaaattcatttactacattgtttttaagatagcacctgaccttcagtaatcggaaataatgatttcctataaataaaaaccactgcagtgcttttagtgattagtgtacatagagtttttcccctggctgtgacatcatattattaaaagcattaagcacctggaattcatgctgtagttgatttataagttacataatgtacaaagctccttttataagaatgttttgtggtcacaattacttcaaaacccaattacattcaaataatctaatagctcatgctttggcaattatagaagtgtgattttgacacatagaaattttatgaggttagcaaataaaaaacgctataaaagaggtgaacaatggttcctctgtttaaatttagagtgcagcaatatttaggtaatatttttcagttaatataatcagcctagaatatagcattgtaaatcatacagtgttttagaaatacggatctaaagaaggtaataccttttccaaattataaaattttggcaaatcaatacagtactttgtaatacaataaaactatgtttttgttggagtcatatatgactttaatcataatttccactgcaaaagcaccacctaaatactaaatcaattatgaaggcttttcatgacagtttataacagagtcagttgttttacacaaattaatatggcttttaaaaaattatataatttcttggccgggcacactggctcatgactgtaatcccagcactttgtggggctgagaccagcaaattgctgagctcaggagtttgagaccagcatggacaacatggcaagaccctgtctctaaaaataaaaatgttttaaaagctgcagagttaacacagtagagaaatcatgtgcatataaaatatgctacgtttccttctgggattggtccaaaactgctcacaaaaaacttcaaaactctactttaagaagttccaggccgggcacggtggctcacgcctgtaatcccagcactttgggaggccgaggcaggcgaatcacaaggtcaggagttcgagaccagcctggccaacatggtgaaaccccgtctctactaaaaatacaataaaaattagctcagcatagaggcgtgcgcctgtaatcccaggtactcgggaggctgaggcaggagagtcacttgaacctgggaggcggaggttgcagtaagccaagatcgcgctactgcactccagcccaggcgacagagcgagactctgtctcaggaaaaaaaaaaaaaaaagaagctccaataccaaattaaagtcgtttttcaagtattggtaaatcttccataaacagggcaacacttaatgatcaatagatcattcgactagggcttatgctggtggatctcttttgtttaaagctccaaactcagctgggcttggtgcttcacgcctgtaatcccagcactttaggaggccaaggcaggtggatcacctgaggtcagaagttcgagaccagcctggccaacatagtgaaacccccgtctgtactaaaaatacaaaaattagacaggcgtggtggcacagaaaaaaaaagtcaattatcctatttggggatttaaattatactattttttatttttttgagacagagtttcactctgtcacccagtctggagtgcagtggtacaatcttagctcactgcaacctccacctcctgagttcaagcgattctcctgcctcagcctcccgagtagctaggattacaggcaccagccaccacctggctaatttttgtattttttgtagagacggggtttcaccatgttggccaggctggtctcaaactcctggcctcaagtgatctgcctgcttcggcctcccaaagtactgggattacaggagtgagccaccacaccacctcgaccagccttttcctctataaatttaaaaaaaaaaaaaggccaggtgcggaggttcatgcccgtaatcccagcactttgggacggatcactgtaattccagctactcaggagcctgaggcaggaggatcacttgaacccaggagtcggaggttgcagtgaaccaagattgctccactgcactccagcctgggcaacagagcaagactccagctcaaaaacaaagaaaaaagaaaaaggccaggtaaggtgacttacatctgtaatcccagtactttgggaagctgaggcaggaggattgcttgagcccaggagttcaaggctacagtaagctagtaagctatgattgcaccactgtgctgcagcctgggtgacagagccagaccctgtctcatgaaaaaaaaaaaaaaaaaaaaaagaaaagaaaagaaaggaagaaaagtgccaaattgtttctcaaagcagttctagtgatttatggtctcacttgcagtatatcagattcttcgttgtccagatctttttaattttttacagactaacaggtacaatacagtatcttactgtggtactaatttgagtttccctgatttcctctatagttgagcatctttacgtgtttagtggccactcatgtttcttcagatcttctgcctgccttcctccctcccttcctcccttcctccctcccttcctcccttcctcccttcctccttcccgccctcccttccttttttttttttttttttttttttttgagacggagtcttgctctgtcgcccaggctggagtgcagtggcgggacctcagctcactacaagctccacctcccaagttaaatcgattatccggcctcagcctcctgagtagctgggactacaggcgcccgccaccacgcccagctaattttttgtattttcagtagagacagggtttcaccgtgttagccaggatggtctcgatctcctgacctcatgatccgcccacctcggcctcccaaagtgctgggattacaggcgtgagcgtgagccaccgcgcccggccccttccttctttttttttaaaaagagagacgggtgctccctttggcagcagatatactaaaaaagagagacgggaaggccaggcacagtggctcacacctgtaatcccagcactttgagaggccgaggctggtggatcacctgaggtcagaagttcgagaccagcctggccaacatggtgaaaccccatctctactaaaaatacaaaattagacgggtgtggtagtgcatgcctgtaatcccagctactcaggaggctgaggcaggagaatcaatgaacccgggaggcgaaagttgcagagagatgagattgtgccattgcattccagcctgggcaacaagagcgaaactacgtctcaaaaaaaaaaatgcataagttttgtgaacaaatatttcataattttctctactgaggtcttagactttttttttttacattttacagaatacttcatatcttctttgtctctcccctttttttttgcaatcaccttgaaaacattaagattcagatggtcctctaattttcctgtctcctgttatcctttgtggtgtgtgtgtgtgtgtgtgtgtgtgtgtgtgtgtgtgtgtgtttgagacagagtctcactctgctggacaggctgcagtagagtgatggcatctcggctcgctgcaacctccgcctcctgggctcaagtgattctcctgcttcagcctcccgagtagctgggattatcggcatgtgccaccacccctagctaatttttgtatttttagtagagacggggtttcaccatgttggccaggctggtttcaaactcttgacctcaagtgatctgcccacctcagcctcccaaactgctgggattacagacgtgagccactgcgcccagcctgttatcctttgtttttggaaggaagcatttgaaaaagagtgactctatcttgaataggggctgggtaagatgaggctgagacctgctgggctgcattcccagtaggtgagacattcttattcacaggatgagacagaaggttggcaggactggtatcacaagatacgggtcacaaagaccctgctgataaaacaggatgctgacagggcacagtggctcactcctgtaatcccagcattctgggaggctgaggcgggcaaatcacttgatgccaggagatcaagaccagcctggccaacatggtgaaaccctgtctctaccaaaaatacaaaaattacccagacatggtggcaggcacctgtactcccagctactcaggaggctgaggcaagagaattgcttgaactcgggaggcagaagttgcagtgagccaggatcgcaccactgcactccagacggggcaacagatcgagactccatcccaaaaaaaaaaaaaaaaaagaaaacaaaaacaggacgcagtaaagaagccagccccaaaacccaccaacggtgatgaaactgacctctggtcatcctcactgctcattatacactaattataatacattaccatgctaaaagacactcccaccaggactatgacagtttacaagtgccacggcaacacccggaagttaccctatatggtctaaaagaaggaagaaccctcagttctgggaaatccctgccctttcctggaaaactcatgaataacccatacttcgtttagcatagaatgaagaaataactgtaagtatactcagtcaagcagcccatgccactgctctgcctatggaggagtcattctttattcctttcctattctttttttttttttctttttcgagacagagtcccactctgttgcccaggctggagtgcagtggcacgatcttgactcactgcaacctctgcctcccaggttcaagcaattctcctgcctcagccttccgagtagctggaattacaggtatgcaccaccacacccagctaatttttgtatttttaatagagatggagtttcaccaggttggccaggctggtctcgacctcctgacctcaggtgatccacttgcctcagcctcccaaagtgctggaattacagacgtgagccactgcgcccggctattcctttattttcctgataagcttgctttcaggtcgggtgtgatggttcacatgtgtaatcccagcactttgggaggcctaagtggcaggactgcttgagcccagaaattcaagaccaaccagcgccacatagtgagtgagaccatatttctattaaaaaaaaaacgaaaacaaaaaaaacttggccaacatgacgaaaacctgcctctactaaaaaaatacaaaaattagccaggaatggtaacacatgcctgtaatcccagctactcaggaggctgaggcaggacagtcacttgaacctgggaggcagagcttgcaatgagctgagatcaagccactgcactcgagcctgggtgacagagcgagactctgtctaaaaaaaaaatacaaaataaaaaaaagaacttatttatgtaaccaaataccacctgttcacctgttccccaaaaacctgttgaaacaaaaataaataaataaatataaagaaataatttttatttatttattttattatattttgagacgaagtttcactcttgtcgcccaggctggagtgcaatggcgtggtctcagctcactgcaacctctgcctcctgggttcaagcgattctcctgcctcagcctcccgagtagctgggactacaggcacctgccaccacgcctggttaattttgtattttagtagagacagggtttcaccatgttggtcaggctggtctccagctcctgacctcaggtgatccacccgccttggcctcccaaagtgctggaattacaggtgtgagccaccacacccagcctttaattttattttctatagagaggagtcccataatattacccaagctggtctcaaactcttggcctcaataaatcctcccacctcagcctcctgagtagctaggactacaggagtgcaccaccatgcccagctaatgtttttatgttttgtagagatgagggtctcattatgttgcccaggctcgtcttgaactcctgggctcaagtgatccatcctcctgcctcagcttcccaaagtgctgggattacaggtgtgagcaaacatgcccagcctaatattattaatacatcgtagctgtccatatttatagggtgcatgtgaaattttgttacgtgcatagaagtgcgattgtaggaaccaaggaaaaaacttctgcttcaccttctcaaggtttgctgataaatcagctcacaaaaggcagattaattggaaaaagggggatacaaattgcattcacacgtatctggggagaaccacaccacagcgtgattacccaccaccccaaaggcattcagacgcttatataccatcttcttttttttttttaagtagagactgggttttcgccatgttgccaggctggtcttgaactcctgcactcaagtgatcttcccctcttggcctcccaaagtggcgctgggattaccgccatgagccactgtgcctggcactatatacatatatatagatatgtatacatatctatatctatagatatctatatatctatagatatctatatatctatatctatatgtatacatatctatatatatagacatgtgtatatatatctatagatatctatatctatagatatagatatactatcttgcagatacagaaagaataggggtttggatcctggtaaaacaggttatggcagggggaagaaagaggaattctattgaggggacataaaagattactgggggctaggcagagtggctcatgcctgtaatcctagcactttgggaggccaaggtgggcagatcacttgaggtcaggagttcgagaccagcctggccaacatggcgaaaccctgtctctactcaaaacacaaaaattagccagtcatggtggcacatagctgaaatcccagctactcaggaggctgaggcaggagaatcacttgaacccaggaggaggaagttgcagtgagctgagatggcatcactgcactccagcctgggtgacagagtgagactccatctcaataaaaataaaaataaaaataaagcattgctggggagaatgaatggatttaggaacagagattaacttgtacataattctctttggaatttcaatgagcctgagggagacattatcttgcggaagagtctgttcaggtgtggttccattcttgattttatagaaaggagaagaaaaaaaaacaattgttttccttgttgaggggggatgtctggatcttaggcagagaaagtaacttcaacttcatcctgtgctgtgggagaaaagacggtcttttagacacagtttatcgttactgctgcttttcctgtgtttggcctataccttcctgcctctttgaatgatgggtagaccagagtttgtgagtcaatttgtattagctgtgtgatctggagcaagctactgttgtcagaggagtttgaaccacagtgattccatcttgaatagggggtgggtaaaatgaggctgagacctgctgatattgacaggaggcagccaattgcctaggccaataggggcgggtccgcggtgaaaccccacctccaacccgaagacggtttaaagcctgaaactgaaggtacaagtttaaaccttagaccggattgagagcttaccttcctgtttgtcgcgctttcctctgattgatccccacccttcgcctattttacatatacccaccctttcctaattggttttctactctttctttttttttttgacagagtctcgctctgtcacccaggctggagtgcagtggtgcaatctcggctcactgcaatctccaccccccgggttcatgtcattctcctgcctcagcctccccagtagctgggactacaggcgcctgctaccacgcccggctaattttttgtattttttagtagagatgaggtttcaccgtgttagccaggatggcctcaatctcctgaccttgtgatctgcccgccttggcctcccaaagtgctggcattacaggcatgagccaccgtgcccggcggttttctactctttcatgaccacctttgagtagtgtctttgctttaactcacctcattagcataaactccagtgtgatcaaaaggactcattataaataacaaaagacattcctccaactcctggacttaagggatccctcaagcaagcctcagcctcctgaatagctgggactactcctttttgcatactcacaagccaatcagcacacactccccaccctgtgcctataaaggctccagactcagtcagcaggggaaaagacgacctgacttcggggaaggcaacctgcacttcccatcccctctccagctcccctctccactgagagtcgctttcattgctcaataaaattctccaccttcatcatccttcaatcgtccgtgtaacttcattcttcctggatgctggacaagagcttgggacccagtgagtgaggatacccagaaaggctgtcacactgggcctttgccctcgcctgtgaagggcagctgtccccatgtgatgaggcaaggggccagctgatctgctgacatgtcaccatctgtggacagcagaactaaaggagcactgtaataacaccctctctgcagcttcggggacacgggcaccctcacctaggtgctgctgctttcccctcaaggtgacgtgcctgctctggccatgggccctgcatacagcttgctcctgtgttggtgcctggagaagccagctggccagatcccacacttagtcacttgtgtgctccctcctgcaaggggttgagcacagggggctgagtagatggggcatcccttccatgagtccagcgaaggtgcctagaaaaaccctgcatcaccactgagctactttcccaggaggtgaggcattcccagtcacaggatgacacaggagggtggcacaagacataggtgacaaaaaaccttgctgataaaacaggttgcagcaaagaagccggccaaaacccaccaaaaccaaggtggcgatgaaagtgacctctggtaggctgggtgcggtggctcaacgcctataatcccagcactttgggaggcccaggcgggcggatcacctgaggccaggagtttgagaccagcctgaccaacatggagaaactccgtctctactaaaaatacaaaaaattagctgggcgtggtggcacatgcctgtaatcccagctactcaggaggctgaggcaggagaattgcttgaacccgggaggcggaggttgcagtgagccaagatcgtgccattgcattctagcctggatgacaagagtgaaactccatctcaaaaaatagaaagaaagtgacctctggtcgtcctcactgctcattatgtgctaattataatatattagcatgctaaagacactcccatcagtgccatgacagtttagaaatgccgtggcaacatcaggaagttaccctatattgtctaaaaaggggaggaaccggccgggcgcagtggctcatgcctgtaatcccagcactttgggaggccaaggcaggtggattgcaaggtcaagagttcaagaccagcctggccaagatgtgaaaccctgtctctactaaaaatacaaaaattagctgggcatggtggcgggcgcctgtaatcccagctactccagaggctgaggcaggagaattgcttggacccaggaggcagaggtagcagtgagctgagattgcaccattgcactccagcctgggtggcagagcaagactctgtctcaaaaaaaagtggggaggaaccctcagttccaggaattgcccgtgcctttcccagaaaattcatgaataatccacccttgttgggcatgtaatcaagagataactataaaaaatatccagccagcaaccttaggggatgctctgcctatggagtagacattctttgttcctttactttctttttttttttttttttttgtgagatggagtctcactttgtcatccaggctggagtgcagtggtgcaatcttggctcactgcaacctctacctccccagctcaagcgattctcctgcctcagcctcccaagtagctgggattacaggcgtatgtcaccacgcccagctagtttttgtattttttagtggagacagggtttcaccatgttggctagtctggtcttgaactcccaatctcaaatgatccgcccaccttggcctatcaaagtgctgggattacaggtgtgagccactgtgcccagcctattcctttactttcttaatatacttgcttccactttactccatggactcgcctggaattgtttcttgcgtgagattcaagaactctctcttggctgggtgtggtggctcacgcctgtaatcccagcactttgggaggccgaggcaggtggatcatgaggtcaggagtttgagaccagcctgaccaacatggggaaaccctgtctctactaaaaatacaagaaaattagccgggcgtggtggcacgtgcctgtaatcccagctactcaggaggctgaggcaggagaatcacttgaacccgggaggcagagggcgccactgcagtccagcttgggcaatagagtgagaccctgtctcaaaaaaaaaaaaaaaaaaaaaaagattaaaaaagaaccctctcttggggtcttgattgggactcctttccagtaacagtgtgaaagaaaaataaaatcaccagaccccaaactcactatgtcaaagggcaaaaagctaagcttaggaactgagtcatacaggaaactgcattttcttttgttcctaaccagatagctgcaagattgaatgccacgtatctccacaggtggcttccctcaccctgaccatgtaaattcagcttaccttcacaggtacaggacaaataaaaaaatagaaatctggccaggcatgggggctcacacctgtaattccaacactttgggaggctggggtgagagaattgctggagctcaggggttggagatcaccctgggcaacccagtgagaggctgtctctacggaaaagattttaaattagcctggtgtggtagtgcacacctgtagtaccagctactcaggaggctgcattgggagtattgcttaagctcaggaggtcgaggctctagtgaggtgtgatcgcaccgctgcactccaacctgagcaacagaataagaccctgtctcaaaaaaaaaaaaaaaaaaaaaaaatcatggccgggcgtggtggctcacggctgtaatcccaacactttgagaggccaagggatcacctgaggtcacgagttcgtgaccagcctgaccaacatggtgaaaccccgtctctactatagacaaaaaattagacaggcatggtggcacatgcctgtaattccagctacttgggaagctgaggcaagagaatcacttgagctgaggcggcagaggttgcagtgagccaagattgcaccattgcattccagcctgggccacaagagtgaaactctgtctcaaaaaaataacaataatttttttttttttttgaggtggagtcttgccctgtcacccaggctggaatgcagtggcacgaccttggctcactgcaagctccgcctcccgggttcacgccattctcctgccccagcctcccgagtagctgggactacaggcgcctgccaccacgcccggctaaatgttttgtatttttagtagagacagggtttcaccatgttagccaggatggtctcaatctcctgatctcatcatccgtccgcctaggcctcccaaagtgctgggattacaggtgtgagccaccgcgtccggccaatatttttcttttttttaaatcatacttccaggtccnggtgcggtggctcacacctgtaatcccagcnctttaggaggctgaggtaggcagatcacaaggtcaggagttcgagaccagcctggctaacatggtgaaaccctgtctgtactaaaaactacaaaaattagctgggcgtggtggcacacacctgtaatgctagctactcaggaggctgaggcaggagaattgcttgagcccgggaggcggaggttgcagtgagctgagatcacactactgcactcctgcctgggggacaaagtgagactctgtctcagaaaaaaataataataataaatcatacttacccccaccctaagacaaaagcataattgacttcttcctctactctgtgtttactttatcttgtgtaaaatacagatatatttagcacaagatgaattcataatagactgttcctttttccctcctttcacatgtgttaaaagaaaaacttcagccaaattaaatttaagggagtttaattgagcaatgaacaatttgtgaatcgggcagcccccagaatcacagccgattcagacagactccagtgcagccatgtgatggaagaagatttatagacaaagggaaatgacatacagaagtcagtgaggtacaaaaacaactggattggctacaggtcggcatttgccttatttgaatatggctcaaacagttggctacatctgactggccaaaactcagtgattggcacagggtgtgggctatggccgagttatacctccgcttgttacagttcacaatgtacagaaaaacctttaggccaaattgaaatatgtaaagaagcagctttaggctaaacttgattaacgtatgtaagatgtggattcagtgatcatgaatgaaagcctcacagaaagtgaccacttatttcactaccttccctagtgtttttgttgttgttgtttgttttgttttgttttgttttttgagatggagtctcactatatcatccaggctggagtgcagtgaagcgatcttggctcactgcaagctccgcctcccgggttcacgccattctcctgcctcagcctcctgagtagctgggactacaggcgtccgtgaccacgcccggctaatttttttgtatttttagtacagacggggtttcactccgtgttagccaggatggtctcgatctcctgacctcgtgatctgcccacctcggcctcccaatgtgctgggattacaggcgtgagccaccgcacccggccaccttccctcctttttcatttctttcctccttcccctcctgcccactctttctcctttaaatattgaagtcctcaaaactctctggaaaagccatgggtcacagatttttctttggcttgggtctctttttcctgggcatgtcctcaaccttagcaaaataaacctctaaattcattgagtcccctcctctcccctcccctcctcttcccttcccttcccttcccctttctttgagacagggtctcactctgtcatccaggccagggtacagtggtgcaaatgatagggacaagaggcagggaaattctgggcagaagagggtgggtccccagagagggcattgccctcaagctgaaaaacctggaactgcagcccaaagtgagaactgacatccctgttttttgttttttggttttttttgagatggagtctccccttctgtcacccaggctggagtacaatggtgcgattttggctcactgcaacctccacctcccgggttcaagtgattctcctgcctcagcctcccgagtaatccgagccgggattacaggcacacaccaccacacccggctaatttttgtatttttattagagaaggggtttcactatcttggccaggctggtgttgaactcctgatttcgtgatccaccctccttgcctcccaaagtgctgggattacaggcatgagccaccgtgcccagccaacatcgctgctttcctgcttgaatgttgccttttccaaaaccacccttgacctgccctgcccccaatcctgtgcccataaaaaccccaggcccagctagcagagagaggagaagcagctggacgtcaaagaccatggttgaacattggagagaagtggcttgacttcagagggacagtttgctggagtagctttggaggagtatggccagggacagctggacttcagagaaagattaccttcctgctctgtccccttttcagctccccttcccgcttagagccactttcatcagcaataaagtctcctgcatttaccatcttcaattcatttgtgtgacctaattcctcctggacactgaaaaagaacttgggtgccacgagtgtggatgcaaaaggctgtcacaccgatcctccactaagctgttaacacttaagccattcacagacagcagagctaaaagagtactctaacactgcctctggggcttcaatagtctccggcaccctccgctagacactatcatggggctggtatggagatggctcttgctggcgcctaaaaactctcgccccgtctcctgcacctgctcacctgtgctccctctcctgtgaggggtggagtagtgagtgagtggagttcacccctaccagcaccaaagcagctggctagttcttaggcaacatcctgcttcacaatcacagctcactgcaacctcccacctcccaggctcaagtgttcctcctgcctcagcctcccaaagtgctgggattgcaggcatgagccaccatgcccagccagtcattttctttggtttacactactttacctccctgagccttattttccccaaatgagaggtagaaactcctctgttgggaggattaaatgagatatgtctcaaatttttgttgaaaactggacattttattttatcttattttacttatttttgagacaaggtctcactcactctgtcactcaggctagagtgcagtggtgcaatcttggctccctgaaagcttaacctcctgggctcaagtgatcctcctgtctcagcctcctgagcagctgggactataggctccagccaccacacttggctaatttatttttatttttattttttgtagagacagagtctcactatgttgcctaggatggtctggaactcctgggctcaagtggttctcctgactcggccccacaaagtgctggcattacaggtgtgagccatggcacccagcaaaaactggacattttaaatcatgtattgtaattctaaattctgatgtcctggtggtagctgttgtagattttgacattgttgttgtttgctggttgtctgtttggttgtttaataacttgaagccactaaaggaagcctctgttttgttttgtgattcttgcttttattttcaagactggcttcctaggggtccatctctgaatcagcattgcttagtgcccagccactgtttggtcagaaggtttccgtaaacaccttgacacactaagccttccttggtcaagaggacctgtgaggggggttgggacacaggttaaattatttcctcaagggcgttgacatttctttcttttttcttttttttttgagatggagtctgtctctatcactcaggctggagtgcagtagcatgatcttggctcactgcaacctctacctcccaggttcaagcgattctcctgcctcagcctcccgagtagctgggattacaggcgcccgccaccacacccaactaatttttgtattttagtagagatggggtttcaccaccatgttggccaggctggtctggaaccctcgacttcaagtgatccacctgcctcagcctcccagagtttgggattacaggtgtgagccaccacacctggcctctttttttcttttcttttctttttttttttttttgagatggagtttcgctcttgttgcccaggctggagggcaatggcatgatctcggctcactgcaacctctggctcccgggtacgagcaattctcctgcctcagcctcccaagtagctgggactatagacatgcgccacacgcctaattgtttgtatttttagtagagatggggtttcaccatgttgaccaggcaggtctcgaactcctgacctcaggagatctgctcacctcagcctcccacaggtatgagccaccatgctcagctttattttgttttattttattttattttattttattttattttatttgagacagagtctcgctctgtcgcccaggctggagtccagtggagctatctcggctcactgcaacctctgcctctcaggttcaagcaattctcatgtctcagtctctcaagtagctgggattacaggtgtgtgccaccacgcccagataatttttttattattagttttagtagagtcggggttttgccatgttgcccagcctggtcttgtactcctgacctcaagatatccacccgcctcggcctcccaaagtgctgggattataggcatgagccaccatacccggcctctttttttaatttttatggatatgtggtaggtatatgtatttatgaggtacatgagatattttgatacaggcatacaatgcatcataatcacatcagagtaaatggggtatccatcatctcaaacatttatcatttctttgttacaaacattccaattatgctcttctagttatttttaattgcataataaattattgttgactgcccaggcacagtggctcacgcctgtaatcccagcactttgggaggccgaggcaggtggattgcctgaagtcaggagttcaagaccagcctgaacaacatggagaaatcccgtctctactaaaaatacaaaattagccaggtgcagtggcgcatgcctgtaatcccagctacttgggaggatgaggtaggagaatctcttgaacccaggagacagaggttgcggtgagccgagatcgcaccattgcattccagcctgggcgacattttgtatgacattgcttaaccataaactcttcatttgcttttgtttttcttttctttttttttgagacggagtctcgctctgttgcccacgggttccaccgtgttagccaggatggtctcgatctcttgaccttgtgatccgccagcctcggcctcccaaagtgctgggattacaggtatgagccaccacccacggcctgtttttcattttattgtctgagaatcccttgcagcctgggggcatagattcggggaattctcccactcctcactttcttttcttccttaggaatatcttggccaggtgcagtggcttacacctgaaatcccagaactttggcaagctaaggcaggaggaatgcttgaggtcaggagtttgagacccgcctggggaacaaagtgagatcctatctctatttaaaaaataagaataatggccagtcttgggggatcactcctgtaatcccagaactttggaaggcagaggtgggaggatcacttgaacccacaaggttgaggctgcagtgagacgagattgttctgccacactccagcctgggtggcagagtgagaccctgtctcaaaacaacaacaacaattaaaaaaaaaaaaaaaagaatatctttatttctgacttgggggcttgcaggtggctgaactatttctgtggaatgatctggaaacccacacatatgtgaagccaggtcagggctttgaattctttgaattatcaggctgaggcaggcaagtttgtcactcctcaaggtagatgaactcatgatctccagtctaccctttcacagactgtgtggcttttcaaggatcacatttcaaagggatctcaggcacaatttccatttgaactgggtccagatacaatttccatttgaactggacctcaatgtagtagtctctcattgtttgaagtatcactcggagttctttgtctcacaaccatgaaaattaaggagcatgggcaccaaggatgaggctggagtgaaagtttaataagctaaagaagaaagctctctgccgtggagagggggtctgaaagaggccattattatttatttatttatttgagacagagtttcactcttgttgcccaggctggagtgcaatggcatgatctcggctcaccacaacctccacctcccgggttcaagtgattctcctgcctcagcctcctgagtagctgggattataggcatgcaccaccacacccagttaattttgtattttcagtagagacggggtttctccatgttggtcaggctagtgtcgaactctcctcaggagatccacccacctcggcctcccaaagtactgggattacaggcatgagccaccgtgcccagccaaaagaggccatttttacagttgaatgcaaaagcttttataagaaaccaatgagggctgggcatttcatttacataaggtgtgaatttctcctatctccaccccatccttctaatgcgcatgggggcccttagcttaatttactccatattgctttaatttttttttaaattagccatattttgcaaaaaaaaaaaaaaaagtgcatacatcctataatgtcctattttatctagtaactctagcctagggcctcatctcctgacctgacacgggcattaaagcaagctcctggccactgaccctcagtgaccattcagagcagagacgtgatcaattcattgcctatcatctgtggcgtttagtttcctctttgtttctggattcctaggatttccctttctttcatgggagctcaactgggcattgaaaataattttttttaattgtattaaacatttcaaagagtttcaataggaaggttttctggttctccctgcctggcaaatcagaaacatatggagaggtttttcagtacatgtttcatagcccttctttctctgccaaaattctgatatagccccctggagaacaacaaaatctggatggagtttgggccagaattggggtggggtatagattggctcctatgtgcttggaaaataactcacaacccactttcccagtgttgattcaattctttgtgtcttagacattttttctcattttgttttgtttgagacagggtctcgctctgtcacccaggctggagtacagtggcacaatcttagctcactgtagtcttggcacccccgggctcaagccatcctcctgcctcagcctcccacatagctgggactacagatgcgcaccaccatgcccggctaagtcttttttttttttttttttttttttgagacggagtctcgctctgtcacccaggctggagtgcagtggcgtgatctcggctcactgcaagctccgcctcccaggttcacgccattctcctgcctcagcctccagagtagctgctgggactacaggtgcccactaccacacccgactaattttttgtatttttagtagagatggggtttcaccatgttggccaggatggtctcgatctcttgacctcgtgatccacccgcctcggcctcccaaagtgctgggattacaggcgtgagccaccacgcccggccaattttttgtatttttagtacagacagggtttcaccatgttagccaggttggtcttgatctcccgaccttgtgatccgcccgtcttggcctcccaaagtgctgggattacaggtgtgagccagcacgcccggccctggctaagtcttagacttttgtttccccaacgtctaacacagtttcatggcccatagaagatactgagtgcatgaatgaggaatgcacgaatgactcttggcagacacttcgtggtcagcataaaagagggagaaagctggctgggcaaagtggctcacacctgcaatcccagcactttgggaggccgaggccagtggatc

SEQ ID NO: 1248 - DNA, 5190 bp, Homo sapiens
  misc_feature (1)..(5190): n=a,t,g or c
gcctgtcctactgccgccggcgccgcggccgtcatggggttcctgaaactgattgagattgagaactttaagtcgtacaagggtcgacagattatcggaccatttcagaggttcaccgccatcattggacccaatggctctggtaagtcaaatctcatggatgccatcagctttgtgctaggtgaaaaaaccagcaacctgcgggtaaagaccctgcgggacctgatccatggagctcctgtgggcaagccagctgccaaccgggcctttgtcagcatggtctactctgaggagggtgctgaggaccgtacctttgcccgtgtcattgtaggaggttcttctgagtacaagatcaacaacaaagtggtccaactacatgagtacagtgaggaattagagaagttgggcattctcatcaaagctcgtaacttcctcgttttccagggtgctgtggaatctattgccatgaagaaccccaaagagaggacagctctatttgaagagattagtcgttctggggacgtggcgcaggagtatgacaagcgaaagaaggaaatggtgaaggctgaagaggacacacagtttaattaccatcgcaagaaaaatattgcggctgaacgcaaggaagcaaagcaggagaaagaagaggctgaccggtaccagcgcctgaaggatgaggtagtacgggctcaggtacagctgcagctctttaagctttaccataatgaagtggaaattgagaagctcaacaaggaactggcctcaaagaacaaggagatcgagaaggacaagaagcgtatggacaaggtggaggatgaactgaaggagaagaagaaggagctgggcaaaatgatgcgggagcagcagcagattgagaaggagatcaaggagaaggactcagaattgaaccagaagcggcctcagtacatcaaagccaaggagaacacctcccacaaaatcaagaagctggaagcagccaagaagtctctgcagaatgctcagaagcactacaagaagcgtaaaggtgacatggatgagctggagaaggagatgctgtcagtggagaaggctcggcaggagtttgaagaacggatggaagaagagagtcagagtcagggcagagatttgacgttggaggagaatcaggtgaagaaataccaccggttgaaagaagaagccagcaagagagcagctaccctggcccaggagctggagaaattcaatcgagaccagaaagctgaccaggaccgtctggatctggaagaacggaagaaagtagagacagaggccaagatcaagcaaaagctgcgggaaattgaagagaatcagaagcggattgagaaactggaggaatacatcaccactagcaagcagtccctagaagagcagaagaagctagagggggagctgacagaggaggtggagatggccaagcggcgtattgatgaaatcaataaggagctgaaccaggtgatggagcagctaggggatgcccgcatcgaccgccaggagagcagccgccagcagcgaaaggcagagataatggaaagcatcaagcgcctttaccctggctctgtgtacggccgcctcattgacctatgccagcccacacaaaagaagtatcagattgctgtaaccaaggttttgggcaagaacatggatgccattattgtggactcggagaagacaggccgggactgtattcagtatatcaaggagcagcgtggggagcctgagaccttcttgcctcttgactacctggaggtgaagcctacagatgagaaactccgggagctgaagggggccaagctagtgattgatgtgattcgctatgagccacctcatatcaaaaaggccctgcagtatgcttgtggcaatgcccttgtctgtgacaacgtggaagatgcccgccgcattgcctttggaggccaccagcgccacaagacagtggcactggatggaaccctattccagaagtcaggagtgatctctggtggggccagtgacctgaaggccaaggcacggcgctgggatgagaaagcagtagacaagttgaaagagaagaaggagcgcttgacagaggagctgaaagagcagatgaaggcaaaacggaaagaggcagagctgcgtcaggtgcagtctcaggcccatggactgcagatgcggctcaagtactcccagagtgacctagaacagaccaagacacgacatctagccctgaatctgcaggaaaaatccaagctggagagtgagctagccaactttgggcctcgcattaatgatatcaagaggatcattcagagccgagagagggaaatgaaagacttgaaggagaagatgaaccaggtagaggatgaggtgtttgaagagttttgtcgggagattggtgtgcgcaacatccgggagtttgaggaagaaaaggtgaaacggcagaatgaaatcgccaagaagcgtttggagtttgagaatcagaagactcgcttgggcattcagttggattttgaaaagaaccaactgaaggaggaccaagataaagtacacatgtgggagcagacagtgaaaaaagatgaaaatgagatagaaaagctcaaaaaggaggaacaaagacacatgaagatcatagatgagaccatggctcagctacaagacctgaagaatcagcatctggccaagaagtcggaagtgaatgacaagaatcatgagatggaggagattcgtaagaaactcgggggcgccaacaaggaaatgacccatttacagaaggaggtgacagccattgagaccaagcttgaacagaagcgcagtgaccgtcacaacttgctacaggcctgtaagatgcaggacattaagttgccactgtcaaaaggcaccatggatgatattagtcaggaagagggtagctcccagggggaggactcagtgagtggttcacagagaatttccagtatctatgcacgagaggccctcattgagattgactacggtgatctgtgtgaggatctgaaggatgcccaggctgaggaagagatcaagcaagagatgaacacactgcagcagaagctgaatgagcagcagagtgtgcttcagcgtattgccgcccccaacatgaaggccatggaaaagctggaaagtgtccgagacaagttccaggagacctcagatgagtttgaagcagcccgaaagcgagcaaagaaggccaagcaggcattcgaacagatcaagaaggagcgctttgaccgcttcaatgcttgttttgaatctgtggctaccaacattgatgagatctataaggccctgtcccgcaatagcagtgcccaggcattcctgggccctgagaaccctgaagagccctacttggatggcatcaactacaactgtgtggctcctgggaaacgcttccggcctatggacaacttgtcaggcggggagaagacagtggcagctctggccctgctctttgccatccacagctacaagccagcccccttcttcgtcctggatgagattgatgctgccttggataacaccaacattggcaaggtggcaaattacatcaaggagcagtcgacttgcaacttccaggccatcgtcatctctctcaaggaggagttctacaccaaggccgagagcctcattggagtctatcctgagcaaggggactgtgtgatcagcaaagtcctgaccttcgacctcaccaagtacccagatgccaaccccaaccccaatgagcagtagcagtatttttgccctcccgccctgtctggatccctaagctgtccctctcccaatctctggatatttgactcccaaccttccccctacctcctggccctttttggtgtagtcatgggatttaggcactgctaatcaagcatgaagaggaacagaggtgatgttaggtctggagcaaaaattcctgaacgacagggagtattctggcctctgaaaggaggtgctgagctgaacagggccatctgtncatcacacacacccnnttctccctcatcacccataatcgtggnccccttggctcttgcccactgtgtgtgtgggtatgtatgtgtgtatgtatgtatccgcatgtgtgcatgtgagtatgtttgcaaaataataaaggatattggagacctgttttagaaggagcctaggctgaatttgattccaagagagcttaggatgacagcacccctgagctgggcaaaggtactcaggacctcataggagtcttaggcagttacctgaaactgccttcattcactcatttgtgtattcattcatttatgtattcatcagacacataccgaacaccctctatttgtcaggctctgtgcttggaatacagagttgaatcagacatgatctctaccctcctagtaaggagatacagtgggttcatgaatgactatagttagctgaatgtcatatgtacnnttnnngaatttgagaagtggntgatcccctctaggcttcctggaggtcacatttaagctagaccttgacaaattggtaggatttggtcaggcactaggagtggagcatgagctctggggacagacagttatgggttctggtcccactttttatcacttactagttgtttgaccttgggcaagtcatttgaccttctgtgcctcagtttcctcatctgtaaaatggggctaacaatattacctacctcataggatttaatgatgtcaagctcctcactgnagnccttatnccnttcgtgnagcccactaggtgccgacccctcagaatataatcctcatgcctgacccctgagagcttctgatcccagctattaggacagaagaagcctccaaatctggaaggtgctgaatgccctgctgactgggaaagtttcagggcactgatggggtctacctggtaagcggagggcctgaggaaacctgtagcttcaatcatgtctggtaaccgggtgcctgagccccaatctgggttgtgaggaaataggggagaggtatcctgggccacatcccagcctaacacctgtgaggttcattttaggaactaacctcattagctataaggatcatgcagaggcagcaaagccgggtgcgatgagctcagcctttactcattcacatacaccatcacactttaattccaatctgtatattgctttttaaaagttaagtccattctaatnncccaaatatgcatgaattc

SEQ ID NO: 1249 - DNA, 4068 bp, Homo sapiens
aacagacacagactcgcaggccctcttcattctaaagcaagggtccaaaaccttttttctataaagggccagagagtaaataatttaggctttgtgagccaggcagtctgttgcagctacgcagtccttggttattatagtgcaaaaacagccataggcagcatgtacagaaatgagcataaccatgctccaacaaaactttatttacaggcactaatgtttaaatttcaggtaattttcacatgtcacaaaatatcacttttctttaaccacttaaaagtataaaagccattcttagtttgcaggcagtacagaaacagtttcagcccatgggctgtcatttgttgacccctattcaagagggtctgtcacagaagactcctgcttgcctgaaatttacgagtgcatgtaaatgttggaattaacaggtgtgcctgttttctcttatgctgtctttcatcttcaggaacagccaggaagacgctgcacttcgagatttccaaggaaggcagtgacctgtcagtggtggagcgtgcagaagtctggctcttcctaaaagtccccaaggccaacaggaccaggaccaaagtcaccatccgcctcttccagcagcagaagcacccgcagggcagcttggacacaggggaagaggccgaggaagtgggcttaaagggggagaggagtgaactgttgctctctgaaaaagtagtagacgctcggaagagcacctggcatgtcttccctgtctccagcagcatccagcggttgctggaccagggcaagagctccctggacgttcggattgcctgtgagcagtgccaggagagtggcgccagcttggttctcctgggcaagaagaagaagaaagaagaggagggggaagggaaaaagaagggcggaggtgaaggtggggcaggagcagatgaggaaaaggagcagtcgcacagacctttcctcatgctgcaggcccggcagtctgaagaccaccctcatcgccggcgtcggcggggcttggagtgtgatggcaaggtcaacatctgctgtaagaaacagttctttgtcagtttcaaggacatcggctggaatgactggatcattgctccctctggctatcatgccaactactgcgagggtgagtgcccgagccatatagcaggcacgtccgggtcctcactgtccttccactcaacagtcatcaaccactaccgcatgcggggccatagcccctttgccaacctcaaatcgtgctgtgtgcccaccaagctgagacccatgtccatgttgtactatgatgatggtcaaaacatcatcaaaaaggacattcagaacatgatcgtggaggagtgtgggtgctcatagagttgcccagcccagggggaaagggagcaagagttgtccagagaagacagtggcaaaatgaagaaatttttaaggtttctgagttaaccagaaaaatagaaattaaaaacaaaacaaaaaaaaaaacaaaaaaaaacaaaagtaaattaaaaacaaaacctgatgaaacagatgaaggaagatgtggaaaaaatccttagccagggctcagagatgaagcagtgaaagagacaggaattgggagggaaagggagaatggtgtaccctttatttcttctgaaatcacactgatgacatcagttgtttaaacggggtattgtcctttccccccttgaggttcccttgtgagccttgaatcaaccaatctagtctgcagtagtgtggactagaacaacccaaatagcatctagaaagccatgagtttgaaagggcccatcacaggcactttcctacccaattacccaggtcataaggtatgtctgtgtgacacttatctctgtgtatatcagcatacacacacacacacacacacacacacacaggcatttccacacattacatatatacacatactggtaaaagaacaatcgtgtgcaggtggtcacacttcctttttctgtaccacttttgcaacaaaacaaaacaaacaacattaaaaaattgagaacaagtatggaaagaatgaaagatcaaggaaaaaagaataccaagttacatttcgttaaggtgcttatgatcttagaactatgcaacctaataggtttgaaactgtttacctgagagagaacaaaaagagagacttttttgtattggaagtaatctgattaatttttattttcttcaaggagagatacttgaaaggaatatgtttgtccatctgttggatccaaacatttctatattttgtaaatgttgttgttgttttttttttaatcgtttactatttgcactacaatggtgtttgacctgtctaatccttatttaacaagtattttctttggttgggggtgggggtggggtttaagagctgcacttaatgtgagctataaaagaactgctacagcacacaaaatagctatttttattattataattataattattattattattttgtaccttaaaaaatagacacatacaccaaagacatttgtgtgagcctttaaacagtctgtctgtggttggtatcattcaccatcaatgagtcaggggttgggattcaaggttgagtagtgtggattgtgttcaggcttaaaagacctgagaagtttggtttttgactccttttacatccatgaaacaggacatttcatactggatgtacagtagttgtacactgttggatatcaagttcaatcaaattcatggaactacatgcttgtatgtgtatatatacattgcttgtgcatatgcatatctgtatgtatatatacatgtattgtaccatgtccatacacattttaagcacttcaggctgtcattttttaatgttcttaaagcaatgaatgtttgtgtgcaaaacacagtatttttaagaaggataggctatagtttttgcttttactctgaactaggtgggcgcatttcaaaaattcggatgggaaaaagcctggaaattccagtgaatattcagcaaggccctctttcattgtacagggatcaaatttcctcctcttttttgtgccccctcccacttctacaagttatcccctgtggggaaaacaggatgataatcaaaactctgggctgatgtttttccaacttagtgtctattggaatcaatcttaaatcagaagctttttcagaaaaataatatttaggccagaattagagttgagtgtattttttaaaaatgattaaggcttggttgtgagaaatattacctgtaccagctgggaaaaataatgtcatcactaactaaaagataattaatttgagagaaagtgttaagagagggagagtaaggaagagaacagttaagaggaggcagaggtgagggcagtagtaaaaatctctaaaattttaatttacagccaaaattcttcatgtgtaaatttgtattgattcagatgcagaaatgaaaaaaaaacacctttgttttataaatatcaaagtacatgcttaaagccaagtttttatctagtttattctagtacttagcttgcctggaatagctaataaattattcatgtatgtgcttttgaaaatccagagccctatttttacacacttgtgtgaagttggcaaacattttgaaaaatggaaaaaagtttctaataattgggaacaattacattaattaatattttgtaaaatattgaagcttttagccctatgtcaatttgtagattaaaataaattaattataggaaaggaagataacagtgagaaaccaaacattacaaaaggtggtttagctctccttgaaaaatatactaagttggtatactataacacttggctatatgtaggcaatgtcactactgggcaaatacacttactgtgttctagaggcagccctttcttatgcagaaaatacaatacgcactgcatgagaagcttgagagtggattctaatccaggtctgtcgaccttggatatcatgcatgtgggaaggtgggtgtggtgagaaaagttttaaggcaagagtagatggccatgttcaactttacaaaatttcttggaaaactggcagtattttgaactgca

SEQ ID NO: 1250 - DNA, 696 bp, Homo sapiens
ttccccccccccccccccccccccgcccgagcacaggacacagctgggttctgaagcttctgagttctgcagcctcacctctgagaaaacctcttttccaccaataccatgaagctctgcgtgactgtcctgtctctcctcatgctagtagctgccttctgctctccagcgctctcagcaccaatgggctcagaccctcccaccgcctgctgcttttcttacaccgcgaggaagcttcctcgcaactttgtggtagattactatgagaccagcagcctctgctcccagccagctgtggtattccaaaccaaaagaagcaagcaagtctgtgctgatcccagtgaatcctgggtccaggagtacgtgtatgacctggaactgaactgagctgctcagagacaggaagtcttcagggaaggtcacctgagcccggatgcttctccatgagacacatctcctccatactcaggactcctctccgcagttcctgtcccttctcttaatttaatcttttttatgtgccgtgttattgtattaggtgtcatttccattatttatattagtttagccaaaggataagtgtcctatggggatggtccactgtcactgtttctctgctgttgcaaatacatggataacacatttgattctgtgtgttttccataataaaactttaaaataaaatgcagacagtta

SEQ ID NO: 1251 - DNA, 860 bp, Homo sapiens
gactctcactgtcattgcagaaaactcttctacagaaattactctcaaagaaacctgaggatcgacctaacacatctgaaatactaaggaccttgactgtgtggaagaaaagcccagagaaaaatgaacgacacacatgttagagcccttctgaaaaagtatcctgcttctgatatgcagttttccttaaattatctaaaatctgctagggaatatcaatagatatttaccttttattttaatgtttcctttaattttttactatttttactaatctttctgcagaaacagaaaggttttcttctttttgcttcaaaaacattcttacattttactttttcctggctcatctctttattcttttttttttttttaaagacagagtctcgctctgttgcccaggctggagtgcaatgacacagtcttggctcactgcaacttctgcctcttgggttcaagtgattctcctgcctcagcctcctgagtagctggattacaggcatgtgccacccacccaactaatttttgtgtttttaataaagacagggtttcaccatgttggccaggctggtctcaaactcctgacctcaagtaatccacctgcctcggcctcccaaagtgctgggattacagggatgagccaccgcgcccagcctcatctctttgttctaaagatggaaaaaccacccccaaattttctttttatactattaatgaatcaatcaattcatatctatttattaaatttctaccgcttttaggccaaaaaaatgtaagatcgttctctgcctcacatagcttacaagccagctggagaaatatggtactcattaaaaaaaaaaaaaaagtgatgtacaacc

SEQ ID NO: 1252 - DNA, 924 bp, Homo sapiens
cgaccgcggagcagcaccatgtcggcgccggcggccaaagtcagtaaaaaggagctcaactccaaccacgacggggccgacgagacctcagaaaaagaacagcaagaagcgattgaacacattgatgaagtacaaaatgaaatagacagacttaatgaacaagccagtgaggagattttgaaagtagaacagaaatataacaaactccgccaaccattttttcagaagaggtcagaattgatcgccaaaatcccaaatttttgggtaacaacatttgtcaaccatccacaagtgtctgcactgcttggggaggaagatgaagaggcactgcattatttgaccagagttgaagtgacagaatttgaagatattaaatcaggttacagaatagatttttattttgatgaaaatccttactttgaaaataaagttctctccaaagaatttcatctgaatgagagtggtgatccatcttcgaagtccaccgaaatcaaatggaaatctggaaaggatttgacgaaacgttcgagtcaaacgcagaataaagccagcaggaagaggcagcatgaggaaccagagagcttctttacctggtttactgaccattctgatgcaggtgctgatgagttaggagaggtcatcaaagatgatatttggccaaacccattacagtactacttggttcccgatatggatgatgaagaaggagaaggagaagaagatgatgatgatgatgaagaggaggaaggattagaagatattgacgaagaaggggatgaggatgaaggtgaagaagatgaagatgatgatgaaggggaggaaggagaggaggatgaaggagaagatgactaaatagaacactgatggattccaaccttcctttttttaaattttctccagtccctgggagcaagttgcagtctt

SEQ ID NO: 1253 - DNA, 1774 bp, Homo sapiens
gaggcaatggccggcaaccagctgtaagcgaggcacggaagacatatgcttgtgagacaaaggtgtctctgaaactatggatggtacaagaacttcacttgacattgaagagtactcggatactgaggtacagaaaaaccaagtactaactctggaagaatggcaagacaagtgggtgaacggcaagactgcttttcatcaggaacaaggacatcagctattaaagaagcatttagatactttccttaaaggcaagagtggactgagggtattttttcctctttgcggaaaagcggttgagatgaaatggtttgcagaccggggacacagtgtagttggtgtggaaatcagtgaacttgggatacaagaattttttacagagcagaatctttcttactcagaagaaccaatcaccgaaattcctggaaccaaagtatttaagagttcttcggggaacatttcattgtactgttgcagtatttttgatcttcccaggacaaatattggcaaatttgacatgatttgggatagaggagcattagttgccattaatccaggtgatcgcaaatgctatgcagatacaatgttttccctcctgggaaagaagtttcagtatctcctgtgtgttctttcttatgatccaactaaacatccaggtccaccattttatgttccacatgctgaaattgaaaggttgtttggtaaaatatgcaatatacgttgtcttgagaaggttgatgcttttgaagaacgacataaaagttggggaattgactgtctttttgaaaagttatatctacttacagaaaagtaaatgagacatagataaaataaaatcacactgacatgtttttgaggaattgaaaattatgctaaagcctgaaaatgtaatggatgaatttttaaaattgtttataaatcatatgatagatctttactaaaaatggctttttagtaaagccatttactttttctaaaaaagttttagaagaaaaagatgtaactaaacttttaaagtagctcctttggagaggagattatgatgtgaaagattatgcctatgtgtcttgcagattgcaagatattttaccaatcagcatgtgttacctgtacaattaaaaaaatatttcaaaatgcaatgcatattaaatataatacacacagaaaaactggcatttattttgttttatttttttgagatggagtttcgttcttgttgcccaacctggagtgcaatggtgcaatctcagctcactgcaacctctgcctcccaggttcaggtgattctcctgcctcagcctcctgagtagctgggattacaggtgtgcgccaccacgcccagctaattttttgtatttttagtagagacagggtttcaccatgttggtcaggctgatctcgagctcctgacctcaggtgatctacccacctcggcctcccaaagtgctgggattacaggcgtgagccactgcacctggcctgacattctttatgaaatttagaattgttgaagaactataacatttcagtagggttcaaggtggtcccaaaagttatataaaagattagtttttactataaacccttgtcttttactcagatcctagcatcccttttcacatggtttctccatgtatataacagaatcaagaaacaaattttaattaaacaatctgtaacagaatcaagaaacaaatacattttaattaaacaatctatatggaacaaacattcccaaattctaagaataaatttttctttaagttttctctga

SEQ ID NO: 1254 - DNA, 851 bp, Homo sapiens
gggagctcaaagtgtgccttctcggggacactggggttgggaaatcaagcatcgtgtgtcgatttgtccaggatcactttgaccacaacatcagccctactattggggcatcttttatgaccaaaactgtgccttgtggaaatgaacttcacaagttcctcatctgggacactgctggtcaggaacggtttcattcattggctcccatgtactatcgaggctcagctgcagctgttatcgtgtatgatattaccaagcaggattcattttataccttgaagaaatgggtcaaggagctgaaagaacatggtccagaaaacattgtaatggccatcgctggaaacaagtgcgacctctcagatattagggaggttcccctgaaggatgctaaggaatacgctgaatccataggtgccatcgtggttgagacaagtgcaaaaaatgctattaatatcgaagagctctttcaaggaatcagccgccagatcccacccttggacccccatgaaaatggaaacaatggaacaatcaaagttgagaagccaaccatgcaagccagccgccggtgctgttgacccaagggcgtggtccacggtacttgaagaagccagagcccacatcctgtgcactgctgaaggaccctacgctcggtggcctggcacctcactttgagaagagtgagcacactggctttgcatcctggaaggcctgcagggggcggggcaggaaatgtacctgaaaaggattttagaaaaccctgggaaacccaccacaccaccacaaaatggcctttagtgtatgaaatgcacatggaggggatgtagttgcatttttgctaaaaaaaaaaaaaa

SEQ ID NO: 1255 - DNA, 2187 bp, Homo sapiens
gcgccgcgtcccgcaggccgtgatgccgcccgcgcggaggtggcccggaccgcagtgccccaagagagctctaatggtaccaagtgacaggttggctttactgtgactcggggacgccagagctcctgagaagatgtcagcaatacaggccgcctggccatccggtacagaatgtattgccaagtacaacttccacggcactgccgagcaggacctgcccttctgcaaaggagacgtgctcaccattgtggccgtcaccaaggaccccaactggtacaaagccaaaaacaaggtgggccgtgagggcatcatcccagccaactacgtccagaagcgggagggcgtgaaggcgggtaccaaactcagcctcatgccttggttccacggcaagatcacacgggagcaggctgagcggcttctgtacccgccggagacaggcctgttcctggtgcgggagagcaccaactaccccggagactacacgctgtgcgtgagctgcgacggcaaggtggagcactaccgcatcatgtaccatgccagcaagctcagcatcgacgaggaggtgtactttgagaacctcatgcagctggtggagcactacacctcagacgcagatggactctgtacgcgcctcattaaaccaaaggtcatggagggcacagtggcggcccaggatgagttctaccgcagcggctgggccctgaacatgaaggagctgaagctgctgcagaccatcgggaagggggagttcggagacgtgatgctgggcgattaccgagggaacaaagtcgccgtcaagtgcattaagaacgacgccactgcccaggccttcctggctgaagcctcagtcatgacgcaactgcggcatagcaacctggtgcagctcctgggcgtgatcgtggaggagaagggcgggctctacatcgtcactgagtacatggccaaggggagccttgtggactacctgcggtctaggggtcggtcagtgctgggcggagactgtctcctcaagttctcgctagatgtctgcgaggccatggaatacctggagggcaacaatttcgtgcatcgagacctggctgcccgcaatgtgctggtgtctgaggacaacgtggccaaggtcagcgactttggtctcaccaaggaggcgtccagcacccaggacacgggcaagctgccagtcaagtggacagcccctgaggccctgagagagaagaaattctccactaagtctgacgtgtggagtttcggaatccttctctgggaaatctactcctttgggcgagtgccttatccaagaattcccctgaaggacgtcgtccctcgggtggagaagggctacaagatggatgcccccgacggctgcccgcccgcagtctatgaagtcatgaagaactgctggcacctggacgccgccatgcggccctccttcctacagctccgagagcagcttgagcacatcaaaacccacgagctgcacctgtgacggctggcctccgcctgggtcatgggcctgtggggactgaacctggaagatcatggacctggtgcccctgctcactgggcccgagcctgaactgagccccagcgggctggcgggcctttttcctgcgtcccagcctgcacccctccggccccgtctctcttggacccacctgtggggcctggggagcccactgaggggccagggaggaaggaggccacggagcgggaggcagcgccccaccacgtcgggcttccctggcctcccgccactcgccttcttagagttttattcctttccttttttgagattttttttccgtgtgtttattttttattatttttcaagataaggagaaagaaagtacccagcaaatgggcattttacaagaagtacgaatcttatttttcctgtcctgcccgtgagggtgggggggaccgggcccctctctagggacccctcgccccagcctcattccccattctgtgtcccatgtcccgtgtctcctcggtcgccccgtgtttgcgcttgaccatgttgcactgtttgcatgcgcccgaggcagacgtctgtcaggggcttggatttcgtgtgccgctgccacccgcccacccgccttgtgagatggaattgtaataaaccacgccatgaggacaccgccgcccgcctcggcgcttcctccaccgaaaaaaaaaaaaaaaaaa

SEQ ID NO: 1256 - DNA, 257 bp, Homo sapiens
  misc_feature (1)..(257): n=a,t,g or c
ttttttttttttttttcataaatacacaattttatttgctatttccaggggaaacttaggcattaaactgtaagctgataaaatacgatacctaaaaaagtataaaagtataaatatccccttagaataaattttagtgaattaagtcttaatatctttaaattaaaaaaaccacaagcctatctactatgtcaaggtcaaaaatcaaacaacgctaagcggccancagctccccagagaggatgcccaggagcccc

SEQ ID NO: 1257 - DNA, 567 bp, Homo sapiens
  misc_feature (1)..(567): n=a,t,g or c
tggaataatggcaacagaaagactggctaactacaccggagcatctatgcnaataccaggacaccacatatataaaccatgtcgtttccgtggctgggtggggcatcagtgatgggactgagtactggattgtccggaattcatggggtgaaccatggggcngagagaggctggctgaggatcgtgaccagcacctataaggatgggaagggcgccagatacaaccttgccatcgaggagcactgtacatttggggaccccatcgtttaaggccatgtcactagaagcgcagttttaagaaaaaggcatggtgacccatggaccagaggggatcctatggttatgtgtgccaggctggctggcaggaactggggtggctatcaatattggatggcgaggacagcgtggtactggctgcgagtgttcctgagagttgaaagtgggatgacttatgacacttgcacagcatggctctgctcacaatgatgcagtcagccacctggtgaagaagtgacctgcaacacaggnaaccgatgggacctcagtcttcttcagcagaggactttn

SEQ ID NO: 1258 - DNA, 456 bp, Homo sapiens; identical to SEQ ID NO: 1074

SEQ ID NO: 1259 - DNA, 485 bp, Homo sapiens
  misc_feature (1)..(485): n=a,t,g or c
tttttttttttttatttttgctaaattttattttcaaagtttcaaacctttccaatttttttttattttttaccccaaaaaaggtatcaatacttttcattccactcttgtcaactttagccaaagccttctgagctgcagtcattttgctatttttcttttcagtcttcaaatctttagtattaaacttagtgtaatcttcttttgcttctacaggctcatctgataactttattttctttgatggaggatttggcaatgaggctgaaggttctggaagctttaagtatttagataagtcatcacttaattctttagggatgtagtcagatatcagaccatgggcataacgaaatataatcctcttccttgtcagtggaagcttggtcaccagagaaaaatgcagtgactgtacccggggaactggacattcacattattgggnttttaatgctgccacagtttgattaaccntttttttccaa

SEQ ID NO: 1260 - DNA, 297 bp, Homo sapiens; identical to SEQ ID NO: 1076
  misc_feature (1)..(297): n=a,t,g or c

SEQ ID NO: 1261 - DNA, 1522 bp, Homo sapiens; identical to SEQ ID NO: 1079

SEQ ID NO: 1262 - DNA, 408 bp, Homo sapiens
  misc_feature (1)..(408): n=a,t,g or c
atcgcttgaggccacgagttcaagatgaggttggcaacatagtaagacctcatcactacaatttttttttttttaaattagtgaagtgtggtactgcacacccgaagtcccagctacttgggaggctgaggcaggaggattgcttaagcccagaaatttgaggctgcagtgagccatgattgcaccactatgctccagagtctaggcaacagagtgagaccttatctctttaaaacaaacaagaatgaagttaggtatctgtttatttgtttgagccatttgtatttccttttttgtaggactgtcctgtttnaaacgttaaaatcactgctgtnggttttngatttttacatctcagctgggatgggcaccaattaaattatttnaggccctggtttattgnaaaat

SEQ ID NO: 1263 - DNA, 382 bp, Homo sapiens
  misc_feature (1)..(382): n=a,t,g or c
actcctcttgctcgtcatgtctggccgcgnaaaggcgggaagggtcttggcaaaggcggcgctaacacgcgtnaaagtactgcgcgacaatatccagggcatcaccaaggctnacatnncgcactttgctcgccgctgcgctgganagcgattctccggcctcatctacgaggagactcgcggggtgctgaaggtgttcctggagaacgtgatccgggacgccgtgacctatacagagcacgccaagcgcaagacggtcaccgccatggatgtggtctacgcgctcaagccaggggccgcaccctcttacggttttcggtggttgagcgtccttttcttaccaattaaaaggccctttttcagggcaaccccttaaaaaaaa

SEQ ID NO: 1264 - DNA, 839 bp, Homo sapiens
  misc_feature (1)..(839): n=a,t,g or c
gnnnnnngnnnnnnnnnnnttnttgagnaccgcagtngcagcagcagcagccgctgncgcaaacaagccctcccacgtttgaggggagtcatgagccgtttcctgaatgtgttaagaagttggctggttatggtgtccatcatagccatggggaacacgctgcagagcttccgagaccacacttttctctatgaaaagctctacactggcaagccaaaccttgtgaatggcctccaagctcggacctttgggatctggacgctgctctcatcagtgattcgctgcctctgtgccattgacattcacaacaagacgctctatcacatcacactctggaccttcctccttgccctggggcatttcctctctgagttgtttgtcttatggaactgcagctcccacgattggngtcctggcanccctgatggtggnaagtttctccatcctgggtattgtggtcggctccngtattttagaagtagaaccagttccagacagaagaagagaactgaggcagaatatcaaccccagggtggatcaantgggttacaagtggttnaaaannnnnnnnnnnnnnnncnnnntnntntnaannnnnnnnnnnnnnnnnnnnnnnnnnannnnnnnnnnnnnnnnnnnnnnnnnnnnnnnnnnnnnnnnnnnnnnnnnnnnnnnnnnnnnnnnnnnnnnnnnnnnnnnnnnnnnnnnnnnnnnnnnnnnnnnnnnnnnnnnnnnnnnnnnnnnnnnnnnnnnnnnnnnnnnnnnnnnnnnnnnnnnnnnnnnnnnnnnnnnnnnnnnnnnnnnnnnnnnnnnnnnnnnnnnnnnnnnnnnnnnnnnnc

SEQ ID NO: 1265 - DNA, 470 bp, Homo sapiens; identical to SEQ ID NO: 1049

SEQ ID NO: 1266 - DNA, 275 bp, Homo sapiens
cctcttgttctctgcagaggatcagctgggcctgtccctgctcagcctggagcagctagaatcagaggagacgctgaagaggatagagcagattgctcagcagctctgagtggggcgggtggggccataaacggttcctggtgactcctgagtcttgcctggccctggttcccagcggcggtggtgctagaaggtcttatgaagtcaggtgacatttctcactgtcacgtccacagcctttaatcgcaggagaaggcagctatccaccaggtacc

SEQ ID NO: 1267 - DNA, 738 bp, Homo sapiens; identical to SEQ ID NO: 1086

SEQ ID NO: 1268 - DNA, 446 bp, Homo sapiens; identical to SEQ ID NO: 1087

SEQ ID NO: 1269 - DNA, 469 bp, Homo sapiens
  misc_feature (1)..(469): n=a,t,g or c
actgtgataaaacatacacagtttacaagaatatgaaatgctttactaattcgtgtgtcatccatgctaatcatctctctattgttccaattttagtacaggtgcttttgaagtgggcactcttaattttttgaacattttctaggtttctgataccatactcattctgtgtcttacctatcacaaccccagaatcagccatttctccaaattccttttagtggagagtggtatttagaaaccaggatctggacaccatttctctttttgttattgttgtttgccttgctttaatgatagctctttttattaatttttccattattataaaagatggccaaatacatacatttctatggaaaatgaatcaagtcttatntattttacagttaaaatttcattattcctattttaactgataaaccagtttaattttcaagatgtattaaagtctcccacaattgtattc

SEQ ID NO: 1270 - DNA, 442 bp, Homo sapiens; identical to SEQ ID NO: 1088
  misc_feature (1)..(442): n=a,t,g or c

SEQ ID NO: 1271 - DNA, 428 bp, Homo sapiens
  misc_feature (1)..(428): n=a,t,g or c
tttttttcagtaatacagatgtctattttattaaaaaagttacaaacaggtggactgcagggtcgtcttacaaaatgacaagaatgaaatctattggaaaaattttacttttacaaatctttataggtaattgttcaatgtttgtacttgttatttgagattttacctttcactgataaagttacagtacattagatccatgataataggttacattattttatttgcagagccctactgcagtgatttgaacaactcctaaatagatgccataataaagacaagacatatattgcatttaatattaatttattatcctaataagcaacatgcaatctattgaggaagctaaaataacttttggtcccctttcttaaaatgtgctggagaaaccacccttaaaatcactttcccccggattccngcga

SEQ ID NO: 1272 - DNA, 413 bp, Homo sapiens; identical to SEQ ID NO: 1089

SEQ ID NO: 1273 - DNA, 422 bp, Homo sapiens
tgatgcttgcagagaaccccaataacttgatcttcaagacgggaattacttctgattacactctgagaatatctgtcatctgcctttgacaccttataagttgattcttgagcattaatttctccatcagatagcctttgggttgatgactcaagagatgcttgtggctgcaacacctgtaactcttgcattggaaaaccatcttcttgctttgaagatggatacacatctgagtcaagctttctttcagcataagactttgggtcaggggaaagttatgttattttgtaatgtctgacaatgagtagagggatgcaaaaagattgatgactggacagcaggcaaaaacttctgggactgggggagatgatgactcttgagtctgaacattttgggaagaatgcatagaaatataattctgg

SEQ ID NO: 1274 - DNA, 388 bp, Homo sapiens; identical to SEQ ID NO: 1090
  misc_feature (1)..(388): n=a,t,g or c

SEQ ID NO: 1275 - DNA, 421 bp, Homo sapiens
  misc_feature (1)..(421): n=a,t,g or c
tttttntnttcattgctcaggtaagaatttattaagtcaatttaaactanacattactaccattgcaaaagcatttgctctgaaaagggactgaaaaatgcatcataaagttacatagttcagcaacaatatcaatattgattatataaagtaaaactactggcaaacgtcatttaagcttaccctgtaatttttaataactttataaggagcaaatgtgtcaccttaaaaatgtaccagtggcatttacaaattccttcaaactcatttacaaatacagtaataaaaattcctgagctcccttttcttacaccagtattcaccaatcaacatccatgcggtgttttatttgacccacatcctctttccttttcttaagaaaatattttatcacattcgtaaaagtatctgtgcttcangt

SEQ ID NO: 1276 - DNA, 211 bp, Homo sapiens
tttttttttttttttttcaccattatttgttaattttattttgatttttaaaaggcattattcagtgtacaattaacaaagaaatcagttttctactctactgtacttaggatgcttcaaaaacatcaggtgaaatgatctatgctttaagagccagaaaactcaggcctcagcaactaaaacagagaattccaaaattgtaattacaaat

SEQ ID NO: 1277 - DNA, 415 bp, Homo sapiens; identical to SEQ ID NO: 851

SEQ ID NO: 1278 - DNA, 637 bp, Homo sapiens; identical to SEQ ID NO: 1092
  misc_feature (1)..(637): n=a,t,g or c

SEQ ID NO: 1279 - DNA, 261 bp, Homo sapiens; identical to SEQ ID NO: 860

SEQ ID NO: 1280 - DNA, 445 bp, Homo sapiens; identical to SEQ ID NO: 1094

SEQ ID NO: 1281 - DNA, 466 bp, Homo sapiens; identical to SEQ ID NO: 1097
  misc_feature (1)..(466): n=a,t,g or c

SEQ ID NO: 1282 - DNA, 446 bp, Homo sapiens; identical to SEQ ID NO: 1100

SEQ ID NO: 1283 - DNA, 465 bp, Homo sapiens; identical to SEQ ID NO: 1102
  misc_feature (1)..(465): n=a,t,g or c

SEQ ID NO: 1284 - DNA, 315 bp, Homo sapiens
ttcgaaacctaaaaatgtattttattttgaagttgtgctttggattttccccaatccaacatctgttgagtgacagtcttaggttcacacaaagcatctccaagcatacatacaatattccagttatcaacactattttaaagaatataccattttacacaaatgtgacatacaagtcagacgccacaacattgcgattccctggaagatgtgacttctcttctgcatgggaagtagatctgcaccagcccttccagtgctctgcgcatcccggtgctggcatcaccgctcctcatctccttggggagaagccag

SEQ ID NO: 1285 - DNA, 382 bp, Homo sapiens; identical to SEQ ID NO: 1103

SEQ ID NO: 1286 - DNA, 323 bp, Homo sapiens; identical to SEQ ID NO: 1104

SEQ ID NO: 1287 - DNA, 416 bp, Homo sapiens; identical to SEQ ID NO: 1105

SEQ ID NO: 1288 - DNA, 388 bp, Homo sapiens
ccgaggcttcagttctgtaccatttaatgcgtgcaaaggacattccatggtgtctgctgggttcagggcaactggctttcccaaggcatacaagaaaagttggcagaaagtcctcccctttaaaattcaagcctgaaggttttgtgtgggggcctactgcccctaatgtcttctggtgatactgcagcacagtccatcaaaatagtttgtggttttgccatctgttactccttatgcccacctggagaggggctagcatctttaggtgggaccacccctggcacaacatggtctctgaggtccagatactctgagggtaggggctggctctctctgcctccctatcccctacaagagggacagggagaggtagaacattgggatcttt

SEQ ID NO: 1289 - DNA, 353 bp, Homo sapiens
gttatttaaggatttgtttaatgttttaaaattcaaagcactttaaattattttaagacaaaagattaataaaaacaacattacctttcaaatacaactttataacagcacagtggaagaatggtaaacagtccctcttttttttaaaaaaaaatcagtacttaaaaccaaaggaaggcttatatgtacagctaattcagaaagggaacaatgacacctaaagacatagataaatgcttcattttaatccaataaatgtcctacctactggatcttaataatgatgttttcaatatgccatttaaaataaactatccttgaaaataaagttttaaatcattcaatataatcta

SEQ ID NO: 1290 - DNA, 366 bp, Homo sapiens; identical to SEQ ID NO: 902

SEQ ID NO: 1291 - DNA, 535 bp, Homo sapiens
attgataaacacagtaaatatattttctcttccttatgattttctaagtaacattttcttttctctagcttactttaagaatacagtatacaatatatataatacatcagtcaggctcccagtcaataacaggctactagtacttaagactttggggaatcaaaagttatatgcagatttttgactgtgcggggcgtaggggtgggtcagtgcccctaccacctgcatttttcaagtgtcaactatatatatgtatgtgtacatacacatacacatacacacacacacacacacacacacacacacacacacacacacgagtgtattaattcctcagaagcccagccaggcatcttagcttggctactttttaattagaaacaactattttattcagaaaagtatacacagttagcaattagaatcttcttatatacagacataacttgcagaaggttaagtctgaggacgctgttctgggtaatttttacagtcctttttagctctaagatccatgacactgcatttttatggc

SEQ ID NO: 1292 - DNA, 337 bp, Homo sapiens; identical to SEQ ID NO: 1110

SEQ ID NO: 1293 - DNA, 451 bp, Homo sapiens
acaagatgccacttgcatgatgctgtgggtgccttttcattgcaatgcctccatttcagatgtgagaaagttctgggcctgtagggcatttcaagcctaggtgtgtattgtggaggaggggatagatgttcatctatgcaccagatcctcagatccccgaggtgggttgcggggaaggcccagggagctgatggataaagccacagcttcagtcctggcagagttcactgccaggaatggctgctgactgcggggcactgatggtgggcagccagggccgaggtgcaaacttcttcccacaaggagttccaggtgttcagtggcagccagttcctcagttaatgggtcacctgctgctgcggccactctctgttgatgcagtaagccggttgaggggcgtcaaggggctggacaggacaccccgcaaactttccagccattcctgctgttt

SEQ ID NO: 1294 - DNA, 423 bp, Homo sapiens; identical to SEQ ID NO: 1111

SEQ ID NO: 1295 - DNA, 385 bp, Homo sapiens; identical to SEQ ID NO: 1116

SEQ ID NO: 1296 - DNA, 207 bp, Homo sapiens; identical to SEQ ID NO: 1119
  misc_feature (1)..(207): n=a,t,g or c

SEQ ID NO: 1297 - DNA, 351 bp, Homo sapiens
aaaaatggtattcatttttatttcaacatgtcaactgtgcatttccaaaacagcaggcttttcaaaggaataaatcagaactgtaaacacaagatacagtacaagtttttgacttcctacagtcagtttcacaaatccacatactgtacattcataggtgaggttaagcctgtcacccatttctttatttctataattacacaagcataataaatacatctgattttaaaggtcacttaaaatgagtcataatttacagtacagtacgtttcagttcaagtgcaaaaaataactatttgctgaattctatttctttcagttattttatttttaagctgtgttttattgtga

SEQ ID NO: 1298 - DNA, 318 bp, Homo sapiens
  misc_feature (1)..(318): n=a,t,g or c
ctgggtgcaaggaacattttattccataactgtctccaccgaagccgcagaagcaaagccaggagcagaatccattctgccagcgctgggctctggggagacatctgtgccctcaccatggaggacagaaggcaggggcctcccgactcnttggtcctgcctggggtgctcctgtccctctttnttgctgggggacctaccccaccntccccctcccacctcagtcacagaggaacaagggagacaaactgagggctctgcagtccccgttcaaggncaacataatagtcgtgtggccccagcccagctaggcgcatc

SEQ ID NO: 1299 - DNA, 228 bp, Homo sapiens; identical to SEQ ID NO: 1121
  misc_feature (1)..(228): n=a,t,g or c

SEQ ID NO: 1300 - DNA, 479 bp, Homo sapiens
tttttctctttgaaagtttattgttttctttaaaaaaaaaaaaaaacctataccttttatattttacattcacctctcagaatatttaatggtacccgttaacgatgttataaaaaaagaccaccacctgcttgaaatggctgcaaatttaccatgttctggcattaaagtgatttcaactctttggacaaattggtgtaacagtaagcaccgagatttcaaattcccagatgagaaaaaaaaaattaatcaggaggaaatttatttagtaaaaattcaaagctaaagaaatgtgagaaggaagccaaacccaaaaaactgtaaaaaatacaatcttctctccagaattaggttaaaaaatacagtcaaccccattctaaaccccatatttcttagaaaagtcacccagtcctgaacacagggtcttatacacaaatacatgtagcttgatttgcagatcagcctctgggatcgacctt

SEQ ID NO: 1301 - DNA, 388 bp, Homo sapiens
tttttttttttttttttttgcatttcaaatattttaatagttttatttcgcaaagagaagcctaagaatttttttaaaaacatttccagagagaacactttataccataaaataaacttgtataatttgggaggacaaatcatctcaaatgtatatttttgaattatgtgccaattttataattagtacaaaaatgacagctgaaatattttaaaaatgtaaaaaccagtccaggcaacataactataccatcttgctgtaaaagtacttatatcgaattccgcacaaaatatttttgcaatatgctaaatttagttcttcaagtcactcttcactgccggctggcttttccattttctgttgtctccatcccattttcctctttaag

SEQ ID NO: 1302 - DNA, 536 bp, Homo sapiens; identical to SEQ ID NO: 1122

SEQ ID NO: 1303 - DNA, 378 bp, Homo sapiens; identical to SEQ ID NO: 1124

SEQ ID NO: 1304 - DNA, 455 bp, Homo sapiens; identical to SEQ ID NO: 915

SEQ ID NO: 1305 - DNA, 357 bp, Homo sapiens; identical to SEQ ID NO: 1126

SEQ ID NO: 1306 - DNA, 378 bp, Homo sapiens; identical to SEQ ID NO: 1127

SEQ ID NO: 1307 - DNA, 330 bp, Homo sapiens
tttttttcaaggattcacaaactatggcattttatttcagagcctttgcttacatttgtacaatatattacataattcttcattgtttgcagatcctaatatatactttatagcttttattctataagcttttttcttcaacattttgctgtcaacaaatctttacagtcctgtacaaatttgaataacttgaaaccattttcaacaaaattagttactgtaagcacacactacaagactgaaaatgcttttcttagaaaagttgaatgtaaaggattctgacacgttagcatctacaacaaaacgcattgaaattcccacgtcgtattg

SEQ ID NO: 1308 - DNA, 459 bp, Homo sapiens
tttacacaagaaagtgctgcttacattgttgttttgtgttatttagtgatttgttcagcgctcatctcttccaccagactgcgcttcctgaggacagggaccttaaagcacctcacatagggtgcgcgtctggtacactgtcgccgagtaccagacaaccagtgtctcacacgggggaagacgatgaagacagcaatggcatccttgggaagatgggcaggagaccccatgacacctggcacctgggcctaagctgggaggccagcggcgtccccaggagaccacggcccaggctgggagcttgaccggccagacgcccgtgggtgggcctgggcctcccgcctgggagcctccagtgtggcgcctggctctgggtgggtaacaggagctacaggccagcaatgcccttcctgtcctcggcctggctcaaggactgggtgcagagggcatcagcgatgc

SEQ ID NO: 1309 - DNA, 418 bp, Homo sapiens; identical to SEQ ID NO: 381

SEQ ID NO: 1310 - DNA, 396 bp, Homo sapiens
ttttttttttttttttttggatcaccagcaattctctttaatcctctttcttttccttctaaaagcttttgcaaagtccaatttatttttacagtaaatagattatcttttaagaaaacgcactagcaagattgtagcaaagtgtgtttatgcaaacaggtggtgcagagacagaggggcggaccttgtgggcagctggaggaccatcccagctcatgggccacgcacagatgggagcacctcagtgttttcagccaagagaacacaagtctcgggatccatgtggctccctcaggccctggacccaggcaggcaggacacccttgaccatggggcaggggacatcccagcatcttgtctgtacccccaccacctgcgtggcacctggtcctcaga

SEQ ID NO: 1311 - DNA, 286 bp, Homo sapiens; identical to SEQ ID NO: 1130

SEQ ID NO: 1312 - DNA, 307 bp, Homo sapiens
ctccctaggaaggatatcccaaagcaagggcatcttgaaaagcatgattttctcggtaatgtttgccaacactgttcactttccacatggtcacgactgaaaacacatttaccaatacctttcaagcgatatgactaccagaaatagatcttctttactaccctctctgaaatgagtaaacaagaaataaattcagaaggtaggcttttgaaagaaaaagaaaaaaaattgcttgcggcttcacagtgaaaaaaattggagtgtttgtgccggttaagattttaatggtttcttaatcaaaattctc

SEQ ID NO: 1313 - DNA, 429 bp, Homo sapiens
ttttttttttttttttctacacacagtgactttattactctatggatgctggtgaactgccctccccaaccagcttcacgggggcaggcatctctgtccatcccatgcctttgggtcacagggggcagcaagaccaagaagaccacagccaggccctgggttcagcttcagagccatcacccgctgcctcccccaacccccaatctcctgagggaggagaattcctagggacaagacccagacccctttccttcagcctctgcttcaccaagggggcctggcctgcgcccgagctcctcctggcctgcccctcagggatcccaggtcctcacctctgctcttcaggcaggaaaagggcagggagagaggaatggaggagggagagggaggctgggcgcaggagagagaagaggggggaaggaggagaca

SEQ ID NO: 1314 - DNA, 375 bp, Homo sapiens
tctcaggacccaatagattttatttcaggtggggataagggacaagcaatgtgaagacagggaaggaaagaaggaagtctctatgttctgaaggactgcctaccccactgttgagagtgccacattctgcccttttagcaattttaattaatttttactaggactttggtaacaccacagaaaccctgtggcttcctgttaaaatgactgtgttacatgccttatttttattaaagtggaatttaacaaatacttttattattttgaagcatttcatcaattctcggtggaagcactacatcatcgaatgggaaataacaaatgaaaaatgaaaaaaaagattatccattcacagtaagcaccattttactagaa

SEQ ID NO: 1315 - DNA, 304 bp, Homo sapiens
tttttcttctgtataaaagtatattttatttaaaaacagtgatattgacatgtatgttatagcccttacagaaaaataacacgttttatagtccttttatttgaaattcagtgtaaatcactcttaaactataaattcacagttgttggaggtttttttttactttaaatgatgtgaaagcatttgttccattcaaaggcccctatgcctttgaatgacatattctcagtaacttcttggccagtaactagagtatgtgagactgagtaactagaatgtgcatatttcatgaattagcttcccg

SEQ ID NO: 1316 - DNA, 387 bp, Homo sapiens
tttgaagggagcagagggcaggcacgcgagccacggccacgctttattgcttaagacgcacacagaacacagaggaacaaacaaggaggaaagggcgccacacacagcccagaccaggcaggagcggcccagccgcggaagagacgttccttgcaaggcagggccctgctggatagcacgccccctgggacgagggtcagggaccccaggactgcacagctgcagacttgctgggaacctggtacaggtgatacgcccactctcgcctgttgtcagagcttctacctctgcatccagccatgcacccaccatttccccacagggtacaggggcagccttccttgatccacagccaacccttctcctgctgtctctggctgtcagtga

SEQ ID NO: 1317 - DNA, 324 bp, Homo sapiens; identical to SEQ ID NO: 47

SEQ ID NO: 1318 - DNA, 434 bp, Homo sapiens; identical to SEQ ID NO: 928

SEQ ID NO: 1319 - DNA, 337 bp, Homo sapiens; identical to SEQ ID NO: 930

SEQ ID NO: 1320 - DNA, 443 bp, Homo sapiens
tttaggtaaaagatttttattcttatttaaccatgctgcatgtatacatacaataccaatatatacaacttgaacaaatacaatttatacataaaatacaatgaaagcatggcttttgaaactgatgcaacaaactgtaatttgtaattttggccagcatacagtattatagtaatgctactgaagttattcattaaattagtcagactacagtataagttcaaaggcactagaaacatctatgttttcttctagtatttttaagaacaaaaaataatttaaaataaaacaaatgtatacattaggaaattgggcagacattggtgtacttaaatgtaaacgctacccattccttaattcacagccctgtaggaaagaagactttccttaagagttaaggggaaggatattaaaaacagactaaaaggaaacaaacaaaacag

SEQ ID NO: 1321 - DNA, 463 bp, Homo sapiens; identical to SEQ ID NO: 1136

SEQ ID NO: 1322 - DNA, 404 bp, Homo sapiens; identical to SEQ ID NO: 1138

SEQ ID NO: 1323 - DNA, 416 bp, Homo sapiens
tttttttttttgttagaatgaaaaattttatcatcactcctgttcaccccgcagagtctgcggagtgctaaagggcacaccaataaggatccgagggagggggtctacatctgctttttcagcccccaaagccatatattggggtggcccaatataaagctactcattagtttggttcctgagcagacctgctaataaacctcaaaaacacaaaagtctacttcactagccagaaatgaaagcaggatctagatctgagtgggaagggcagagggcagcatgggttgactctagttggaattgtgccagtcttctctggaggccgactcactcgtggagtggggaaaggggtggccaggccccagtctagaaaccccaggcctatgggaagtgatgccaggggaagggaagcagat

SEQ ID NO: 1324 - DNA, 193 bp, Homo sapiens; identical to SEQ ID NO: 1141

SEQ ID NO: 1325 - DNA, 338 bp, Homo sapiens
gaaaaatcaaaaattttaatcttatcatctttacatacaacaaacatgtcaagaccccctattgtctttgaaaaggtcccccctcccccgccaaaatctgtagaccataagtcttggcctacactgacctggtttgtaaaatatcttcctctgtgtacttttcccttcagcctcaggctcttggctgattcgctcacaacagaagcagcttggctttcctctggaagtaccaatttgaaagcccaccagcccgcaaacctagagtgtattctccacccctgggtcacagaacttcgttctccccggctctgtaacccaaggaccctacagcctctgag

SEQ ID NO: 1326 - DNA, 224 bp, Homo sapiens; identical to SEQ ID NO: 1143

SEQ ID NO: 1327 - DNA, 545 bp, Homo sapiens
tttttttttttttttttttttttttttttttttttttttttttaataaatatgagcatttatttggcacccgatggcaatacaaaatcctggcagtgggagtggaaaggttctctctctcaaatacttccatactatgtcgacccaaaggcaggacttggcagcaaggctcacaaaccacccaaacaaatatttattgagcaccttgactactacaggcctagcattttgctagggaccatgggagatgtgaaggaagttatctcacacatgatatgtcttcaaggagctaaaaatgccagtggataaaagcaaaacacatggaaaaacaaagtacaaataataatccgtgtatattgtcaaaaggaacattttatcaaaaggtaggattgtagctaaggttggcttgccttcttccctcttttattcaacaaacatttaatgaaggcccactatgtgccaagcacttggtacatgatggtgaataaaacaaacaaggtttctgccctcatttacagcctggtaggggagacagaaatgaacaag

SEQ ID NO: 1328 - DNA, 407 bp, Homo sapiens
caatctgtttgggactttgagggctggggtgggaaggtagtggaatggaatagataaacagccagtcaagagctgtggggaggttgacagaattggggtgcaggtacatgtaggatacacagaagctttgtgtctgtggaggctgtatgagtctgtgggtgagcagcatgtctaagtgggtggaaacatgtatagctaaaggcaggaactcttcccatacagctaaacccttgttcaagcaatttaaataaacaagaacattttaaaaaattaaaaccccactaaaacaatccttgtggagcagttttcttgagtgcttaagtagagaccagattcaaaaaaggattaagagaatgtcgcataaccaagctgcagaaactgaaaccgagcggggtgtgaggggagat

SEQ ID NO: 1329 - DNA, 408 bp, Homo sapiens; identical to SEQ ID NO: 1145

SEQ ID NO: 1330 - DNA, 308 bp, Homo sapiens; identical to SEQ ID NO: 407

SEQ ID NO: 1331 - DNA, 702 bp, Homo sapiens
  misc_feature (1)..(702): n=a,t,g or c
ttttttttttaaaaagttgagtatttttattgggtcttcaaatctgggtcccacagtcctcatttgatgtcactcttagctctgtactgatctctcctctgacttttacggagggcttgcanaagtagcctattgcagccaaagtttcactccaaagctacctctctaaggtctaaggttactatggtaaagttttatacaacagttttccttaaaaatattccacgatttgttactcccaaacaaaataagattatgcaccactcggagaaattagtcattctgaagatgtctaagaactatatcactgccaaagaacatttctcagttcatattctttccttcaattttcatttgcacatccacactgtggggttcacaagtcatctgttttccatgatcttatggtcaagtcaagaggacttagacttatacatcattttccaacagctgggatgcgattcacagtttggtgcatacccatatgtatgaaaataagaacctcactcggtttaatcgataattcacatcgagtctcagattggcttgggcagtcttcagtactcctcacatgagatactgntacaggtgtcaggttcaggtcatcggattgagtaccagggctatcggaccagagcgtcagtgaagtaaccacatcttgctcacttcgacttgcagtaaccatagcgacgggactgtgtt

SEQ ID NO: 1332 - DNA, 411 bp, Homo sapiens
ttttttttttttttttttttttttttttttttttttttcttattcatcattcattcatttatttgattagttgaaaacacttccgactaaggaagcagagagcccacaatcctgtgggaaaacaggcctgggaactaatatctcaggggtagtgagggtcgggcccagatcctcaaaggttccctgcccctgaaattgcacctttgacagctgctgaattccaagcacagcgttaagtgctttacatggggtaaccctaaaaaacacactgggcctcagacactcccgtacacacacccaacctctaccctgtggatgtcctagataagggttttctcttcacaaaggtaaatcaactctttgcctccttagggagggaaggaataaaggcattatttttgagacttttct

SEQ ID NO: 1333 - DNA, 441 bp, Homo sapiens
ggttcaacagatacacactgattatctaacttatcatcaattggaaggtctagttcctcattaaacatgcttttcttatctcccatgtcaagttctggatctgtatatgcaatgatatcaaactctcctgaccttaagaggtcatccaggttgggatcattagtttccaaattatctaaagtatccaattcaactaccttgccatcctctgtatctaaatttaagttttcaagatcttcatcatctaagtctttgacttcaaccccctcaaggtctttaacatccagttccttcacagaagggtcatcagaatcaagtttttcctctagaccatcagaaggctgggtggttatctgtaaattatcagacgttgtttcagacggtacagatgttgacaaaggagcttctgaaaattcaccacctagtggatggttcagagtc

SEQ ID NO: 1334 - DNA, 474 bp, Homo sapiens
ttttttttttgatctgcaaaattttattaagcaatagctggacaactgttacaacttcaaatcatcaagaaaaaaataaggagattaatccgtctcagtaataaagacagaaaataacttggacaaaccacatcgttttgaatgcaaaccattaatgccttctagaatatctcctgcacaatctaatacacaaaatacgtaagaagaaaggcaaataaggatgagctcattaaaacgcatttgggagtcgcaacagatcttgcttggaaagtaaaaccagcaggatgctgaattaaaaaacaaacaaaccaacactggaggaactgaggtgcacaagcagtgcacgccactgccgaggtctggacatgaacatgctggtggtctagtttggtctggggcctatgcacctgcatcgtgcacttacggttaaaaaaaaaaaaaagggaaaaagaaaatgccagtagtaataaactc

SEQ ID NO: 1335 - DNA, 365 bp, Homo sapiens; identical to SEQ ID NO: 1147

SEQ ID NO: 1336 - DNA, 273 bp, Homo sapiens
tagctttgcacaaatattttaaagacaaattcagctagtctaagaacttcatgaaaataaaacaggtggataaatacttcatgtgcacaatgcactccatcagacgtcgtcggctgggagaggaggtatgttgatccttggccttgtgaagaatgctatcttctccctaaaggtctgcacttggatgggctctttgtggctctgccacgcagctggtagatctccttggaggccttcttcagcatcttctcagccgcctgctcatgacggtag

SEQ ID NO: 1337 - DNA, 383 bp, Homo sapiens; identical to SEQ ID NO: 1148

SEQ ID NO: 1338 - DNA, 436 bp, Homo sapiens
tgcagactttctttacccgtgcagaccatatggaaaactggccattagtgatgtatttttctccccgggctcctgagccactggcgtccaagttgctccatctgattcttaaattaattttcatcagttgtaaaactctcaagtgtgcacaagaatgagcctgtcttcccgtgtgaatgtgtaagtacagaaagaaggttttaaatgcacatagacacacactcttcaactgccatacgaagcgtctgcttccccagtcatttcaggaaccatcagattattcacggctgggaggccctggagtcttacaaatctgagcatggtggtgggcacctgtaatcccaacttactccaggaggctgaggcagaagaattgcttgaaaccgaaaggcagaggttgcggtgagccaagatcgcaccactgcactccagccta

SEQ ID NO: 1339 - DNA, 355 bp, Homo sapiens; identical to SEQ ID NO: 1151
  misc_feature (1)..(355): n=a,t,g or c

SEQ ID NO: 1340 - DNA, 256 bp, Homo sapiens; identical to SEQ ID NO: 208
  misc_feature (1)..(256): n=a,t,g or c

SEQ ID NO: 1341 - DNA, 433 bp, Homo sapiens
  misc_feature (1)..(433): n=a,t,g or c
ttttttaaaaacttttattttagattcaggattacatgagcagatttgttgtgaattctatttcaattaacatttagattaggtatcatttgaaaactgttagtattttaccaacattctgcatttctttcttaagatacaaagtctgtaggagtctaattcctgatagaaaaaaaaaatgtgggaaggatactaccacctcccatcaattcatgttcttctacttatactgttcaaatatgggaatgtccctattctcctctgtccctttcaaaccaattcaacctaaaccaaatgtttaaggtgcccttaaaagggcaaggaccattatacctatttcaggctggggggnccaattnaaaattggggaaagggatccttagggnttttttcccctatggcctttcccnggaacccggaggggggggattat

SEQ ID NO: 1342 - DNA, 345 bp, Homo sapiens; identical to SEQ ID NO: 758

SEQ ID NO: 1343 - DNA, 331 bp, Homo sapiens; identical to SEQ ID NO: 1153

SEQ ID NO: 1344 - DNA, 274 bp, Homo sapiens
  misc_feature (1)..(274): n=a,t,g or c
nanaactgatagcctagcaatacccaaattagaatttgttggctatcaataaataatattttataagcaacagaaacatttaaaaacttggaagaattgtgataggctagctaaaatacaacctacaaaataatttttgtaaggccaggnacagtggctcatgcctacaataccagcactttggnaaggccgaggcaggttgtattgcttgagcccagggagttcaagacctgcctggggcaacaaagtgaggaccccgtctctccaaaaaaaa

SEQ ID NO: 1345 - DNA, 417 bp, Homo sapiens; identical to SEQ ID NO: 1154
  misc_feature (1)..(417): n=a,t,g or c

SEQ ID NO: 1346 - DNA, 227 bp, Homo sapiens
  misc_feature (1)..(227): n=a,t,g or c
taaaaatttttttccactacttttaattgtcagccttttttttttttttaaacaattctctgtgccatgtatttaatcttcacatcatttccaatactggagatataaattgcatagagactgttagagagttctaatttgttttatgcatgttttgcaaatttgactccatgaaagggcattngaatgctgacttngtgtgcaagcattgnccatgnacataaaaa

SEQ ID NO: 1347 - DNA, 454 bp, Homo sapiens
  misc_feature (1)..(454): n=a,t,g or c
agaactttggagtaaaaatngtctctgtttccaagacgtgtgagatgtctgaactctgagatggtgtttcatctccacccgatttcaccaaaggggtgtcaatatctttaaagaactgatcttcagtaggaattggtgaggtggcaaggtaagcaggaagcttttcatattcttcttcagtctcctcaacaaagaaagcttctccgttatcacccaacttcatgtgaagatccactgcactgccgttgatttctatatcaatcactttctctttgggatctcagggactcccagctttcccaaacccgaacgtggaaaagggtgaacactggatagcctgcccatcctgctgctgtacccacggatggacatcaaatgcacccagagaggggtggcctggggttaatgcccttgtaggagttccttcacagtgacaatcaccttgcccagccan

SEQ ID NO: 1348 - DNA, 112 bp, Homo sapiens
ttaagaaataagaaatacatatatattgaaaaagtgataaatgtaggtatcctgagattctcaactataaaaagaacagtaatagcaatttgaataatacacataaaatcct

SEQ ID NO: 1349 - DNA, 444 bp, Homo sapiens; identical to SEQ ID NO: 878
  misc_feature (1)..(444): n=a,t,g or c

SEQ ID NO: 1350 - DNA, 193 bp, Homo sapiens
tgttctacttttaaagatatttaatgatgtttttcaaatcagtacaaaaatttaaatacaaaaatgatttgctattgacaagtctcaaatctgtcatgggaactcaaacaagttaccagtctgttcaccgttcattgtattctataaaatatttgataacagtcacccactacagacattcttttcccctgtg

SEQ ID NO: 1351 - DNA, 217 bp, Homo sapiens
taattttcatagatcaatttatttagaattacaaatattaagaatagaagatttatgcatttcttaattaacataacagtttagctaaatataaactctgcactaaagttctgcagtggcacaataccaacaaagaatacggaagcctttttaaactatacaaaaatttcaaatggaaaataatcttgtttcagttttattatacattaacatataa

SEQ ID NO: 1352 - DNA, 176 bp, Homo sapiens
gtgatttgccaatgcataacagggtttcaagtttcattaatgaagggactcaatcgcctagaacactaatttcccttccaaagaagagaacaacgaagtttgtgaaaggtgactcttcccctcttggaccgtggaattcacatttcatattcttgatatcaaacaccagtgaaagc

SEQ ID NO: 1353 - DNA, 474 bp, Homo sapiens
gcttaacctttttttcttttctgcgttttttatggtggccagagtgtcttgctgtactaaggtctgaataatatccattataggaccatgatctggatctctgagacaagcttctttcatcccatcggcttgaacaggggtcacttaacttatctcctttactccatttttctccactaggtggtctatatgctcttaatctctgcatttcctctttccagtgaggaggagtttcactgctgtcatcatcatctgactcagaacaggatcttgatcttggaggtgtgtgatagcgaattgtgccccttcctttaatcttccgtccagactttgatacagatggtttctgatcacttacaatgggtgcaacatcaggaatcttcggttcaggttctgcagtaacaacaggcatatctcttctcagtaaaaatcggttctcaggcactggaggaatctcttctgggcgggacacag

SEQ ID NO: 1354 - DNA, 481 bp, Homo sapiens
gtcatgcaaattgattttatttgtgaaaagattaagaagccacagtaaatgaaaggaaacggttatttaaactgctcccttgatagtcataattatccagttgaggtgtttctttgagagaagaatatagacaccaggcccacgagggtctccgcatttattttcaaggccaaaggaagtgacccctcggaaaacaccctcgcacaacaaagggcttccagaatctccattgcacgagtctcttccacctcggaggcttccagcacaaaccatattcattccaatcacagggttaaaattatagtgatttcgatcattgcagacttttctgtctatgatggtgatattgacttctctcagagtatcggaccaagatgcactattgtgagtcctgccccaccctgcaacttggcacatggttcctggtttcacatcatcccctttttaggtagatgaaggatagtcacatatttgttaattt

SEQ ID NO: 1355 - DNA, 412 bp, Homo sapiens; identical to SEQ ID NO: 1155

SEQ ID NO: 1356 - DNA, 502 bp, Homo sapiens
tttttctttttaagcccaggctttattccagcctctttttgaggaatttgactgaaaagttccctccctctcggctgatgcgccgtcccatcctgggctcctagtgtagggctcctacccttggctccagcaatgctgatgatgaggtgctggggtccccgaggacaggaggcctccaggaaggaaccggcctcagtccacgccgtccagggactgtggctctgcctctcgagctgtagcacctgattttctatgcaccgaaactgccaaggccagcttgtgttgtacagaaatggtcgcagatcaaacctgttgtcctcagggctgtagttctcggcgtggtaccgggtgtgagcgtggtcatcttgtgtctgttcatggagtacttggagaaaaaccgcttcactttgtcagcgacctgtcttggggtgcagatgtgtctccacatgccgaggagtttgcagaacatgctgtaagggcccatcttggccaccttcctgag

SEQ ID NO: 1357 - DNA, 289 bp, Homo sapiens; identical to SEQ ID NO: 1156

SEQ ID NO: 1358 - DNA, 398 bp, Homo sapiens; identical to SEQ ID NO: 1157

SEQ ID NO: 1359 - DNA, 421 bp, Homo sapiens; identical to SEQ ID NO: 1159

SEQ ID NO: 1360 - DNA, 418 bp, Homo sapiens; identical to SEQ ID NO: 955

SEQ ID NO: 1361 - DNA, 273 bp, Homo sapiens
tttttttttgcaaaattaaaatccagatcatatttggaagatagacagggaatgcttcctaaaactgccttgaaagtaaaagaaaaaagacttgtcaccatctttggactgctcctttaaaaaaaatttcattaattaaaaaaatattgagtgcttactatgtgctaggcattgagctaggagaaggctatgtggctactaacaggatacacatgatccatattctgatggtataaaaagtaaaacaggaaaaagaaacagactgaaaaatat

SEQ ID NO: 1362 - DNA, 182 bp, Homo sapiens
  misc_feature (1)..(182): n=a,t,g or c
gatcaaaattgaagacacattcagaggtttgattggttgagattaactggtgtggtggttggtgtatgtatgtttnattttnatgtctttgtatgtagttctacataatgcaaattgtgctttctgatggacaagacctcataactgtgattaatatcaataaaaaggggatgttgtggaaa

SEQ ID NO: 1363 - DNA, 211 bp, Homo sapiens
  misc_feature (1)..(211): n=a,t,g or c
gatgtaacatttgtnattttattggaaaaagctggtattaacatatttatagttttattcaacaattgggtaatttgtgagacaccaaagaaaaaaagaatgcacctatgagttacagagtccaaactgatcagggctgacaacttgaccaccatgtntcccacaccaccacccccaccaccaccaccaccaacagcttcgtcctcagaga

SEQ ID NO: 1364 - DNA, 407 bp, Homo sapiens; identical to SEQ ID NO: 1161
  misc_feature (1)..(407): n=a,t,g or c

SEQ ID NO: 1365 - DNA, 445 bp, Homo sapiens
ggactctctcaactgttgtttgctcaattgtcggtacagataggtaggattccagtctggagaaacccctaaaccactacaccctgcctcagagtagggaagaattttcagtatgtatgtggagacaggctggattagggagccttttgagtggcttctctaggatacctttcttgctaacatgagcaaggttcccctccaggcctgataaagcctgaagaggttagttatttccctactagttctggaagcatcttaattcatgccaccataggaggctgtcttcccctgctcctcccttgaatcaccacctagattttaagttgcttttctggagtttgatgatggaaaccagttcctgtttcaggtgccagaaactttttttttttttgagattgagtctcgctctttcatgctggagtgcagtggtgcgatctcagctcac

SEQ ID NO: 1366 - DNA, 544 bp, Homo sapiens
  misc_feature (1)..(544): n=a,t,g or c
ttaatttaaagaaaacttctttattaagtaaatggacagttggtacacagatattgcaaaaatttcgaggcgggtacatgaatgactgaaattcaggagacgcggggagttagcacagaagcactttcctcattcagagctcttttggctgcgagaaacagacacccaatcaaatcagcttcancaaaatgagagaatgtatcctgacaagggacgctcacagggcctaaaggaagagtgctgggcccctggaggactgagggaagccggcagtccctggaggcggtgccggctgctctccaggcgcctgtgattcctctggtccctgccttgctatgcgtatcttccctctgagcagagccattttctctaccacattcatgcaggtgcccatcccccggaacacacacagacaaacacacacacatggacacagtcanagctccagggtttctatgtgttcaggtaaggganctgcaaagcctgaacagcctccctaaatctagatgcccanctttatcctttcagctccatcagangatca

SEQ ID NO: 1367 - DNA, 448 bp, Homo sapiens
caaatccagaattactttatataaaagtacacattctaatatatgaaaagatattttatcattattactttactatatattactgaatacaccagactgcattttctcaaatggcaaatgaggcacatttctctttgattcccccaggaacctccgcatcatctgtcttttggaggattcagattcttacgacatctgtgataccgtccatgaggataccaacggtgcttagtagtaaagaacattttgctaagttgttctatcataggtccttcctcaaggtgttcaactttttcttccaatctggttttcagcacttgatcatgtgtttcttcattattatgcacaggatctggccgagggataggttttgtgtgttcatatggaatgtccacagaagggtggtagcatactattgtcctgccatcagaagtcagagcaagctcta

SEQ ID NO: 1368 - DNA, 447 bp, Homo sapiens; identical to SEQ ID NO: 1162
  misc_feature (1)..(447): n=a,t,g or c

SEQ ID NO: 1369 - DNA, 282 bp, Homo sapiens
  misc_feature (1)..(282): n=a,t,g or c
ttcggtgtttgtgtctttatttggagaccaggagacagattacagcttaatgagaggaacaacgactaagtgatctgatgggaagggtgagtttcctggcccttaggaagcaacagatgtgatttctaatcaacaaaaactagtaagtctggaacttttcagacaggaagctgagaggctaccaaaactaaaagtgaaagtgtctgccatcaatgtgtaagtctaaattacnaataaatacattaataaagccccnaacagggggtacaaaaatttgtaatg

SEQ ID NO: 1370 - DNA, 210 bp, Homo sapiens; identical to SEQ ID NO: 1163

SEQ ID NO: 1371 - DNA, 399 bp, Homo sapiens
tttcgaaacatttctctaaaactttatttcaaagttattcacctcaccgttaataaggtgtatgattaatgctctgtgccagtatttgcaggcctgcccattgccggcaatggactttgagaaaacccatttcctggcacccaaaagttaaattactcttttcaaaacataccgatctccccaacacttgcaaaagtattacatgcaccattttgccaccattctttaaatcagaacttacattattaatctacatcagtgaatgttaaatgaagtcattttaacaaattatgactgtacaaatcaaaatactactagttaatattagacaagagtatcttacaaacactactattacatattaccttgcaatctggaaacattatatttcatatttgg

SEQ ID NO: 1372 - DNA, 458 bp, Homo sapiens
  misc_feature (1)..(458): n=a,t,g or c
tcccaacaaaacgcaagggtgttctgctctttactaaataaacgttcccttcccagaaaccagccccaaactcatcactgttcaaatatgtggcaaggtgaggctctctgtccccctttaccaggagcacggatggtgtctgcaaggcagtgcctctcgagtcgtcagggagatggcccctcaggctcccaaacctgccaaatacaggactgtgagcggctcgggaggggtctcctttgctctccatccagcgggtcagcgggtccttgcgggggagaaagagccaaacagccgcctttcccttctggtcacagcacgagccaggttccaggcagaggctgtggcaaacattgtcatcgccccatggtgaaactgggcacttcctcctcctcctctgttccagatgnctccgnagaactgctggacccctgctccttgggctgaccgggtccttcttg

SEQ ID NO: 1373 - DNA, 135 bp, Homo sapiens
ttttttttttttttttttttttttttagaattaaaagaaaaggcaatgtttattagctatttcataaatcttctctgaaaagttctcaattcttctcactgaaacttgtaagcaactgagcagcttctgtctgta

SEQ ID NO: 1374 - DNA, 418 bp, Homo sapiens
  misc_feature (1)..(418): n=a,t,g or c
tttccaaatcttcatatttatttccacagtgttaacatggaatagacttagcaaccattgcagagaaaaaaaaaatctctcattggtttatgagttaaatcctgtaacaatgaatttcaaccattcgaagtcttctgctgcttaacatttactgaatcaaaggctgaagtaaatgggactctcatctagggtctcaggaaatcacacagctgggcctcgtgatgtatttacggatgggggattttaacttcttaatacaagggcaagtttgacaggttacagcccaatggaggtgcacggctctggtacanggggtttcttggnccctaacattcaaaggggcattttcatgggtcctggtttaattcttngggcctcggggggnccaatttccccatggggggggccggttttnatt

SEQ ID NO: 1375 - DNA, 441 bp, Homo sapiens; identical to SEQ ID NO: 1164

SEQ ID NO: 1376 - DNA, 450 bp, Homo sapiens
ttcatttttttgtgtcatcaaatctcatgatcagtttccctttaaagttaacctggtagtgctggttcagaagagcagcttttgcatgcccaatgtgtaagtaaccactggcctctggaggaaatctgacggtaacctttcccatctacgcacctggaagctcaacaaatttcccaacatcttgctttttctcaggtgccactcgagctttggttgttgaaacatcccacttgggtacctactgactggaaggcctgctgggcttcaagaaagccaaaccaacgttttacatgaactgggagctttcttctgtttcaactgttcttgccaggggagccatttcccttttagggggtgggccccaaacacaataaatcctggcttaaactcaagggaggtttcccaactaaggtatggttctcaggaggacagggcaatggattgaggttt

SEQ ID NO: 1377 - DNA, 488 bp, Homo sapiens; identical to SEQ ID NO: 1165

SEQ ID NO: 1378 - DNA, 390 bp, Homo sapiens
ggctttcataattatatttttcttttaaagaaaaatatcaacccattgtcaatgcactgtttttcaaagcatttaaatagagggtaaaaccctttggaaattaatacagaagaaatgattcactttatgcataaaaaataaataataatatagctgagacatgtggtttgcttctgctcttgaagatgtgaacagcttctaagcattcattttctctgacccatacaacagcttctcagtgatacagggtttaatttaaacacatacaatgtccacccccaaaccttctgcccacatctacaagttttatttattttgtgggttttcagggtgactaagtttttccctacattgaaaagagaagttgccaaaaggtgcacaggaaatcat

SEQ ID NO: 1379 - DNA, 484 bp, Homo sapiens; identical to SEQ ID NO: 839

SEQ ID NO: 1380 - DNA, 287 bp, Homo sapiens
ttttttttttttttttttttttctatctgtgaaaaacatttattctgagaatctaaaatctggacaaagtactggactttagaaaaagcctacacaaaattgtctcattcttccctaatacattaataatctaagaataaggaggtgaaaaaaaccctttaaaaataacattgctccagtttgtctgcaggtatgtgatttaaaatatccctgttttattgaggtataggctgcaaactttggtaaaattaggaaaaattaacaaaccctttcaaaagaaaaaaaat

SEQ ID NO: 1381 - DNA, 401 bp, Homo sapiens; identical to SEQ ID NO: 1167

SEQ ID NO: 1382 - DNA, 533 bp, Homo sapiens; identical to SEQ ID NO: 1168

SEQ ID NO: 1383 - DNA, 384 bp, Homo sapiens; identical to SEQ ID NO: 1171

SEQ ID NO: 1384 - DNA, 446 bp, Homo sapiens
tttttttttaccctggatgatgattaccattgttgctaatagtttttatctaagtaagcctatgcttgatttctttcagaaaccatttcattggatatcattttttctaaggtttcatttctcccaagtttgtttttttcaataggatagtcagttgacaaaatgtttggcattcttatactatttattgtttacatttaaaattaggtgcaaacagctagtttctcaaatgacctcctaattgactttttttctttaagataaaagtattggttgaggcactggtttataagcatttgtggactttgcagccttatctttaaaaaaaaaaaaattaaaactgtggtccttaaatatcctgtctgaactttggattggaaggcacatttccctttgttattggctatgtagattagcttagaatctgtaagcatatagtgtggtta

SEQ ID NO: 1385 - DNA, 470 bp, Homo sapiens
tttttcaggatgtgacaacgtttttaatgcaaagtcaaccattagcatctttcccatgtacttattagatgtgaaatggcaggacttcacggccccgtttgcatattttcctactccgcagacgaataatattttcagggaaggcagcgcagtctgtgccgtcacaatcgggcgactgtgggtgatgagggatgatgattttccaggaggccctggggtcagaggactcctagagggagtttccagcccctcaatcgcagatggatggcctgttgatgttgtaactggggtggaagttgagccggtcacaggaggtgatgcagttatcggggccagtcacgatgcttttctccaggtaaacattgagagtattgttccggaacattccacccgctgcaagttgttgggaaaatttattcgaatttggataaaatactttaggcatctcgtgcacggtgggggctctgctc

SEQ ID NO: 1386 - DNA, 401 bp, Homo sapiens
agtcccagagccagtgtttattagcaagatggaacccaaaggcggctgtggcctgggcagcagaaggccaccaggagcccccacccatctacccaactgccccccagagctaattacatccacacccatcccctgaagtggtggacataagggagccctggggagcctctaccggccccaggcctctaccacggaccccctcccctcagagctggggcctcccgtcagctctgcctgggcctggccctctgctatgctcccagcctctgagtcaaagtggcacagggaaagctaaggaggtagagtggggtggccctgcctggccaggcggggaggggagaaggggctgaaggggctgtcccacccaggcaggatgctcttctcctatccccaataaatag

SEQ ID NO: 1387 - DNA, 403 bp, Homo sapiens; identical to SEQ ID NO: 1174

SEQ ID NO: 1388 - DNA, 225 bp, Homo sapiens
ttaagaacaaagcggaggggtttattatagggacattctgaaaccacaacggaaaagatgtccgtacaggtggatggggatggagatccagcgtcggagtacacagacttcagggggcctcctgcctggcacgttcgttcgtctcccgtatcgccgtaagaccctgagaccccgagcctctgcaggagagacgcacaaagaagcctcctccctgtggcctggctc

SEQ ID NO: 1389 - DNA, 253 bp, Homo sapiens; identical to SEQ ID NO: 1175

SEQ ID NO: 1390 - DNA, 345 bp, Homo sapiens
gggttaaatatttattaggtttgttttaatcaggaataaatacatgatttagcaaagtgtaatgcttcccactgagaaatccctctgggtgctccccaaatgttccaatcacattcgtcacaacggaaaacaacacataagatactgtgcagacatctggagttcagggggtcacctgccttatgcgggaagtcaatgtccacagtgttacattcatttctcatacgttggctggttcctttgaaatagccttttggaacggttggggaaaccacagatgtctccttgtataaacacactagaatctatgatacagaaaactgtgtaactgcacatacacatacc

SEQ ID NO: 1391 - DNA, 382 bp, Homo sapiens; identical to SEQ ID NO: 1177

SEQ ID NO: 1392 - DNA, 519 bp, Homo sapiens; identical to SEQ ID NO: 1178

SEQ ID NO: 1393 - DNA, 393 bp, Homo sapiens
aaattaaataaacttttattttggaatgatactagatttacagagaagttgcagagatagtacaaagagttcctgtatacccttcacccagcctaccccaaggtcaacatcttacatcaccatggtacatctgtcaaaaccaagggactgaaattggtatattaactaaaattcagacttttttcagatttccaattttcccactaatgtcctgtttttgttccaagacccaatccaggatgccacattgcactgaagacactctcccttttcaattctattactggtcacctcagtcaactttcccggggaaagagaatgcatgggaaaagctcttgtccttattattgaactggagaaactgaggcttaaaagtgccgagtgaccaagttc

SEQ ID NO: 1394 - DNA, 277 bp, Homo sapiens
tgccgtccyccycccagsgtgcctggcatggtcgcaggggagcgggtbcctggagtcccggtgacaccacggggcacactgagggagctgaggagccggggccgcgcasctcctggdtgctcagcggatcgtgtacttktcccacttcttttcagggtcgtagggttcccagcggctggcgggaaagatgtgcttkttcttctcgtaccagctcctcagcaccaccttgcctgcatgggrctcatccttctccacagtgggsgtcactgagcaaccg

SEQ ID NO: 1395 - DNA, 204 bp, Homo sapiens
  misc_feature (1)..(204): n=a,t,g or c
actggagtcttctgagatcttattaaatgttttatttcttaacattcctacatattaataaatgtcctatttcttaacctgatagtgggtacatgaatgtttatnattctgtaaatcatattgtgcttatgaatngtttcacaattaaaaaaaaaattcatcccacctattcccnttgcncaggttccatgctcattaaagacc

SEQ ID NO: 1396 - DNA, 410 bp, Homo sapiens
  misc_feature (1)..(410): n=a,t,g or c
ctcataaacaannantttattaaantacatgttacataaaagaacatataaatggaccattaaatacattcagtttattttaaacaaatttacatagatacttatttacatttctccattgtattcttaaattatttttccaagcttactaccgataaanggtaatacaatgatcatctgctcacacagatgcatagagaagttgtccacagggctnagtaaagcaccacttcccagggtnacacngcttattagatcttccagcaacaactcatgctgaaggtgctctcttctgaggcagcccttgagggtgaggcttttgctttaggaggttgctggggggttgggttctgagggagctgacccggggcagcggatggggtccttgctgntttgacccgacttgggac

SEQ ID NO: 1397 - DNA, 319 bp, Homo sapiens
  misc_feature (1)..(319): n=a,t,g or c
tttttttttgttgagcagttgtttattctggccctcacagccttggtagttccacaaaggccctggggatggggaacaggctacaggaacccacctgtcttcctggtcagggcccctggcctnagncagcaggccaatcctggtngggcacagggttctgtgctgttggctgcctacctctgaatatcctggccagcaagccatgccttccccgcccctgggccctgggagccnttnagctcctntccccataatgggtcctgggcctaggatgaggggaaggtcccagtttcttgtagggtnttatctaggggtnctg

SEQ ID NO: 1398 - DNA, 348 bp, Homo sapiens
  misc_feature (1)..(348): n=a,t,g or c
aanttgtattttttgtagagatggggttttaccatgttgggtaggctggtctcaaactcgtgagctcaggtgatccacccgcctcagcctccaaaagtgctgggattacaggtgtgagccaccacacctggccaatgggcatnttctttggttgaattttaaaatattattttttatcatttaccattttctagggcattttaagacccaatttattctgccacaatcatgtcatcagaatagtcaaatgaaatgactttcatttgaattctcactattaagatttaaaattgtggaaaactaaagtggggattggagtagactgttagggattagntcctaggatgg

SEQ ID NO: 1399 - DNA, 419 bp, Homo sapiens
  misc_feature (1)..(419): n=a,t,g or c
ngagccagaaaaggattttttttaattcaagtaactgaaataggaaaccagagggggagccccaggctgggataaatcatggctacccctccccaacagaacagggggaggaggtggcccctacacccattatggtcgattcgggcccccttgctcactctgctgcagcatcctagaggcagggccccaccttccctgggactggggtagtcggtcacccagcctgcattgccccagcccctnttccccacaaagagtatcttgggggagggnttcgtggggcagaacaggagggcaatgagggatgaacattgctcaaactcctttcaaaggggcacctgaccgcacaggggaggntgggcaggaagggcaagggntgggggatgccgtntaaggagggcggangcaggcanttttgg

SEQ ID NO: 1400 - DNA, 353 bp, Homo sapiens; identical to SEQ ID NO: 1181
  misc_feature (1)..(353): n=a,t,g or c

SEQ ID NO: 1401 - DNA, 195 bp, Homo sapiens; identical to SEQ ID NO: 1182
  misc_feature (1)..(195): n=a,t,g or c

SEQ ID NO: 1402 - DNA, 295 bp, Homo sapiens
  misc_feature (1)..(295): n=a,t,g or c
ntnaaatgtgtaatataaatttattctgtgacattttcctcattgagagatattttaacatagattaaaatacatcaatatttcatgaaaaataaattctagaagaatttagataatatctgtaatgtacatgatttgaccctgaatatcctnttcgtnttncacttcaaacatcattttttaaaaagtaacataaacatgataaggactgcaacattcttcatatatcttgngtctcataaattttaattcaactgcccgttcttttcncaactatgtatgttaatggtatttg

SEQ ID NO: 1403 - DNA, 441 bp, Homo sapiens
  misc_feature (1)..(441): n=a,t,g or c
aacttgttaaacacatttattgatttcttgacagtaaccaaacacagtgagtgaccattataaacaagaaaagaaaggcattcgttttgtactttgtgagatctggctgcacctggagagaaaacatacccctttcccaggaacttacaaggcaaagtgcattccttcacgggagcatcacaggggggcatggcagttttgaaacgcaagaagtctgtcgcctgctatctcaggctgaagctcacctcatgtgaatgattgagccatggacgtggaattaaagtcatacttgcttagcaaatgcattcctgattgccacaaactcagtaaaaactggctgcaaatgaacaaaacatgtagatgaaggaacaagtgaaatcaaagaatgcagttgcatggagccagggcttagcctgtaaggaaggagaacagaccanagcc

SEQ ID NO: 1404 - DNA, 437 bp, Homo sapiens; identical to SEQ ID NO: 1183
  misc_feature (1)..(437): n=a,t,g or c

SEQ ID NO: 1405 - DNA, 178 bp, Homo sapiens
aatacagggtctcactctgttgtgccagctggagtgtagcagcacaattgtagttaactgcagcttttaactcctgggcttaagaaaaggttaagagatcctcttgcctcagctttctgagtagctaggactacaggtaagtaccaccaggtctggctaattttaaaatttttttgtt

SEQ ID NO: 1406 - DNA, 575 bp, Homo sapiens
  misc_feature (1)..(575): n=a,t,g or c
tttttaaatagagatgaggttttgctatgttgcccaggctggtctcctggactcaagcaatctcccacttcaggctaccaaagtgctgggatttacaggcatgagcacctctcccagtctcagttattattttaataaatgagactgaacgtcctcttataaggctcactcccttgttcctactacatttgctctgtttaagtatctctttaaattcttcagttaagatcatcccttttatcagaaacctagacaccacaaagtagctttctcacctttaattctccatagggatcactattatactataatatttgcatacgtatgtgtatatatgtatttgcttttttaaaaaagtaaaaatgctcttctcactctttgtcgatataggcacccaggtacgtagttagaaattaaataaaggccacaataatttcccaagggaagatcattaaaaagaaaaatcctttcttcctctaatatcacatagctgggccttatggnatgcagctaagaaaaagggattgcctnggtgacaggaagaccaatcttcncccttggggtgtagnggaatt

SEQ ID NO: 1407 - DNA, 472 bp, Homo sapiens
  misc_feature (1)..(472): n=a,t,g or c
tttttttgttcttctataccatttaattaaatatgagatggttattacatacattgtacgcttatatactaagcagctctgcganaatgtttgtaatgcatgtggatagtacacggtcaaatcagagatcttcactgtagtgaacaatggatattttaaagaatagtcccaacaataaaccacagagctgacaaaaatgccacctaatctgcatcatttccaggagctctgccacatattcttcctggcccgtaccaagtctcttagcccctctagaagagctgagaaaatgcaggtgtgcacctctgaacagcccatacttggcttttctgaagcaaattcccatggaaaccacattgaaggaagaggcaaaggctggtaggaaatcagctgaangctgggtgccctagacccagtcatgtttgttggccaattagctggcttttcattncatgctatatagaactggcag

SEQ ID NO: 1408 - DNA, 366 bp, Homo sapiens; identical to SEQ ID NO: 1184
  misc_feature (1)..(366): n=a,t,g or c

SEQ ID NO: 1409 - DNA, 295 bp, Homo sapiens; identical to SEQ ID NO: 1185
  misc_feature (1)..(295): n=a,t,g or c

SEQ ID NO: 1410 - DNA, 281 bp, Homo sapiens
  misc_feature (1)..(281): n=a,t,g or c
caaggttcnaanggtttattagggagtcgggagggagaaaacccagggagtcccccaggccatccacattgctccccggcatgtgacgatccagcctgggctttctctgggtcctttctggacagaggctggccaagcaggcagcagcctcaaggggagtgggtaggagctgggggccttctggcagccctactcagaggatgatctggttggtgaagcttcggctcagctccttgtgtggcagaacantcgagttcaggatgagcacctcggcagggatc

SEQ ID NO: 1411 - DNA, 382 bp, Homo sapiens; identical to SEQ ID NO: 1187
  misc_feature (1)..(382): n=a,t,g or c

SEQ ID NO: 1412 - DNA, 404 bp, Homo sapiens; identical to SEQ ID NO: 1188

SEQ ID NO: 1413 - DNA, 391 bp, Homo sapiens
  misc_feature (1)..(391): n=a,t,g or c
tantnntccagctcttttattgagatcagtggtggctctgaaaagcgtntttngggttttagaagtaggcgttcgctaatttcttcttgggcgccgcttcttaggcttgacaaccttgggcttagcggccttggnttcacagccttagcagcacttttggcagctttcttgggcttcgcaaccttggccttctttgggctcttagcactttcttggttacagtggccgcggcggctntcttcgctttcttcggngttttcttagcgctcttcttcggagttgcgccgccagccgcccttcttgggcttcttggctnccccaactggcttcttaggtttgggtccgcccgccttttnaaccntggggcttggncttccccggagcttgcctt

SEQ ID NO: 1414 - DNA, 431 bp, Homo sapiens; identical to SEQ ID NO: 1189
  misc_feature (1)..(431): n=a,t,g or c

SEQ ID NO: 1415 - DNA, 18596 bp, Homo sapiens; identical to SEQ ID NO: 1191

SEQ ID NO: 1416 - DNA, 3493 bp, Homo sapiens; identical to SEQ ID NO: 1192

SEQ ID NO: 1417 - DNA, 836 bp, Homo sapiens; identical to SEQ ID NO: 970

SEQ ID NO: 1418 - DNA, 5404 bp, Homo sapiens; identical to SEQ ID NO: 1197

SEQ ID NO: 1419 - DNA, 4121 bp, Homo sapiens; identical to SEQ ID NO: 1198

SEQ ID NO: 1420 - DNA, 4792 bp, Homo sapiens; identical to SEQ ID NO: 993

SEQ ID NO: 1421 - DNA, 1685 bp, Homo sapiens; identical to SEQ ID NO: 1200

SEQ ID NO: 1422 - DNA, 2334 bp, Homo sapiens; identical to SEQ ID NO: 433

SEQ ID NO: 1423 - DNA, 3220 bp, Homo sapiens; identical to SEQ ID NO: 694

SEQ ID NO: 1424 - DNA, 835 bp, Homo sapiens; identical to SEQ ID NO: 1205

SEQ ID NO: 1425 - DNA, 840 bp, Homo sapiens; identical to SEQ ID NO: 1206

SEQ ID NO: 1426 - DNA, 2439 bp, Homo sapiens; identical to SEQ ID NO: 441

SEQ ID NO: 1427 - DNA, 1488 bp, Homo sapiens; identical to SEQ ID NO: 1209

SEQ ID NO: 1428 - DNA, 2806 bp, Homo sapiens
ggatccaggactgagatcccagaaccatgaacctggccatcagcatcgctctcctgctaacaggtacccggcatggggcaggactggggctccaggcgccctggcttccttccctccagagaagcagcttctccctcacagtctcagaaaagcgcaggtgacaaagagagggctctttttcatcctgaagtcagccgatccaccgcgctgatattctgacggcctgaggtggtttttggaaacacagtttgctgagccctccttcacactattgaactagaatccccaactgagaacccaggaaccagcatcaactccctaagatctcctgtccttgaaacacattgataggatccaaggctcaagcagagtggggagggaggctggggtctgcaaaggagaagtgggatccctggggtggggaaaggcactcagagagcagaccccggtcccctccctagccaggcccatctctccacttcaggtgggtgggaggcccctgtgccgcaggcccctccagtttgaaggaggcactgctggtgccagtcttgcaggtctcccgagggcagaaggtgaccagcctaacggcctgcctagtggaccagagccttcgtctggactgccgccatgagaataccagcagttcacccatccagtacgagttcagcctgacccgtgagacaaagaagcacgtgctctttggcactgtgggggtgcctgagcacacataccgctcccgaaccaacttcaccagcaaataccacatgaaggtcctctacttatccgccttcactagcaaggacgagggcacctacacgtgtgcactccaccactctggccattccccacccatctcctcccagaacgtcacagtgctcagaggtgagacaagcccctaacaaggtcaagtgagctgggagagccaggctcggggacagcaggcagttcccttggctggactagagaggagaatagccccataacgctctcaccctctcccaactgctgcctggtcaactggggaaccattgccttcggtgtgaatggggtgaagagctcagggccagacaggcagagcagtgtggttccaccagaactgtgggcaaggcctttggcccctaatcttccttctcccagcgggaaacagggatgacaccacctccctcagccagttttcttgtcatgatgtttagtaaggttttcataagatgatatgtgtgcaagagatcagtaatctgcaaatgggaaagatggctggttctgtgagaccaggctgttcctggtcccagctaagacattgcagtacccacctcccaaagggagtacacccttgctttgggcctgtgcctgcctgagtcctgatccgtcttccttcctaccctgcccccggcccccttctctttctgcagacaaactggtcaagtgtgagggcatcagcctgctggctcagaacacctcgtggctgctgctgctcctgctgtccctctccctcctccaggccacggatttcatgtccctgtgactggtggggcccatggaggagacaggaagcctcaagttccagtgcagagatcctacttctctgagtcagctgaccccctccccccaatccctcaaaccttgaggagaagtggggaccccacccctcatcaggagttccagtgctgcatgcgattatctacccacgtccacgcggccacctcaccctctccgcacacctctggctgtctttttgtactttttgttccagagctgcttctgtctggtttatttaggttttatccttccttttctttgagagttcgtgaagagggaagccaggattggggacctgatggagagtgagagcatgtgaggggtagtgggatggtggggtaccagccactggaggggtcatccttgcccatcgggaccagaaacctgggagagacttggatgaggagtggttgggctgtgctgggcctagcacggacatggtctgtcctgacagcactcctcggcaggcatggctggtgcctgaagaccccagatgtgagggcaccaccaagaatttgtggcctaccttgtgagggagagaactgaggatctccagcattctcagccacaaccaaaaaaaaataaaaagggcagccctccttaccactgtggaagtccctcagaggccttggggcatgacccagtgaagatgcaggtttgaccaggaaagcagcgctagtggagggttggagaaggaggtaaaggatgagggttcatcatccctccctgcctaaggaagctaaaagcatggccctgctgcccctccctgcctccacccacagtggagagggctacaaaggaggacaagaccctctcaggctgtcccaagctcccaagagcttccagagctctgacccacagcctccaagtcaggtggggtggagtcccagagctgcacagggtttggcccaagtttctaagggaggcacttcctcccctcgcccatcagtgccagcccctgctggctggtgcctgagcccctcagacagccccctgccccgcaggcctgccttctcagggacttctgcggggcctgaggcaagccatggagtgagacccaggagccggacacttctcaggaaatggcttttcccaacccccagcccccacccggtggttcttcctgttctgtgactgtgtatagtgccaccacagcttatggcatctcattgaggacaaagaaaactgcacaataaaaccaagcctctggaatctgtcctcgtgtccacctggccttcgctcctccagcagtgcctgcctgcccccgctt

SEQ ID NO: 1429 - DNA, 634 bp, Homo sapiens; identical to SEQ ID NO: 1211

SEQ ID NO: 1430 - DNA, 13500 bp, Homo sapiens; identical to SEQ ID NO: 1212
  misc_feature (1)..(13500): n=a,t,g or c

SEQ ID NO: 1431 - DNA, 2206 bp, Homo sapiens; identical to SEQ ID NO: 1216

SEQ ID NO: 1432 - DNA, 1539 bp, Homo sapiens
gaattcggggggagggggcagtgtcctccgagccaggacaggcatgttgttgggactggcggccatggagctgaaggtgtgggtggatggcatccagcgtgtggtctgtggggtctcagagcagaccacctgccaggaagtggtcatcgcactagcccaagcaataggccagactggccgctttgtgcttgtgcagcggcttcgggagaaggagcggcagttgctgccacaagagtgtccagtgggcgcccaggccacctgcggacagtttgccagcgatgtccagtttgtcctgaggcgcacagggcccagcctagctgggaggccctcctcagacagctgtccacccccggaacgctgcctaattcgtgccagcctccctgtaaagccacgggctgcgctgggctgtgagccccgcaaaacactgacccccgagccagcccccagcctctcacgccctgggcctgcggcccctgtgacacccacaccaggctgctgcacagacctgcggggcctggagctcagggtgcagaggaatgctgaggagctgggccatgaggccttctgggagcaagagctgcgccgggagcaggcccgggagcgagagggacaggcacgcctgcaggcactaagtgcggccactgctgagcatgccgcccggctgcaggccctggacgctcaggcccgtgccctggaggctgagctgcagctggcagcggaggcccctgggcccccctcacctatggcatctgccactgagcgcctgcaccaggacctggctgttcaggagcggcagagtgcggaggtgcagggcagcctggctctggtgagccgggccctggaggcagcagagcgagccttgcaggctcaggctcaggagctggaggagctgaaccgagagctccgtcagtgcaacctgcagcagttcatccagcagaccggggctgcgctgccaccgcccccacggcctgacaggggccctcctggcactcagggccctctgcctccagccagagaggagtccctcctgggcgctccctctgagtcccatgctggtgcccagcctaggccccgaggtggcccccatgacgcagaactcctggaggtagcagcagctcctgccccagagtggtgtcctctggcagcccagccccaggctctgtgacagcctagtgagggctgcaagaccatcctgcccggaccacagaaggagagttggcggtcacagagggctcctctgccaggcagtgggaagccctgggtttggcctcaggagctgggggtgcagtgggggactgccctagtccttgccaggtcgcccagcaccctggagaagcatggggcgtagccagctcggaacttgccaggccccaaaggccacgactgcctgttggggacaggagatgcatggacagtgtgctcaagctgtgggcatgtgcttgcctgcgggagaggtccttcactgtgtgtacacagcaagagcatgtgtgtgccacttcccctaccccaacgtgaaaacctcaataaactgcccgaagc

SEQ ID NO: 1433 - DNA, 1424 bp, Homo sapiens
aggagccttaggaggtacggggagctcgcaaatactccttttggtttattcttaccaccttgcttctgtgttccttgggaatgctgctgtgcttatgcatctggtctctttttggagctacagtggacaggcatttgtgacagcactatgggactgagtaacattctctttgtgatggccttcctgctctctggtgctgctcctctgaagattcaagcttatttcaatgagactgcagacctgccatgccaatttgcaaactctcaaaaccaaagcctgagtgagctagtagtattttggcaggaccaggaaaacttggttctgaatgaggtatacttaggcaaagagaaatttgacagtgttcattccaagtatatgggccgcacaagttttgattcggacagttggaccctgagacttcacaatcttcagatcaaggacaagggcttgtatcaatgtatcatccatcacaaaaagcccacaggaatgattcgcatccaccagatgaattctgaactgtcagtgcttgctaacttcagtcaacctgaaatagtaccaatttctaatataacagaaaatgtgtacataaatttgacctgctcatctatacacggttacccagaacctaagaagatgagtgttttgctaagaaccaagaattcaactatcgagtatgatggtattatgcagaaatctcaagataatgtcacagaactgtacgacgtttccatcagcttgtctgtttcattccctgatgttacgagcaatatgaccatcttctgtattctggaaactgacaagacgcggcttttatcttcacctttctctatagagcttgaggaccctcagcctcccccagaccacattccttggattacagctgtacttccaacagttattatatgtgtgatggttttctgtctaattctatggaaatggaagaagaagaagcggcctcgcaactcttataaatgtggaaccaacacaatggagagggaagagagtgaacagaccaagaaaagagaaaaaatccatatacctgaaagatctgatgaagcccagcgtgtttttaaaagttcgaagacatcttcatgcgacaaaagtgatacatgtttttaattaaagagtaaagcccatacaagtattcattttttctaccctttcctttgtaagttcctgggcaacctttttgatttcttccagaaggcaaaaagacattaccatgagtaataagggggctccaggactccctctaagtggaatagcctccctgtaactccagctctgctccgtatgccaagaggagactttaattctcttactgcttcttttcacttcagagcacacttatgggccaagcccagcttaatggctcatgacctggaaataaaatttaggaccaataaaaaaaaaaaaaaaaaaaa

SEQ ID NO: 1434 - DNA, 2814 bp, Homo sapiens; identical to SEQ ID NO: 499

SEQ ID NO: 1435 - DNA, 3143 bp, Homo sapiens; identical to SEQ ID NO: 1223

SEQ ID NO: 1436 - DNA, 1896 bp, Homo sapiens
gcggcggtggcggaggcggacacattggcgtgagacctgggagtacgttgtgccaaatcattgccacttgccacatgagtgtaaatgatggcggatgcaagtatgtcctctgccgatgggaaaagcgattatggcctgcgaaggtgacagccattattctgtaacttcaggacttagaaatgactttcgggtgacaagtaaaatcttgatcaggagatacctaggatttgcttcagtgaaataattgagccagaacacggttggcactgattctcgttccccatttaatggggttttggtctagtgcttccaaggttacacttccagaaatgtcttttttttttcacactaaaaaaaaaaaaaagaatcagctgtaaaaaggcatgtaaggctgtaactcaaggaaagatctggcaagcagccctgtgatagtaaattatggtcgtgttcagggaatgctttccagcaattcagtagacagtgctcagctgcaatgcaaaagcccaggtccttgtctttgtctgccactggcctctcatgcctcagtttccccatctgtgaaacaatggggattggaccaaatatctgaaatcccatggttataggccttcaggattacctgctgcatttgtgctaaagtttgccactgtttctcactgtcagctgttgtaataacaaggattttcttttgttttaaatgtaggttttggcccgaaccgcgacttcaacaaaaaataagagaagaaaggaatattttctagctgtgcaaatcctctccctagaggaaaagttaattgttgtgttgttttaatactgttttttcccgtgtagatttctgatacttcaatcccctactcccccaaaacagttgaagcccagcccactcttaatgggcttattcaccatttgtgtaattcattaatgctcataataacctcatgagaaagcaactagtttgattttatgtcagtttggaagctgaagatccaaacgaggcattctgtgagatctatggagagattggtacaaacactgaatacatgtaaattatactcagggtagaccctatttgtggttaaaatagggatatttccttttttttttttttttttttgactgtttcttaatcagtgccatgccaggaaaatagggatgtttccttcccagagatctgtgtgtcttttttcagaaacgtctgtgacaggcccatcaattttgaaatatttggtttttgagcctgtcactctaaaccagcgtttaacgttcaaaaggcaaataactgatgaccaggcggcacattgttctgctccgtgagtgtctggcactgggaaaggtgtagattgtctagaatgacagcaattccgacgccccagtcagtcctgcgtgattgtggcgagggcgcgtctggcaccgggaaggtgtagatcatctagaatgacggcgattccgacgccccggtcagtcctgcgtgattggcgagggtgcatctgtcgtgagaattcccagttctgaagagagcaaggagactgatcccgcgtagtccaaggcattggctcccctgttgctcttccttgtggagctccccctgccccactccctcctgcctgcatcttcagagctgcctctgaagctcgcttggtccctagctcacactttccctgcggctgggaaggtaattgaatactcgagtttaaaaggaaagcacatccttttaaaccaaaacacacctgctgggctgtaaacagcttttagtgacattaccatctactctgaaaatctaacaaaggagtgatttgtgcagttgaaagtaggatttgcttcataaaagtcacaatttgaattcatttttgcttttaaatccagccaaccttttctgtcttaaaaggaaaaaaaaaa

SEQ ID NO: 1437 - DNA, 2827 bp, Homo sapiens
tggcgatgctactgtttaattgcaggaggtgggggtgtgtgtaccatgtaccagggctattagaagcaagaaggaaggagggagggcagagcgccctgctgagcaacaaaggactcctgcagccttctctgtctgtctcttggcacaggcacatggggaggcctcccgcaggtggggggccaccagtccaggggtgggagcactacagggcacgagttggtttgggagctgccagtctcctgggaggatcgcagtcagcagagcagggctgaggcctgggggtaggagcagagcctgcgcatctggaggcagcatgtccaagaaagggagtggaggtgcagcgaaggacccaggggcagagcccacgctggggatggaccccttcgaggacacactgcggcggctgcgtgaggccttcaactgagggcgcacgcggccggccgagttccgggctgcgcagctccagggcctgggccacttccttcaagaaaacaagcagcttctgcgcgacgtgctggcccaggacctgcataagccagctttcgaggcagacatatctgagctcatcctttgccagaacgaggttgactacgctctcaagaaccttcaggcctggatgaaggatgaaccacggtccacgaacctgttcatgaagctggactcggtcttcatctggaaggaaccctttggcctggtcctcatcatcgcaccctggaactacccattgaacctgaccctggtgctcctggtgggcaccctccccgcagggaattgcgtggtgctgaagccgtcagaaatcagccagggcacagagaaggtcctggctgaggtgctgccccagtacctggaccagagctgctttgccgtggtgctgggcggaccccaggagacagggcagctgctagagcacaagttggactacatcttcttcacagggagccctcgtgtgggcaagattgtcatgactgctgccaccaagcacctgacgcctgtcaccctggagctggggggcaagaacccctgctacgtggacgacaactgcgacccccagaccgtggccaaccgcgtggcctggttctgctacttcaatgccggccagacctgcgtggcccctgactacgtcctgtgcagccccgagatgcaggagaggctgctgcccgccctgcagagcaccatcacccgtttctatggcgacgacccccagagctccccaaacctgggccgcatcatcaaccagaaacagttccagcggctgcgggcattgctgggctgcggccgcgtggccattgggggccagagcaacgagagcgatcgctacatcgcccccacggtgctggtggacgtgcaggagacggagcctgtgatgcaggaggagatcttcgggcccatcctgcccatcgtgaacgtgcagagcgtggacgaggccatcaagttcatcaaccggcaggagaagcccctggccctgtacgccttctccaacagcagacaggttgtgaaccagatgctggagcggaccagcagcggcagctttggaggcaatgagggcttcacctacatatctctgctgtccgtgccattcgggggagtcggccacagtgggatgggccggtaccacggcaagttcaccttcgacaccttctcccaccaccgcacctgcctgctcgccccctccggcctggagaaattaaaggagatccgctacccaccctataccgactggaaccagcagctgttacgctggggcatgggctcccagagctgcaccctcctgtgagcgtcccacccgcctccaacgggtcacacagagaaacctgagtctagccatgaggggcttatgctcccaactcacattgttcctccagaccgcaggctcccccagcctcaggttgctggagctgtcacatgactgcatcctgcctgccagggctgcaaagcaaggtcttgcttctatctgggggacgctgctcgagagaggccgagaggccgcagaacatgccaggtgtcctcactcaccccaccctccccaattccagccctttgccctctcggtcagggttggccaggcccagtcacaggggcagtgtcaccctggaaaatacagtgccctgccttcttaggggcatcagccctgaacggttgagagcgtggagccctccaggcctttgctctcccctctaggcacacgcgcacttccacctctgccccatcccaactgcaccagcactgcctcccccagggatcctctcacatcccacactggtctctgcaccacccctctggttcacaccgcaccctgcactcacccacagcagctccatccactgggaaaactggggtttgcatcactccactgcacagtgttagtgggacctgggggcaagtcccttgacttctctgagcctcagtttccttatgtgaaagttgctggaaccaaaatggagtcacttatgccaaactctaataaaatggagtcgggggggcacatagaagccctcacacacacatgcccgtaacaggatttatcaccaagacacgcctgcatgtaagaccagacacagggcgtatggaaaagcacgtcctcaaagactgtagtattccagatgagctgcagatgcttacctaccacggccgtctccaccagaaaaccatcgccaactcctgcgatcagcttgtgacttacaaaccttgtttaaaagctgcttacatggacttctgtcctttaaaacgttccccttggctgtggccctctgtgtatgcctgggatccttccaagcactcatagcccagataggaatcctctgctcctcccaaataaattcatctgttc

SEQ ID NO: 1438 - DNA, 2738 bp, Homo sapiens
cgcggaattccgcggaattccgcgccgccgccgccggcagaccccgcgctccggctccggctcggctcgctcggctccggtgcgcgccgaggccatgcagcgccggggcgccctgttcggcatgccgggcggcagcggaggcaggaagatggctgcaggagacatcggcgagctgctagtgccccacatgcccacgatccgcgtgcccaggtccggcgacagggtctacaagaacgagtgcgccttctcctacgactctcccaattctgaaggtggactctatgtatgcatgaatacatttttggcctttggaagggaacatgttgaaagacattttcgaaaaactggacagagtgtatacatgcacctgaaaagacatgcgcgagagaaggtaagaggggcgtctggtggagcgttaccaaaaaggaggaattccaagatttttttagatctagatactgatgacgatttaaatagcgacgattatgaatatgaagatgaagccaaacttgttatattcccagatcactatgaaatagcactaccaaatattgaggagttaccagccctggtaacaattgcttgtgatgcagttctcagctcaaaatctccatacagaaagcaggacccagacacgtgggaaaatgaattgccagtatctaaatatgccaacaacctcacccagctggacaatggagtcaggattcctccaagtggttggaagtgtgccagatgcgacctgcgagaaaacctctggttgaatctgactgacggctctgtcctgtgtggaaagtggttctttgacagctctgggggcaacgggcatgcgctggagcattacagagacatgggctacccactagccgtgaaactgggaaccatcactcctgacggggcagatgtttattcttttcaagaagaagaacctgttttggatcctcatttggccaagcacttagcgcattttggaattgatatgcttcatatgcatgggacagagaatgggctccaggacaatgacatcaagctgagggtcagtgagtgggaagtgatccaggagtcgggcacgaaactgaagccaatgtatggtcctggctacacgggtctgaagaacctgggcaacagctgctatctcagctctgtcatgcaggccatcttcagcatcccagaattccagagagcgtatgtaggaaaccttcccagaatatttgactactcgcctttagatccaacacaagatttcaacacacagatgactaagttaggacatggccttctctcaggccagtattcaaagcctccggtgaaatctgaactcattgaacaggtgatgaaggaggagcacaagccacagcagaacgggatctctccgcgcatgtttaaggcctttgtaagcaagagccacccggaattctcctctaacaggcagcaagatgcccaggaattcttcttgcacctggtgaatctagtagagaggaaccgcatcggctcagaaaacccaagcgatgtttttcgttttttggtggaagaacgcattcagtgctgtcagacccggaaagtccgctacacggagagggtggattacctgatgcagttacctgtggccatggaggcggcaaccaacaaggatgaactgatcgcttatgaactaacgagaagggaagcagaagcaaacagaagaccccttcctgagttggtacgtgccaagataccatttagtgcctgccttcaggccttctctgaaccagaaaatgttgatgatttctggagcagtgccctacaagcaaagtctgcgggtgtgaaaacatctcgctttgcttcattccctgaatacttggtagtgcagataaagaagttcacttttggtcttgactgggttcccaaaaaatttgatgtttctattgatatgccagacctacttgatatcaaccatctccgagccagggggttacagccaggagaggaagaacttccagacatcagcccccccatagtcattcctgatgactcaaaagatcgcctgatgaaccaattgatagacccatcagacatcgatgagtcatcagtgatgcagctggccgagatgggtttcccgctggaagcatgtcgcaaggctgtgtacttcactggaaatatgggcgccgaggtggccttcaactggatcattgttcacatggaagagccagattttgctgagccgctgaccatgcctggttatggaggggcagcttctgctggagcctctgtttttggtgcttctggactggataaccaacctccagaggaaatcgtagctatcatcacctccatgggatttcagcgaaatcaggctattcaggcactacgagcaacgaataataacctggaaagagcactggattggatctttagccaccctgagtttgaagaagacagtgattttgtgattgagatggagaataatgccaatgcaaacattatttctgaggccaagcccgaaggacctagagtcaaggatggatctggaacatatgagctatttgcattcatcagtcacatgggaacatccacaatgagtggtcattacatttgccatatcaaaaaggaaggaagatgggtgatttacaatgaccacaaagtttgtgcctcagaaaggccccctaaagacctgggctacatgtacttttaccgcaggataccaagctaaacctcaaatataaaaattggcgaaaagaagccatacgcctttttaatttgcc

SEQ ID NO: 1439 - DNA, 1548 bp, Homo sapiens
aatgaaatgtgtacagcttgccgtgttctgactgtacccttccctcttccatgtctgagaatctccgtgtattttaagaatgtgtgaggagagggtggcgattcatgtttcaatgagcctcttttttttttttccttcctgttttggtctatggctggtcttactctgtgtccatgttcggaagctctagttttgcatagaattatagagatgccaaactctttgaaaagagatccaaatttatcgcttgagagaaagaaaagaaacactattttttgtattttacctgagatacaggggcacaaatagatgagaattttacagtgttagtgtatgtatccctgagcctaaaaaatgaggatataaccttttacagagagagtgaggcgtggtggttttatatttatatatgaaaggccagcaagctcatgcgaaggatatacttttcttccaaaaagcggatttttttttttttaatgtttgaatctatatttgagatgggagtttggttggattaaacatgacaccccggtgggcggtgtgtgtgtctgttgcacatggcagggaggggagcctccttctcatggggttgccatggtgatcattggtttttccatcaaaattgcatcttcatccatagattaccttccccttccctgacagtccataaccaaacctttaaacagaacaacctctttaaaaacttctcttgtgtttaacactttcttcatgccaacgaaacagggtaaacatgctcaaaacattaacagtctaaacagatatccaaatactaagaagaaaaacaagttatagcactttcaattttttttttttttttaaaaaaaggtttatagctttttcttttcccatgtcacaatgtccacttcctaagaagggtttaaaatactatgaaaactttctttttggggaaaatatctatttggtgtttgacacatcagtaggtactttaaagacctgaattttatagtagctttaggagttatattttataaaaatcagttatgactttatatttccagacaatagagagttcagtacatcatgctcttgtgcctctgcctgcttttcctgcgttcccaccctgtattccccccgcctttcgggtttccagggcttcgagcttgatcttttgaaagttttattctattaaatttttgctatatcttctggttttctgaaaaagctttagaatggtttctataccctttgtatcactgcatttttccatatcatctccggttcgatcgcgtccagatggaaaacggaagcagaggcttctaatcgtcgcatttactggctccagtgcaacacatccatctgaaaacactcggaagtctggtgcttggagagggtgccattgtctcttgtacataaggtcatgacgtgtctatgtcaaaagttcttatatatttcttttataagctgaaagaaggtctatttttatgtttttaggtctatgaatggaacgttgtaaatgcttgtcaaacaataaaaataacgaaaagtgaaaaaaaaaaaaaaaaaaaa

SEQ ID NO: 1440 - DNA, 3768 bp, Homo sapiens; identical to SEQ ID NO: 1231

SEQ ID NO: 1441 - DNA, 1172 bp, Homo sapiens; identical to SEQ ID NO: 1232

SEQ ID NO: 1442 - DNA, 1550 bp, Homo sapiens; identical to SEQ ID NO: 1233

SEQ ID NO: 1443 - DNA, 1585 bp, Homo sapiens; identical to SEQ ID NO: 1234

SEQ ID NO: 1444 - DNA, 627 bp, Homo sapiens; identical to SEQ ID NO: 1056

SEQ ID NO: 1445 - DNA, 2161 bp, Homo sapiens; identical to SEQ ID NO: 1236

SEQ ID NO: 1446 - DNA, 2824 bp, Homo sapiens; identical to SEQ ID NO: 1057

SEQ ID NO: 1447 - DNA, 2436 bp, Homo sapiens
aaggcacctctgccgccacagaccttgcagttaactccgccctgacccacccttcccgatgcagtccctgatgcaggctcccctcctgatcgccctgggcttgcttctcgcgacccctgcgcaagcccacctgaaaaagccatcccagctcagtagcttttcctgggataactgtgatgaagggaaggaccctgcggtgatcagaagcctgactctggagcctgaccccatcgtcgttcctggaaatgtgaccctcagtgtcgtgggcagcaccagtgtccccctgagttctcctctgaaggtggatttagttttggagaaggaggtggctggcctctggatcaagatcccatgcacagactacattggcagctgtacctttgaacacttctgtgatgtgcttgacatgttaattcctactggggagccctgcccagagcccctgcgtacctatgggcttccttgccactgtcccttcaaagaaggaacctactcactgcccaagagcgaattcgttgtgcctgacctggagctgcccagttggctcaccaccgggaactaccgcatagagagcgtcctgagcagcagtgggaagcgtctgggctgcatcaagatcgctgcctctctaaagggcatataacatggcatctgccacagcagaatggagcggtgtgaggaaggtcccttttcctctgttttgtgtttgccaaggccaaactcccactctctgcccccctttaatcccctttctacagtgagtccactaccctcactgaaaatcattttgtaccacttacattttaggctggggcaagcagccctgacctaagggagaatgagttggacagttcttgatagcccagggcatctgctgggctgaccacgttactcatccccgttaacattctctctaaagagcctcgttcatttccaaagcagttaaggaatgggaaccagagtgttttaggacctgaagaatctttatgactctctctctttcactcttttttttttttgtcactaagttaaaagcgaagtgagagtattaacgtttttgttctcctccggccccctgttacaatgaaggggcaaaagtatttgctcttagtctattcctcccttaacttctgtgactaatttttatttcctttctagatttgcccaattaatactagggtgcagtgtatcctggagaggtagggtgtgtgggggaggaatcccttgggggagatattaggagtgctctgttgtttacaaactcacggtacccgcagggcctagcaagagacttaaatgactgataagaaccgtgagaaacatgttgcttccaggcttgatttcgatttttcgctttttttttttttgagacagaatctcactttgtcaccaggctggagtgcagtggtgcaatctcacctcactgcaacctccgcctcctgggttcaagcaattctcctgcctcagcctcccaagtagcttggactacaggccctgccaccacgcccggctaatttgtgtatttttagtagagatggggtttcaccatgttggccaggatggtctcgatctcttgacctcgtgatctgtccaccttggccttgcaaagcgctggattacaggcatgagccactacacccagccgatttttcctttttgattaaagatgctattacaatgtaaatatttcttacacagaaagtcacagcacatgtgcccattgatacaaggctgctgaggcctggtctccagttggaaatataattaagggtggcaaggactggagtcagttggagagtgcatagccagtctgtgaagacaactgccagatactggcaatactccagcctggtgacagagtgagactctgtctcaaaaaaaaagtttcaatgtttactcctagagaagccaaaaatccagatttgtatatgaaatcttaccattttaaaagattggcagctaattatttttttaaaaagctgtgcagtgtgatgtgtcccaaacggactggctcatgggtggccacgtcacaacctctgatctcagaccgtgcatgccttgtcctcttaagacaactcctgtggcaccgtttctccctccacagggccaaagccatagtgtccggtcccaaggacaaggctcttccagtgctaggagaggtatgagcagcctctcacctgtgagctgtggggatcacaaggctgcctgcctcagtcttggagtcctgttgggtgaatgaggcagatgggaaagagcctcaccagcagctgcttttggagcaggggtccaaggaagagagggtggcctcgacatcaaactgcctggatttttctaccaccctgttacatcataacaacttctgaaacacacaccagccctgagttctgggctcatttgaagcctggaatagcaataaatctttttaacttgcggacagtt

SEQ ID NO: 1448 - DNA, 5434 bp, Homo sapiens; identical to SEQ ID NO: 1239

SEQ ID NO: 1449 - DNA, 1939 bp, Homo sapiens
cgcagagcagttcagttcgctcactcctcgccggccgcctctccttcgggctctcctcgcgtcactggagccatggcgttcgccgagacctacccggcggcatcctccctgcccaacggcgattgcggccgccccagggcggccggaggaaaccgggtgacggtggtgctcggtgcgcagtggggcgacgaaggcaaagggaaggtggtggacctgctggcgcaggacgccgacatcgtgtgccgctgccagggaggaaataatgctggccatacagttgttgtggattctgtggaatatgattttcatctcttacccagtggaataattaatccaaatgtcactgcattcattggaaatggtgtggtaattcatctacctggattgtttgaagaagcagagaaaaatgttcaaaaaggaaaaggactagaaggctgggaaaaaaggcttattatatctgacagagctcatattgtatttgattttcatcaagcagctgatggtatccaggaacaacagagacaagaacaagcaggaaaaaatttgggtacaacaaaaaagggcattggcccagtttattcgtccaaagctgctcggagtggactcaggatgtgcgaccttgtttctgactttgatggcttctctgagaggtttaaagttctagctaaccaatacaaatctatataccccactttggaaatagacattgaaggtgaattacaaaaactcaagggttatatggaaaagattaaaccaatggtgagagatggagtttattttctatatgaggccctacatggaccaccaaagaaaatcttggtagaaggtgcaaatgcagcactattagatattgattttgggacttacccttttgtaacctcttcaaattgtactgttggaggtgtttgtactggtttgggtatgccacctcaaaatgttggagaagtgtatggagttgtgaaagcttatacaactagagttggtattggtgcctttcctacagagcaagacaatgaaattggagaattattacaaacaaggggtagagagtttggtgtaactactggaaggaaaagaagatgtggctggttggacctcgttttgctcaaatatgctcatatgatcaatggatttactgcgttggcacttaccaagttggatattttggacatgtttacggaaatcaaagttggagttgcttacaagttagatggtgaaatcatacctcatatcccagcaaaccaagaagtcttaaataaagttgaagttcaatataagactctcccaggatggaacacagacatatcaaatgcaagggcgtttaaagaactacctgttaatgcacaaaactatgttcgatttattgaagatgagcttcaaattccagttaagtggattggtgttggtaaatccagagaatctatgattcaactcttttaatgattgccagtaatgcaagaaacactccttgagagggaggggaaaagactttctaaatatttcatttatgacctgcaaattcaagaataaagacactgaagtaagtttgaagcctctacagttgtttccagtcttttcagatggatgcctactgtggagattaactttggcatattccagtgtcagctttctttagctggaattgccaaatcatttgttgctcctgctgctctcatggtgccacgtttttttttttcaatgtttagtaatagtataatccatgttgtttgatatcaaaagtagaattacttttatgtagttttcttcattattgtcattgcgtgttcttaagttttacccctattagatggtaagaacaattaatgcagttttgcacaaatatttttacattctgatcattcagttctgtcattgtaatctttgttgttagaaacaaatgatgaaaacataggggttctgtaaacttttgtaatgctat

SEQ ID NO: 1450 - DNA, 1817 bp, Homo sapiens; identical to SEQ ID NO: 1240

SEQ ID NO: 1451 - DNA, 2545 bp, Homo sapiens; identical to SEQ ID NO: 1241

SEQ ID NO: 1452 - DNA, 599 bp, Homo sapiens; identical to SEQ ID NO: 1243

SEQ ID NO: 1453 - DNA, 1882 bp, Homo sapiens; identical to SEQ ID NO: 1245

SEQ ID NO: 1454 - DNA, 4068 bp, Homo sapiens; identical to SEQ ID NO: 1249

SEQ ID NO: 1455 - DNA, 2850 bp, Homo sapiens
cgcgagcaggagacggcggcgggcgaaccctgctgggcctccagtcaccctcgtcttgcattttcccgcgtgcgtgtgtgagtgggtgtgtgtgttttcttacaaagggtatttcgcgatcgatcgattgattcgtagttcccccccgcgcgcctttgccctttgtgctgtaatcgagctcccgccatcccaggtgcttctccgttcctctaaacgccagcgtctggacgtgagcgcaggtcgccggtttgtgccttcggtccccgcttcgccccctgccgtcccctccttatcacggtcccgctcgcggcctcgccgccccgctgtctccgccgcccgccatggcgactgcgacccccgtgccgccgcggatgggcagccgcgctggcggccccaccacgccgctgagccccacgcgcctgtcgcggctccaggagaaggaggagctgcgcgagctcaatgaccggctggcggtgtacatcgacaaggtgcgcagcctggagacggagaacagcgcgctgcagctgcaggtgacggagcgcgaggaggtgcgcggccgtgagctcaccggcctcaaggcgctctacgagaccgagctggccgacgcgcgacgcgcgctcgacgacacggcccgcgagcgcgccaagctgcagatcgagctgggcaagtgcaaggcggaacacgaccagctgctcctcaactatgctaagaaggaatctgatcttaatggcgcccagatcaagcttcgagaatatgaagcagcactgaattcgaaagatgcagctcttgctactgcacttggtgacaaaaaaagtttagagggagatttggaggatctgaaggatcagattgcccagttggaagcctccttagctgcagccaaaaaacagttagcagatgaaactttacttaaagtagatttggagaatcgttgtcagagccttactgaggacttggagtttcgcaaaagcatgtatgaagaggagattaacgagaccagaaggaagcatgaaacgcgcttggtagaggtggattctgggcgtcaaattgagtatgagtacaagctggcgcaagcccttcatgagatgagagagcaacatgatgcccaagtgaggctgtataaggaggagctggagcagacttaccatgccaaacttgagaatgccagactgtcatcagagatgaatacttctactgtcaacagtgccagggaagaactgatggaaagccgcatgagaattgagagcctttcatcccagctttctaatctacagaaagagtctagagcatgtttggaaaggattcaagaattagaggacttgcttgctaaagaaaaagacaactctcgtcgcatgctgacagacaaagagagagagatggcggaaataagggatcaaatgcagcaacagctgaatgactatgaacagcttcttgatgtaaagttagccctggacatggaaatcagtgcttacaggaaactcttagaaggcgaagaagagaggttgaagctgtctccaagcccttcttcccgtgtgacagtatcccgagcatcctcaagtcgtagtgtacgtacaactagaggaaagcggaagagggttgatgtggaagaatcagaggcgagtagtagtgttagcatctctcattccgcctcagccactggaaatgtttgcatcgaagaaattgatgttgatgggaaatttatccgcttgaagaacacttctgaacaggatcaaccaatgggaggctgggagatgatcagaaaaattggagacacatcagtcagttataaatatacctcaagatatgtgctgaaggcaggccagactgttacaatttgggctgcaaacgctggtgtcacagccagccccccaactgacctcatctggaagaaccagaactcgtggggcactggcgaagatgtgaaggttatattgaaaaattctcagggagaggaggttgctcaaagaagtacagtctttaaaacaaccatacctgaagaagaggaggaggaggaagaagcagctggagtggttgttgaggaagaacttttccaccagcagggaaccccaagagcatccaatagaagctgtgcaattatgtaaaattttcaactgtcttcctcaaaataaagaagtatggtaatctttacctgtatacagtgcagagccttctcagaagcacagaatatttttatatttcctttatgtgaatttttaagctgcaaatctgatggccttaatttcctttttgacactgaaagttttgtaaaagaaatcatgtccatacactttgttgcaagatgtgaattattgacactgaacttaataactgtgtactgttcggaaggggttcctcaaattttttgactttttttgtatgtgtgttttttctttttttttaagttcttatgaggaggggagggtaaataaaccactgtgcgtcttggtgtaatttgaagattgccccatctagactagcaatctcttcattattctctgctatatataaaacggtgctgtgagggaggggaaaagcatttttcaatatattgaacttttgtactgaatttttttgtaataagcaatcaaggttataattttttttaaaatagaaattttgtaagaaggcaatattaacctaatcaccatgtaagcactctggatgatggattccacaaaacttggttttatggttacttcttctcttagattcttaattcatgaggagggtgggggagggaggtggagggagggaagggtttctctattaaaatgcattcgttgtgttttttaagatagtgtaacttgcttaaatttcttatgtgacattaacaaataaaaaagctctttt

SEQ ID NO: 1456 - DNA, 1098 bp, Homo sapiens
atgtcagccccactggatgccgccctccacgcccttcaggaggagcaggccagaccgccctccacgcccttcaggaggagcaggccagactcaagatgaggctgtgggacctgcagcagctgagaaaggagctcggggactcccccaaagacaaggtcccattttcagtgcccaagatccccctggtattccgaggacacacccagcaggacccggaagtgcctaagtctttagtttccaatttgcggatccactgccctctgcttgcgggctctgctctgatcacctttgatgaccccaaagtggctgagcaggtgctgcaacaaaaggagcacacgatcaacatggaggagtgccggctgcgggtgcaggtccagcccttggagctgcccatggtcaccaccatccaggtgatggtgtccagccagttgagtggccggagggtgttggtcactggatttcctgccagcctcaggctgagtgaggaggagctgctggacaagctagagatcttctttggcaagactaggaacggaggtggcgatgtggacgttcgggagctactgccagggagtgtcatgctggggtttgctagggatggagtggctcagcgtctgtgccaaatcggccagttcacagtgccactgggtgggcagcaagtccctctgagagtctctccgtatgtgaatggggagatccagaaggctgagatcaggtcgcagccagttccccgctcggtactggtgctcaacattcctgatatcttggatggcccggagctgcatgacgtcctggagatccacttccagaagcccacccgcgggggcggggaggtagaggccctgacagtcgtaccccaaggacagcagggcctagcagtcttcacctctgagtcaggctaggggcctccccttctcatcctccccacccccccgccaaggttctcacactggcctgggcttgggtgcccatataggaggtctgtatgttcaccaacagtgcggaggggtcacacattgcaaaacactgcccagaacagtaaaaagagcctgcatgccaaaaaaaaaaaaaaaaaaaaaaaaaaaaaaaaaaaaaaaa

SEQ ID NO: 1457 - DNA, 860 bp, Homo sapiens; identical to SEQ ID NO: 1251

SEQ ID NO: 1458 - DNA, 921 bp, Homo sapiens
ccctcggacggccccggaggatgctgctgagccccggcactgcctggctgcgagcacatgatggcgatacgggagctcaaagtgtgccttctcggggacactggggttgggaaatcaagcatcgtgtgtcgatttgtccaggatcactttgaccacaacatcagccctactattggggcatcttttatgaccaaaactgtgccttgtggaaatgaacttcacaagttcctcatctgggacactgctggtcaggaacggtttcattcattggctcccatgtactatcgaggctcagctgcagctgttatcgtgtatgatattaccaagcaggattcattttataccttgaagaaatgggtcaaggagctgaaagaacatggtccagaaaacattgtaatggccatcgctggaaacaagtgcgacctctcagatattagggaggttcccctgaaggatgctaaggaatacgctgaatccataggtgccatcgtggttgagacaagtgcaaaaaatgctattaatatcgaagagctctttcaaggaatcagccgccagatcccacccttggacccccatgaaaatggaaacaatggaacaatcaaagttgagaagccaaccatgcaagccagccgccggtgctgttgacccaagggcgtggtccacggtacttgaagaagccagagcccacatcctgtgcactgctgaaggaccctacgctcggtggcctggcacctcactttgagaagagtgagcacactggctttgcatcctggaaggcctgcagggggcggggcaggaaatgtacctgaaaaggattttagaaaaccctgggaaacccaccacaccaccacaaaatggcctttagtgtatgaaatgcacatggaggggatgtagttgcatttttgctaaaaaaaaaaaaaa

SEQ ID NO: 1459 - DNA, 282 bp, Homo sapiens
gagaaatgaagtaataatgaattggcaaatcgaatgtctttgttttatgctgaggcaactccaatgctgaaaaccttgagtgatgccacaacaaaatttgtatcagagaataaaaatttaccaatagaaaataccacagattgtttaagcacaatggctagtgtatgcagagtcatgctggaacaccggtatacaggagcaggtttacaaatggagagacagtgtcattctgcttgagggtaatggtgggtgtcataatactctatgtccacgtacatccag

SEQ ID NO: 1460 - DNA, 377 bp, Homo sapiens
agctgttgggaccatcctggcaaccccggtgtttggctgggttctagcgtagccgtctgtgttggccggtgggggacctgcgatcggagtgggaggccagtttgcaccaaggaggtggaaggaggcgggcttttaggctgggaagcgccttagaggagccatttttccaggatgcctggtttgcttttatgtgaaccaacagagctttacaacatcctgaatcaggccacaaaactctccagattaacagaccccaactatctctgtttattggatgtccgtgccaaatgggagtatgacgaaagcaatgtgatcactgcccttcgagtgaagaaggaaaataatggatatctctcccggagtctgtggacctcgag

SEQ ID NO: 1461 - DNA, 525 bp, Homo sapiens
gagcaatacctttctgtacccgtggtgagacaagacccagagctactggaaaacaagcactttggaagatttgttttgttttcatggaataataatatgtcagggtataatttaacgtgagtttcttatgtgcccttaaagactgttagacaagaaaagcattcactggctaataatccataggtcgacctatgtcctaagttaggtgtaaggtccgatgccttggccacactcgagctctctttacattgttagttgtcaaccttggctgatggaaatcccgtaaccactatttgttgcactgtgccatgaagggcagcaggcccaagtgctgctctgactgaaaactgagttaacaagatgaaatctaaaggatattcacagtgacttcaattcaggaagaatgcttccaaaagagcccagtggggaaatctgacatcacagaagacattaattcagtcactttcaaagagtttgtctacaggcggtttctctgttatcaaggcatttgaaataggattttac

SEQ ID NO: 1462 - DNA, 399 bp, Homo sapiens
agctggaggatggcggtgggggaggctgtctttgtaccactgcagcatcccccacttctccacggaagccccatcccaaagctgctgcctggccccttgctgtaaagtgtgaagggggcggctgagttctcttaggacccagagccagggccctcaacttccatcctgcgggaggccttggcgagacactgccagtgtcttccagagccacacccagggaccacgggaggatcctgacccctgcagggctcaggggtcagcagggacccactgccccatctccctctccccaccaagacagccccagaaggagcagccagctgggatgggaacccaaggctgtccacatctggcttttgtgggactcagaaagggaagcagaactgagggctgggatat

SEQ ID NO: 1463 - DNA, 241 bp, Homo sapiens
tgtacctttgcaaacttgtctggattttgactgtatgtgcaaaacagattgtacttagcgattcattaaacatcttttgatcatctgctgtctgccaggcactgtgctaggcatctgaaaaacaaagatggtccctgcagtttaatgtgaagagctatcttaattgtattccacaagtgtattggtcgtatctttgttttggtgtttctacctaaataaattttatattaactaaaaaaaa

SEQ ID NO: 1464 - DNA, 355 bp, Homo sapiens
aattcggcaccagggggctccgggtggctgctctgggactgggcacccacaagggctcagtgggcccaaacccttgaaatccgtgaaacagggtggtcccaagagctagaaactcaggaaaccccaggtgctcagggccccgcgtctcgggggctccgtggggcagacccctgctaatatatgcaattctccctcccccagcccttccctgacccctaagttattgcccgctcacctctcccaggccccaggctgcggactggcagggtggcgcctgcggtttctatgtatttatagcaagttctgatgtacatatgtaaaggacttttttaaatatatgtgccttttgcctact

SEQ ID NO: 1465 - DNA, 456 bp, Homo sapiens; identical to SEQ ID NO: 1074

SEQ ID NO: 1466 - DNA, 470 bp, Homo sapiens
tatcaaactaaagatgacatcttaattttgcattgaacattaatgtagcggatataatttgatgattatacttcattagatttaatttctaggccaagatgttactttttaaagtgcagtttaaggttcaggcatgcattctggctcatagtggttgaaagtaatttaaattagtgggaaagtagcatgcttgcatcacatagagtgagattggtattcatttacctatgttgcgccagtttgtgttgcagtttaccaattcaatatagccctgcatttaaagttcctttttaagatttgtggattttatttttattaagaacatagatatataaagtactgtagtttacaggtaggccttgaaatatcttttttaggatctgttaggaataagattgatattgtattgtgtgtaacctgcacaatgtggaaagctgatatacctgtgcaaaatctttgcctctgtgctg

SEQ ID NO: 1467 - DNA, 4207 bp, Homo sapiens
ccccggttccgctgtcttttctgtctacagtttgcgatccccgcgtccaggatggagcagctgaacgaactggagctgctgatggagaagagtttttgggaggaggcggagctgccggcggagctatttcagaagaaagtggtagcttcctttccaagaacagttctgagcacaggaatggataaccggtacctggtgttggcagtcaatactgtacagaacaaagagggaaactgtgaaaagcgcctggtcatcactgcttcacagtcactagaaaataaagaactatgcatccttaggaatgactggtgttctgttccagtagagccaggagatatcattcatttggagggagactgcacatctgacacttggataatagataaagattttggatatttgattctgtatccagacatgctgatttctggcaccagcatagccagtagtattcgatgtatgagaagagctgtcctgagtgaaacttttaggagctctgatccagccacacgccaaatgctaattggtacggttctccatgaggtgtttcaaaaagccataaataatagctttgccccagaaaagctacaagaacttgcttttcaaacaattcaagaaataagacatttgaaggaaatgtaccgcttaaatctaagtcaagatgaaataaaacaagaagtagaggactatcttccttcgttttgtaaatgggcaggagatttcatgcataaaaacacttcgactgacttccctcagatgcagctctctctgccaagtgataatagtaaggataattcaacatgtaacattgaagtcgtgaaaccaatggatattgaagaaagcatttggtcccctaggtttggattgaaaggcaaaatagatgttacagttggtgtgaaaatacatcgagggtataaaacaaaatacaagataatgccgctggaacttaaaactggcaaagaatcaaattctattgaacaccgtagtcaggttgttctgtacactctactaagccaagagagaagagctgatccagaggctggcttgcttctctacctcaagactggtcagatgtaccctgtgcctgccaaccatctagataaaagagaattattaaagctaagaaaccagatggcattctcattgtttcaccgtattagcaaatctgctactagacagaagacacagcttgcttctttgccacaaataattgaggaagagaaaacttgtaaatattgttcacaaattggcaattgtgctctttatagcagagcagttgaacaacagatggattgtagttcagtcccaattgtgatgctgcccaaaatagaagaagaaacccagcatctgaagcaaacacacttagaatatttcagcctttggtgtctaatgttaaccctggagtcacaatcgaaggataataaaaagaatcaccaaaatatctggctaatgcctgcttcggaaatggagaagagtggcagttgcattggaaacctgattagaatggaacatgtaaagatagtttgtgatgggcaatatttacataatttccaatgtaaacatggtgccatacctgtcacaaatctaatggcaggtgacagagttattgtaagtggagaagaaaggtcactgtttgctttgtctagaggatatgtgaaggagattaacatgacaacagtaacttgtttattagacagaaacttgtcggtccttccagaatcaactttgttcagattagaccaagaagaaaaaaattgtgatatagataccccattaggaaatctttccaaattgatggaaaacacgtttgtcagcaaaaaacttcgagatttaattattgactttcgtgaacctcagtttatatcctaccttagttctgttcttccacatgatgcaaaggatacagttgcctgcattctaaagggtttgaataagcctcagaggcaagcgatgaaaaaggtacttctttcaaaagactacacactcatcgtgggtatgcctgggacaggaaaaacaactacgatatgtactctcgtaagaattctctacgcctgtggttttagcgttttgttgaccagctatacacactctgctgttgacaatattcttttgaagttagccaagtttaaaataggatttttgcgtttgggtcagattcagaaggttcatccagctatccagcaatttacagagcaagaaatttgcagatcaaagtccattaaatccttagctcttctagaagaactctacaatagtcaacttatagttgcaacaacatgtatgggaataaaccatccaatattttcccgtaaaatttttgatttttgtattgtggatgaagcctctcaaattagccaaccaatttgtctgggccccctttttttttcacggagatttgtgttagtgggggaccatcagcagcttcctcccctggtgctaaaccgtgaagcaagagctcttggcatgagtgaaagcttattcaagaggctggagcagaataagagtgctgttgtacagttaaccgtgcagtacagaatgaacagtaaaattatgtccttaagtaataagctgacctatgagggcaagctggagtgtggatcagacaaagtggccaatgcagtgataaacctacgtcactttaaagatgtgaagctggaactggaattttatgctgactattctgataatccttggttgatgggagtatttgaacccaacaatcctgtttgtttccttaatacagacaaggttccagcgccagaacaagttgaaaaaggtggtgtgagcaatgtaacagaagccaaactcatagttttcctaacctccatttttgttaaggctggatgcagtccctctgatattggtattattgcaccgtacaggcagcaattaaagatcatcaatgatttattggcacgttctattgggatggtcgaagttaatacagtagacaaataccaaggaagggacaaaagtattgtcctagtatcttttgttagaagtaataaggatggaactgttggtgaactcttgaaagattggcgacgtcttaatgttgctataaccagagccaaacataaactgattcttctggggtgtgtgccctcactaaattgctatcctcctttggagaagctgcttaatcatttaaactcagaaaaattaatcattgatcttccatcaagagaacatgaaagtctttgccacatattgggtgactttcaaagagaataaaacactatttcccttgccttttcatactagggcagtatctcctctagctagtgcccatacagaaaattctatcaccatacaaaatttaatgcagtatttatgttttaaagcacaggtgtaccgaaaactgtgaaaagtctgaatttatgggttctatgcatgcatttttgcctaacctagagaaagagtttgataaatttttaccagctttgaagatggattaacttttgactttgagctttaaacttttaagtcagacatttcaggactaatttgattttgtagatatcattgtaagaactttatttgaaagactgaataaagggatttgatttgttttcatcatttaagcacagtcttgtgatgatgagaacataagtgtgattcttttctgtattttgaggtccctaatccaaagcccattttgctaggattttttctgctatcagatgtgttttcactctaaacctagtcttttatgacatgaattgattacttcctgttaattttctatcctcccttactatcctccttttttgttttcagtattcagtatttcagtattctagagtagattttgatataaaagaaaataattcttacatcatcttttgcaacaaattttgttttctgaattgataataaatttaaaaagttgattcctattttcacatatgttcatatgcccctatgtttgggggtatcactcagttttcccttttttgtgtaaagatgttttgtaaaacaaaattgtctcaaagtgattatattatatatataaaaagtaacagattttaacaaaggttaaaagattcttggggtaacagattcttctggggttggaaatcttccatttctcttgagggttttttttaatgagtgttaaatatgttaaaatttttatttctacctcatgtgtttttttaaattattacttgaagttttttatttaataaattttttctactaatgg

SEQ ID NO: 1468 - DNA, 335 bp, Homo sapiens; identical to SEQ ID NO: 1078
  misc_feature (1)..(335): n=a,t,g or c

SEQ ID NO: 1469 - DNA, 277 bp, Homo sapiens
  misc_feature (1)..(277): n=a,t,g or c
tctcttaaaggattaaaagaataggatagtctcataattgtgagtaaacatcaaggcattatattttacaatactgaataaaatttcatctacacacatgttgccattgtttcatttaaggttcagtgcttatagttaactacaatattggacctaacaggatctagattagcaatataaagaagcatagtggtactctgtttcacactttcagtagatttattagangtcaaattctattcaacagacacttnttaggatatacanctaatttaag

SEQ ID NO: 1470 - DNA, 351 bp, Homo sapiens
  misc_feature (1)..(351): n=a,t,g or c
tacaaatgcatattatccaactcagtagaaatccatgtaccccagaatgtacagaaggtatgcaatgttccagagtgtcattgtcagctctggctttacatatatattaaatatatatatgttttgagacagggtctcgctgtcacccaggctggagtncagtggccaatctcagctcactgcaacctccgcctcccagcctcaagagatccccccacctcatnctcctgagtagttggactacatgcgcatgccaccacacccagctattatttttatttctttttgtagagacaagggctcactatgttttctcaggctgggtctcgaactcctgggnctcaagtgatt

SEQ ID NO: 1471 - DNA, 486 bp, Homo sapiens
  misc_feature (1)..(486): n=a,t,g or c
caatgtgcttgtctaggttcgctattgtgagaatcaagttgatatttacctaacctatatcctccacaaaagcagacagtctggctctgctcttctttcctccatccttagcccacagcacagaaactggcacattgcaggtgctttttgctatgtcagttcctcacctgcttaaagaggtcagggaggacagtcttcctgggcgactcctggcctcaggaactcagatgtgtgagcctcgcccataagaaacaaggtggaggaccctgtagggcaggaaaatcatgttaacagctttggcgtggggcactccccagggataggcacaggagctgtgcaggncaagtagaaaagagcactgggagaacggcccagtttcacagaagaggaggcagcaagtctgccacatttttgttattattgctggaaatttgtttcattcacttcgacagtttcaggaattaaatattagggnagatttttttt

SEQ ID NO: 1472 - DNA, 6383 bp, Homo sapiens
cgcggccgctatatataatgcagcatcacaccatgtagggcatttactcttattttatacattcagatatgtttgaaacattcttaaggctacaaaacagaacatagaaaaataaacaggaatatattcaacacttacaaaaagtgatatgataaagaatataaagtactagtttccttttaacacttcaaaagatatgtatatatacttttttttacaagtaacatcacaaatgctcacatcttcacatgctcttaaagtattatttgtactcagtgtaaggctattatcgtttttcatacataaaattttctagctctgtaacacaatgcaatttttaatccattcaagtaagttcaaccccaaagttgccgcttcccagcattaagacatgcacccacccctcttctaagattttctaaacttgtatttcggggagaaagacctcttttaaaaaataatccaattagtgggagagtaaatggctgacattagtagcaaaaccttagttatctgaaaataacatattggaaatgagacattattaggattttaaacaaacaatagcatttagacataaagtaggaagcaaaatacagtaaacagaaatagtgtagccaaatatcattctcttcagctaccttaagtaaaagacaaaacatttacctcatctaaaaatgaaggtaaaacgaaagaggcaaaaataaatattgctagtttctaggatggctgaatgttttctaaaccagaaatggttagaaaggaactttattgcaccaagtcaatcataagcaagtttgcagttcacaggcattttaattcaaccttgagtcacaaaggagaacaacacgctgcgagaatacagtctacagtctgcattaaataagaatatatcagcattgtggtctgggaaaacctatgcttgccaggacaaggcagggtgctgagcttaggtcatgccatgaaaatgaatttgtgggttatcagtaaacagtatgaggactacacagatgccagcatcctgctgccaaggagacatggggcaagagttgaagatttgagaggaaatgaagagacatacacaacaccaaaggaaaagggggctggaatcaagttcagccaaagcacctaacacaaaaaacaggtgagctttggtcagtctgttcttcaaaatatgtatgatcatatggtaatgaagtttcataatttccaactcaaaaatacaaatgatcctcagttctatacttttgcctctattctcttataaagaaatatgtcaacataacagtatgacataacagttaaaataaggacaaaagcttgcttatcttagtttgacctcagcataaggcaaaatcccctggagaatacatttaaaaacaaacttaaaaggaaaaaaagcgaaaccaacttcatgcaaagattccttttaaaactatcaaaagtcagttcttttattccagaggtcactgagaaaagtaccatctgctaaaattctctttcaagcacttcttccatcatatcctagaggtgagatatgggaaacagaaagcaaatcagtgttcctcaggagctatatctgttactcaattgagggtaagacaaagtgacaatgaagatatgagtagtatttccttccaatttttaaagattttcagaagctgagatcaaaccccactcaataaaatgcaggagactagaagcaacaacttattttggactcctgagatcaaacacattgaactttcaaatctgggtgtttctatcaaaatgtgattttcattaaaatcagtaagctagtcctacataaaaaagcatgagctgaaagtggaggaccctctatcttctcattccttaactgagccaccgatgttaagaaaaaaatggcttaagcggtaccttcaacaactattctagttaagaaggtgacaacaaattgaggccgcgaattcggcgaaaactctttcctttggttgtgctaagaggtgatgcccaaggtgcaccacctttcaagaactggatcatgaacaactttatcctcctggaagaacagctcatcaagaaatcccaacaaaagagaagaacttctccctcgaactttaaagtccgcttctttgtgttaaccaaagccagcctggcatactttgaagatcgtcatgggaagaagcgcacgctgaaggggtccattgagctctcccgaatcaaatgtgttgagattgtgaaaagtgacatcagcatcccatgccactataaatacccgtttcaggtggtgcatgacaactacctcctatatgtgtttgctccagatcgtgagagccggcagcgctgggtgctggcccttaaagaagaaacgaggaataataacagtttggtgcctaaatatcatcctaatttctggatggatgggaagtggaggtgctgttctcagctggagaagcttgcaacaggctgtgcccaatatgatccaaccaagaatgcttcaaagaagcctcttcctcctactcctgaagacaacaggcgaccactttgggaacctgaagaaactgtggtcattgccttatatgactaccaaaccaatgatcctcaggaactcgcactgcggcgcaacgaagagtactgcctgctggacagttctgagattcactggtggagagtccaggacaggaatgggcatgaaggatatgtaccaagcagttatctggtggaaaaatctccaaataatctggaaacctatgagtggtacaataagagtatcagccgagacaaagctgaaaaacttcttttggacacaggcaaagaaggagccttcatggtaagggattccaggactgcaggaacatacaccgtgtctgttttcaccaaggctgttgtaagtgagaacaatccctgtataaagcattatcacatcaaggaaacaaatgacaatcctaagcgatactatgtggctgaaaagtatgtgttcgattccatccctcttctcatcaactatcaccaacataatggaggaggcctggtgactcgactccggtatccagtttgttttgggaggcagaaagccccagttacagcagggctgagatacgggaaatgggtgatcgacccctcagagctcacttttgtgcaagagattggcagtgggcaatttgggttggtgcatctgggctactggctcaacaaggacaaggtggctatcaaaaccattcgggaaggggctatgtcagaagaggacttcatagaggaggctgaagtaatgatgaaactctctcatcccaaactggtgcagctgtatggggtgtgcctggagcaggcccccatctgcctggtgtttgagttcatggagcacggctgcctgtcagattatctacgcacccagcggggactttttgctgcagagaccctgctgggcatgtgtctggatgtgtgtgagggcatggcctacctggaagaggcatgtgtcatccacagagacttggctgccagaaattgtttggtgggagaaaaccaagtcatcaaggtgtctgactttgggatgacaaggttcgttctggatgatcagtacaccagttccacaggcaccaaattcccggtgaagtgggcatccccagaggttttctctttcagtcgctatagcagcaagtccgatgtgtggtcatttggtgtgctgatgtgggaagttttcagtgaaggcaaaatcccgtatgaaaaccgaagcaactcagaggtggtggaagacatcagtaccggatttcggttgtacaagccccggctggcctccacacacgtctaccagattatgaatcactgctggaaagagagaccagaagatcggccagccttctccagactgctgcgtcaactggctgaaattgcagaatcaggactttagtagagactgagtaccaggccacgggctcagatcctgaatggaggaaggatatgtcctcattccatagagcattagaagctgccaccagcccaggaccctccagaggcagcctggcctgtactcagtccctgagtcaccatggaagcagcatcctgaccacagctggcagtcaagccacagctggagggtcagccaccaagctgggagctgagccagaacaggagtgatgtctctgcccttcctctagcctcttgtcacatgtggtgcacaaacctcaacctgacagctttcagacagcattcttgcacttcttagcaacagagagagacatgacgtaagacccagattgctatttttattgttatttttcaacagtgaatctaaagtttatggttccagggactttttatttgacccaacaacacagtatcccaggatatggaggcaaggggaacaagagcatgagtgtttttccaagaaactggtgagttaagtaagattagagtgagtgtgctctgttgctgtgatgctgtcagccacagcttcctgccgtagagaatgatagagcagctgctcacacaggaggccggatatctgataagcagctttatgaggttttacagagtatgctgctacctctctccttgaagggagcatggcagacccattggatggattggggtgaacagttcaggtcccatgcttggagcattgggtatctgatgtctgcaccagaacaagagaacctctgacggtggagaaccatgtggtgtaagaagagatcttaggtctcttctttataccaagctcatgttttataccaagctcatcttttataccaagctgtgcaggtgactatgcctcctcttctgcacagaatgcttccaccagcatcctgagaagaaatgattacttctgtaaaacatccttttttccagcctctgggaatcagcccccccctctctgcactatccgatcctcatcaacagagggcagcattgtgttggtcagtgttcccttggcgagcaattgaaacttgtttaggccctagggttgagcaattttaaggttgagactccaagtctcctaaaattctaggagagaaataaagagtctgtttttgctcaaaccatcaggatggaaacagtcaggcactgactggggtgcttccaagaggcatgagagtgcctactctggcttgagcacttctatatgcaaggtgaatatgtactgagctaggagacttccctgcaaaatctctgttcaccctgggttcacatccccatgaggtaatattattattcccattttacaaataatgtaactgaggctttaaaaagccaagacatctgcccaaagtgatggaactagaaagtctagagctggtattctagcccaaatctgtctgaccgcaatacacagattatttattcctattagacactggcttctactgaaaatgaaacttattgcagagggaataaatacaaagatggaaagccagtaaagaagtcagtatagaaccactagcgatagtgttgctctggcacagaccactgtggttgatgcatggccctccaacttggaataggattttccttttcctattctgtatccttaccttggtcatgttaatgactttggagttattcagttcctgaccctttaattctcacaaccaaccagtcatgttgcttgaagccattatagacgagcttcaaagcaactttaaaagattgttatgtagaagtatgagttcttcctttaattatcattccaactttcagctgtagtcttcttgaacacttatgaggagggaggacattccctgatataagagaggatggtgttgcaattggctctttctaaatcatgtgacgttttgactggcttgagattcagatgcataatttttaattattgtgaagtggagagcctcaagataaaactctgtcattacgaagatgattttactcagcttatccaaaattatctctgtttactttttagaattttgtacattatcttttgggatccttaattagagatgatttctggaacattcagtctagaaagaaaacattggaattgactgatctctgtggtttggtttagaaaattcccctgtgcatggtattacctttttcaagctcagattcatctaatcctcaactgtacatgtgtacattcttcacctcctggtgccctatcccgcaaaatgggcttcctgcctgggtttttctcttctcacattttttaaatggtcccctgtgtttgtagagaactcccttatacagagttttggttctagttttatttcgtagattttgcattttgtaccttttgagactatgtatttatatttggatcagatgcatatttattaatgtacagtcactgctagtgttcaaaataaaaatgttacaaatacctgttatcctttgtagagcacacagagttaaaagttgaatatagcaatattaaagctgcattttaa

SEQ ID NO: 1473 - DNA, 284 bp, Homo sapiens
cacgaggtcataatctagtatgcatagattgtaaacttttagaaattagaaacttgaaaacctacacttttgctttggtgattttacaggtttgtacaaacataattgagaaaaatgcaaacccagagtggaatcaggtcgtcaatcttcagatcaagtttccttcagtgtgtgaaaaaataaaactaacaatatatgactggtgagttgaaaatacgtatgtgtctaattcaacataaaataaacattggatattgtgaaacattaaaaaaaaaaaaaaaaaa

SEQ ID NO: 1474 - DNA, 244 bp, Homo sapiens
cacaatgtggttaacatggattaatgtgggaatttggcttcaagaacacaaccttaggaccttgggcccaaaagctggtggtgaaatgagaggagccaatttaagaagacccttatggagacctgaggctgcagaaactggtaggtttcatcaggtggttaaagtcgtcaaagttgtaagtgactaaccaagattatttcattttaaaaccacagaataaaaatgacaccttgagcttctctta

SEQ ID NO: 1475 - DNA, 382 bp, Homo sapiens; identical to SEQ ID NO: 1263
  misc_feature (1)..(382): n=a,t,g or c

SEQ ID NO: 1476 - DNA, 1086 bp, Homo sapiens
cggggcggcggcggcggcgtgaagtcactgctgctctgggttcgggttggcgactgaaggcggtaccggcctcccggaacagcccgggggagggcttaggtgcagaagggcaggctggccgcggccggtttggtctggggaccacgggctggagcaggtggaaatttaaaattgtttacagtcaacactgtttccagccatgggtttgtctccatctgctcctgctgttgcagttcaggcctcaaatgcttcagcgtccccaccttcaggatgcccgatgcatgaagggaaaatgaaaggctgtccagtgaatacagagccatctggcccaacctgtgagaagaaaacatactctgtgcctgcccaccaggaacgcgcctatgagtacgtggagtgtcccattaggggcactgcggctgagaataaggagaacctagatccttcaaatctgatgccaccaccaaatcaaacaccagctccagatcagccatttgcattgtctactgtcagagaagagtcatccattccgagagcagattcagagaaaaagtgggtttacccttctgagcagatgttctggaatgcaatgttaaagaaagggtggaagtggaaggatgaggatatcagtcagaaggatatgtataatatcattagaattcacaatcagaataacgagcaggcttggaaggagattttgaagtgggaagcccttcatgctgcagagtgtccttgtggtccatcattgatccggtttggagggaaagcaaaagagtattcaccaagggcacgaattcgttcctggatggggtatgagttgccttttgataggcacgattggatcataaaccgttgcgggacagaagttagatatgtgattgattattatgatggtggtgaagtcaacaaggactaccagttcaccatcctggacgtccgtcctgccttagattcactttcggcagtatgggacagaatgaaagtcgcttggtggcgttggacctcgtaaagcactgtttcagatggaaaaatataaactatttttttctgagcgatacattaaactattttccccagaaaaaaaaaaaa

SEQ ID NO: 1477 - DNA, 2149 bp, Homo sapiens
  misc_feature (1)..(2149): n=a,t,g or c
gacatggccaacatcgcggtgcagcgaatcaagcgggagttcaaggaggtgctgaagagcgaggagacgagcaaaaatcaaattaaagtagatcttgtagatgagaattttacagaattaagaggagaaatagcaggacctccagacacaccatatgaaggaggaagataccaactagagataaaaataccagaaacatacccatttaatccccctaaggtccggtttatcactaaaatatggcatcctaatattagttccgtcacaggggctatttgtttggatatcctgaaagatcaatgggcagctgcaatgactctccgcacggtattattgtcattgcaagcactattggcagctgcagagccagatgatccacaggatgctgtagtagcaaatcagtacaaacaaaatcccgaaatgttcaaacagacagctcgactttgggcacatgtgtatgctggagcaccagtttctagtccagaatacaccaaaaaaatagaaaacctatgtgctatgggctttgataggaatgcagtaatagtggccttgtcttcaaaatcatgggatgtagagactgcaacagaattgcttctgagtaactgaggcatagagagctgctgatatagtcaagcttgcctcttcttgaggagcaccaacatctgttatttttaggattctgcatagatttcttttaatctggcattctcgcctaatgatgttatctaggcaccattggagactgaaaaaaaaaaatccctgctctgtaaataaagctaattaaacgtctgtgtaaatttaaaaaggggaaatactttaattttttttcttaatagtgtaaaaattccctgagctaagctaaaaccatggaagaaacatgctactttagtgtttagcagtgtaccaagactagcaagagtttgcttcaggatttggttgaataattaagataatatttggagtgtgtcagggccattcaaattgttggtgttgcatcacagctaccttaactgtttttaacatggatcctctgtgcctgtgaatttacttgcatgcttgtacttgacttcttaggatgggtagctgaaaagaccaccattttaagcatttgagaattcttaaatatgaaatttattcagaattgaagatggtgacctattcagagcctttttgtccttgtcaacagactgggacagtgtctgattcccccttcacccccccccacccccgccttggcacacacagctaatattctaatggtaaatttctctgtatcaggtggggaaatgtgctgaaggacagtatgtatcccttgcttcatttttaggtcgtaggtttggaatgtcttgtcccagttcttcaaacactcttaaatttttcttaagtaatgtaaaaatggaactgccaattttatttctcttgcaaaaatagtaaatacttgatgttacattattcccaggtttaatgaaagaacccaacttagtttttcagtgaatttgacacctattttttagtgatgaaatttttctttgagaactggcaaggatgcagtcagctgtttgcagtttttagcctgattttggggtctatagagattgctttattggatacttcaagtcattcttgcttgcacttcccctattgacacatgaaagctgtgttggtgttttattgtacatacttcagatgcacataggaatagaagtgtgttataaatctagctttctttatgatgtttctgataatacgagaattgaaaactttaccttctcttgtacatagtcagactatttgtattaaatttacatttcattctaagttccaaaagtttgaaaattattagttttgcaagatcacacactaatgtaaccattttatgaaggttgaagtggatttatgcaggcagttctatatatagaaatncaattctttttaaatttttaggaccaatacaaaataacacaaatgtaatggaatcagactgaattaaagtaaggctgtatattgaaagtcatattataaaaggtttgctttctttaagtgttatttatcttaaattataatcgttaaatgtttggaagataatttttgaatcataacgtcagcataacttcatttgacttctcaataatcttgtcgacgcggccgc

SEQ ID NO: 1478 - DNA, 495 bp, Homo sapiens
agactggacctactgattcaacttggagatgagcgggtctgtcctcttcacggcgggagagaggtggagatgctttctgaccccgtcgaggtcatccctgtactgggccttacataatttctgctgtcggaaaaaatccactacacctaagaaaattactcccaatgttactttttgtgatgaaaatgcaaaggagcccgaaaatgcacttgacaagctcttctcttcagaacagcaggcttccatcttgcatgtgttgaatacagcatctactaaagaacttgaagctttccgattgcttcgtggaagaaggtccatcaatatccgtagagcacagagaaaactttgggccatttcagaatttaagagagtttaatgaatgtgcccttgtttaagtataaaagtacagttcaagtttgtaactccatactttgtccaaagactggacggggaaaaaagaaagtcaccggaaaaccggttcctgagaaagctcct

SEQ ID NO: 1479 - DNA, 575 bp, Homo sapiens
  misc_feature (1)..(575): n=a,t,g or c
cccccagctctcagggataagaccagtcccccagcgtggtggtcagcacggaagctccaccttctgggtgaggcgccatcctaaccatccagccaggccacccacaacccgagaatcagggagaaagtccctccccagcagccccctcctcctggctgggaagaatggtcccccagcaagcacttgcctgttcattcccgttcatgttttgcttctctctcagactgccttcctgcttctgggctaacctgttccaagccaggctcctcaatgtgacctcgcagttgagaagcccattatcgtggggcatccttttgcctacagcccctggttagggcactttggacaggtcttgctattcagtgaacctttgtacatttcaaagaagactccatggctgctccagatgcccccttgctgggtgcaggtggggactgtccaatgcagagtggcgggacagagagttaaagcaattcctgggtctccttcttatgactgtctatggggtgaattgccttctggggttgtctcgatctgtgnttcaataaatgccgctgnaatgcaaaaaaaaaaaa

SEQ ID NO: 1480 - DNA, 345 bp, Homo sapiens
  misc_feature (1)..(345): n=a,t,g or c
cctcagtccgatggtgaatggctattcgtaaatggctggtctggctctttggtgttggagcctttccaatagccccatgaaaagaagcatcacccaaggatattgtaaaaaggatgtaacaaggagatagggtagacattgtactcagtgggccttggggctgagccnagctctgagcagaggactgtggcattcactgtccttgagtgtttcaccttcttggataacacacgggccttctcttctggatttcatcagagattacagccagatgggggctgaagaccatcctcttgaccacagaggtgtgactgtnggaattcctcccaatttatgggtttccca

SEQ ID NO: 1481 - DNA, 2584 bp, Homo sapiens
gaggagcagcgagtcaagatgagagttcagccgcggcggcagcagcagcagactcaagaatgaacaatccgtcagaaaccagtaaaccatctatggagagtggagatggcaacacaggcacacaaaccaatggtctggactttcagaagcagcctgtgcctgtaggaggagcaatctcaacagcccaggcgcaggctttccttggacatctccatcaggtccaactcgctggaacaagtttacaggctgctgctcagtctttaaatgtacagtctaaatctaatgaagaatcgggggattcgcagcagccaagccagccttcccagcagccttcagtgcaggcagccattccccagacccagcttatgctagctggaggacagataactgggcttactttgacgcctgcccagcaacagttactactccagcaggcacaggcacaggcacagctgctggctgctgcagtgcagcagcactccgccagccagcagcacagtgctgctggagccaccatctccgcctctgctgccacgcccatgacgcagatccccctgtctcagcccatacagatcgcacaggatcttcaacaactgcaacagcttcaacagcagaatctcaacctgcaacagtttgtgttggtgcatccaaccaccaatttgcagccagcgcagtttatcatctcacagacgccccagggccagcagggtctcctgcaagcgcaaaatcttcaaacgcaactacctcagcaaagccaagccaacctcctacagtcgcagccaagcatcaccctcacctcccagccagcaaccccaacacgcacaatagcagcaaccccaattcagacacttccacagagccagtcaacaccaaagcgaattgatactcccagcttggaggagcccagtgaccttgaggagcttgagcagtttgccaagaccttcaaacaaagacgaatcaaacttggattcactcagggtgatgttgggctcgctatggggaaactatatggaaatgacttcagccaaactaccatctctcgatttgaagccttgaacctcagctttaagaacatgtgcaagttgaagccacttttagagaagtggctaaatgatgcagagaacctctcatctgattcgtccctctccagcccaagtgccctgaattctccaggaattgagggcttgagccgtaggaggaagaaacgcaccagcatagagaccaacatccgtgtggccttagagaagagtttcttggagaatcaaaagcctacctcggaagagatcactatgattgctgatcagctcaatatggaaaaagaggtgattcgtgtttggttctgtaaccgccgccagaaagaaaaaagaatcaacccaccaagcagtggtgggaccagcagctcacctattaaagcaattttccccagcccaacttcactggtggcgaccacaccaagccttgtgactagcagtgcagcaactaccctcacagtcagccctgtcctccctctgaccagtgctgctgtgacgaatctttcagttacaggcacttcagacaccacctccaacaacacagcaaccgtgatttccacagcgcctccagcttcctcagcagtcacgtccccctctctgagtccctccccttctgcctcagcctccacctccgaggcatccagtgccagtgagaccagcacaacacagaccacctccactcctttgtcctcccctcttgggaccagccaggtgatggtgacagcatcaggtttgcaaacagcagcagctgctgcccttcaaggagctgcacagttgccagcaaatgccagtcttgctgccatggcagctgctgcaggactaaacccaagcctgatggcaccctcacagtttgcggctggaggtgccttactcagtctgaatccagggaccctgagcggtgctctcagcccagctctaatgagcaacagtacactggcaactattcaagctcttgcttctggtggctctcttccaataacatcacttgatgcaactgggaacctggtatttgccaatgcgggaggagcccccaacatcgtgactgcccctctgttcctgaaccctcagaacctctctctgctcaccagcaaccctgttagcttggtctctgccgccgcagcatctgcagggaactctgcacctgtagccagccttcacgccacctccacctctgctgagtccatccagaactctctcttcacagtggcctctgccagcggggctgcgtccaccaccaccaccgcctccaaggcacagtgagctgggcagagctgggctgccagaagcctttttcactctgcagtgtgattggactgccagccaggttaataaactgaaaaatgtgattggcttcctctcgccgtgttgtgagggcaaaggagagaagggagaaaaaaaaaaaaaaaaccacacacacccatacacaatataccagaaaaggaaggaaggatggagacggaacatttgcctaatttgtaataaaacactgtcttttcagggttgcttcatgggttggaggactttctaaccaaaaattaaaaaaaaaaaaaaaa

SEQ ID NO: 1482 - DNA, 275 bp, Homo sapiens; identical to SEQ ID NO: 1266

SEQ ID NO: 1483 - DNA, 318 bp, Homo sapiens
tttattattttgaatgatttaatggttttctacacaatttacatcacaacatgtaaattttagcagtaacatctgattctaacagcacatcatgctattcctttcatagagccttcagagattcaatgctaaacaaatttccttagttggcatcaaggcactgatcactttagaggcttttaagaaattatttaaagatgcaaatgcctctgagtgaagtgtactatcccatcactgaagcccacaggaacaagtcctacaattttaaaaaggctcgatggaaaaatttctcaatcctgaaatcccctagggaagggg

SEQ ID NO: 1484 - DNA, 1297 bp, Homo sapiens
cctaagtcgccgcagaactgccacgtggggatgagatttgctgggctggtagcggcggctgctgcggggaggtcccgcccacgtgaagccagcctaactgagctctggactttggggacagctgtcagtggcctaggccgcaggacaccatgaagcaactgccagtcttggaacctggagacaagcccaggaaagcaacatggtacaccttgactgtccctggagacagcccctgtgctcgagttggccacagctgttcatatttacccccagttggtaatgccaagagagggaaggtcttcattgttgggggagcaaatccaaacagaagcttctcagacgtgcacaccatggatctgggaaaacaccagtgggacttagatacctgcaagggcctcttgccccggtatgaacatgctagcttcattccctcctgcacacctgaccgtatttgggtatttggaggtgccaaccaatcaggaaatcgaaattgtctacaagtcctgaatcctgaaaccaggacgtggaccacgccagaagtgaccagccccccaccatccccaagaacattccacacatcatcggcagccattggaaaccagctatatgtctttgggggtggagagagaggtgcccagcccgtgcaggacacgaagctgcatgtgtttgacgcaaacactctgacctggtcacagccagagacacttggaaatcctccatctccccggcatggtcatgtgatggtggcagcagggacaaagctcttcatccacggaggcttggcgggggacagattctatgatgacctccactgcattgatataagtgacatgaaatggcagaagctaaatcccactggggctgctccagcaggctgtgctgcccactcagctgtggccatgggaaaacatgtgtacatctttggtggaatgactcctgcaggagcactggacacaatgtaccagtatcacacagaagagcagcattggaccttgcttaaatttgatactcttctaccccctggacgattggaccattccatgtgtatcattccatggccagtgacgtgtgcttctgagaaagaagattccaactctctcactctgaaccatgaagctgagaaagaggattcagttgacaaagtaatgagccacagtggtgactcacatgaggaaagccagactgctacactgctctgtttggtgtttggtgggatgaatacagaaggggaaatctatgacgattgtattgtgactgtagtggactaataaaacccacatttttattaaaaaaaaaa

SEQ ID NO: 1485 - DNA, 469 bp, Homo sapiens; identical to SEQ ID NO: 1269
  misc_feature (1)..(469): n=a,t,g or c

SEQ ID NO: 1486 - DNA, 422 bp, Homo sapiens; identical to SEQ ID NO: 1273

SEQ ID NO: 1487 - DNA, 388 bp, Homo sapiens; identical to SEQ ID NO: 1090
  misc_feature (1)..(388): n=a,t,g or c

SEQ ID NO: 1488 - DNA, 421 bp, Homo sapiens; identical to SEQ ID NO: 1275
  misc_feature (1)..(421): n=a,t,g or c

SEQ ID NO: 1489 - DNA, 455 bp, Homo sapiens
  misc_feature (1)..(455): n=a,t,g or c
gctttcaggaaaggtttattgtggtgagtgccttctgtacagtcaactgcaaatgaaacgcagaggatgggtgcccagaagcactgcggcagaggcgcacgggaagcccggggccaggctcatgcaacacgacgctcaccgcggctcgggcctggggcgtcagagaaacctttttaaaaaatggagatgaatgttacagaattggacaacccgaactgcttttcaaaaccagaggaaggaggttcttaagccgttactcagataccagtgctggggagggaggcctgacttcagcaacagctgtgggtgggctggaggcggcgcantttggggncccccacgccagctgtctcagccaccaccttgtgcggcgctttgctccgagggggtcagcaagagcaactgattggctgccactttccaggccccgagagacagggcctcacgtaacttta

SEQ ID NO: 1490 - DNA, 415 bp, Homo sapiens; identical to SEQ ID NO: 851

SEQ ID NO: 1491 - DNA, 421 bp, Homo sapiens
  misc_feature (1)..(421): n=a,t,g or c
aatgtttcactctttatatataattgaatacttagttattgtgacaaaaagttagtatggctaaagaaaataatgcaagtacatcacctgaaataacncctgtatcccacgatacatgaatccaattccaatgctgttttctttctatttcagcaacactatacgtagtttaatagtcaagataccacttgaatactatccaagaataatcagatctgctcaagttaggtttatataatttaccaaggtgatagattctgactttgaagattactgaccactgatcactaagaactaatattagctgaccatatgatnccncaagaactaactttgactgataaatttgaatttcatcttttgtacactgaggaaagagattaacaattttctccacatcaagatggcttgtnttgaagga

SEQ ID NO: 1492 - DNA, 441 bp, Homo sapiens
  misc_feature (1)..(441): n=a,t,g or c
tgacgtgttacctgctatttttattccccatttgccatcttctgattgggggttgatgttttacagatttttttttcaaaggctttatttcagtttctgaggttaggatgcccctgtgcccctcgctccacacctgggcaggtctaaacttccttccaggatggcctccacacacagcctcccacctggggtcacctggcttcctgggggacccgcaanganggggcagggagcagcagtccgggtgcggggatcgggggacctcggcgggggcatccacaggggctgcaagacctctggtcagcatggcgtgggtggggagagcgtttctccctggggtcctgagccagtgactcctgttaggacctttgtcccacctccgcctggtggaccggcaggacctggtctagccagtcctgcagcctccattcccccacctgc

SEQ ID NO: 1493 - DNA, 561 bp, Homo sapiens
  misc_feature (1)..(561): n=a,t,g or c
aatcagcagcaagcagaatgttaattaatagtctaagatgatctgagagttaattaatagactaagattatctgtggtctatttattgaccacaccttataaacaggataggtttttcctattttgagactttacatgtctcagtactttctaaattgaaatcagagcattaaatcaagggaattgatgtggacaaaacagctgccagcatgatagtgtttgtgaattatgtacctctcttagacataaactcttagacataaactcataaaatctgttcagaacactgaacagatttagatttaccatagccaataaaatttggatttagtgggttagtctcagcatttcatggaatcctgagatgcccaaatctctggaaacttcctatttcctgttttactatctttttccttttatcaaaatgggtgccatgagggtcccagaccaaaactcaccatcctggaaaaacaaaagtctggggagagaactccnggttttatttcagatgatatatttgccaatcnttggaataggtcnggtcataattataataggatt

SEQ ID NO: 1494 - DNA, 447 bp, Homo sapiens
  misc_feature (1)..(447): n=a,t,g or c
ttttttttttttttttgctgagaccggtaatattctttgtttatagtagtaatatcatttggaatagcgtgtttaagagtaataaatacagtctcttggacacgggactcacttatcagttcatactacaataaaatcattttggaaaatatactactaataatatatttcaccaaaaaacaatattacaattttctttaaaattataccaattatgactcatacaatagcaacacctagaaaacattttgtctgacgtcataaaatgagtgcagatataaaagaatcaacagcagataatgcacctaattcatggattaaagacaaagattaaaaaggaaagaagagtttgtcattttacatatcagnggaaatataataagttaagtctacaataatctgggttgaatgcatcacacttacacattgaaaatttatcagactgac

SEQ ID NO: 1495 - DNA, 429 bp, Homo sapiens
tgaaaagatgaaagctgaaaaaagttaggtttggtgtaggttacaccaatggatgttggtgcctcctactggtcctaacaaaaatataagtggtaccagcaggcactacttcgcataccaatgtgaagtaaaaattccctttcatctgtggtcaagtatggaaaaattatgaaggtcctcattaaatccacattttttaacccattaaattatccttataaaaattcagataaactactgtcataaatgcaactgcactgcctcaaggacctaaaaactgttttcctaatcaactagatggcataatcaggtaacagcagaaacagatagtctagtgaatttccgagagtcaaaatatgctactttgatgcttattaaacactgaaaactttcacaatactaactccagttaagttgggtgaggttaaa

SEQ ID NO: 1496 - DNA, 446 bp, Homo sapiens; identical to SEQ ID NO: 1100

SEQ ID NO: 1497 - DNA, 614 bp, Homo sapiens
  misc_feature (1)..(614): n=a,t,g or c
agttgaattagctaaacgaatccttgtatttatttttcacacagcacaaatgcaggtagtacacagtaagttcataattccccacaaaacttataaacttaacaaatgggaatctaaacataatattctgaatcacccatagctatccactgtgtggaatccattctacagcagcagaggagtaccttaatttaaagcaccaagtttccaggcattactacaaatatcttcttttcattctctaatacatgcagtcaaactgcctatgaagcaaataccaattcatcttacgctttaacagataaggtaaagcacttgggaaatcaacattattcttaagtctgaaagtgattctacctctttacctattatattttctcccatgaaattttaaacttttaatggagttatatttaatatgagaataaattaaaatttgaacttaatgtctttcagattctccagcgtttagaatgttatatttgttttatgtctgagggaacaaaacgtaatttcnaatttagatattctggctaccttattaaaggtacattataatttatagcaaggaatatcatcggttggccaacatacggatttaaaaatncccaatg

SEQ ID NO: 1498 - DNA, 154 bp, Homo sapiens
tgtacatctttattatttctaaagcactttcctcaacctaatttcagtttttacaattggtactcaagaaaatagagacagaaatcatttgattttgcccagaaaccatctgcttatatttataaggccacctaatttgaaatcacatatagac

SEQ ID NO: 1499 - DNA, 315 bp, Homo sapiens; identical to SEQ ID NO: 1284

SEQ ID NO: 1500 - DNA, 433 bp, Homo sapiens
atctatgactacaggaaaacatttatttacatgccctctacaaaatggatttacaaaacatagtaactattagggtacatgaccttgctcctatcttccccattgtgcttcttctctatagaaaatccaatatgaaatgacaaagagtactgtactcagaataagaacttcatctatcataaatgtacacataaatatcagtgaattgtcatactcaagactcagattcaggaacttcttcatcagggcagcagtaatattccacaaaacatatttgtccatcttcatttctaatcatatactgtaatgaaaggaagcctctgttatctgtccgaatagataccttacaagataggactaatgcctttgtagagggtttcagtaagggaatcttgtatctgttgacttgggtctgattacaatgaaatgcttc

SEQ ID NO: 1501 - DNA, 182 bp, Homo sapiens
tatgagtggacggcagacagctatatttagtggtgcctcgacactcacgaaccgccagcgtggcgcctggatcttgcccagctgccagctccccccaccaggactgtggttcctcagtttctcctgccagccccggctcatctcagggcaaagctatagacatggtagatctcatcggggag

SEQ ID NO: 1502 - DNA, 476 bp, Homo sapiens
caaacctcctcctttcaaatcaggaagtatacataaagtgcaagtaaggttcattccctcgctgtgctcctaggctcttctcttgatagtattaccgaatctatcaggtaaaccgctggccgagtaggatgtctgcaggaatttctggagttagcaaataacttcatctggcaaagagagtatctgaagatcaacacagtcttggcaagaaaacatgaagtaccacacacaagacagggatgtgaaggatgcaagaagtagcagggagattgttgtcactgaagaggccatctttggatctcaaagaatttaagagaattcaggaaccgttactaaaatgaacaaggccagcagatttcagagcacggtcagtcttcagtgagggcagattcagttttcctagttaaattcctgaatttctttttggcttctgccctttcttcagcatcaaagtaccagacagtcatagcatatct

SEQ ID NO: 1503 - DNA, 379 bp, Homo sapiens
aaccaccaccaccacagccatttattaagtgcttgccaggcactgtgctaaagctttacaaacattgtttcagttattccaacaaccctgaggtagatattttcaacatgcctccctccacccatgttattatagttgaggaaactgaggctcagagaggttaagtaaatcaaccaaggtcaaacccagctggtaagtagtgaagctagaaattcaaaccaactatatgtgactccaaaatccatgcctttaaacactatcctagattgtttaccattgaaagttaaaggacatatgctccttcccaaaatatgagaatagattttcagtgggaaagcaggggggagccatatgtaaattctttcatcagctatgggac

SEQ ID NO: 1504 - DNA, 403 bp, Homo sapiens
tttttagtttggttttgattttaaacattttattattgaaatttcaaacacatacaaaagtagaaatattagaacaataagtctccatgaacaaaacactccacttaaattatcaacatgttgccaatttagtttccagctctctttgccaattatttttcttttgctagaatattttaatccaaatgtgtctatcttcatttcatagtatgtatctcatatcatacgatcttttattttttataatcacactgacataatccctaaccaaattaatatatgtaaatatcatttaatatttagtccatgtccacacttccctcactgtctccaaaatggctttttatgttttgttcaaaccaggtccaagtaatgccaacatactgaatttagttgatatgtc

SEQ ID NO: 1505 - DNA, 522 bp, Homo sapiens
cagtcctagagcctgcagtattgtaattttttgtaaaaccatgtaaccaaatacttaaatatatccacaacatctataccacagaaatgcatagtacataatatactaacatctcaaaataaacttctattacagttttatgcaaattatggtaaaagattatcacctgccacattttgaaatggcaccaacttcaacatcaatgcactagtcaaaatccttactagaagtgatgtcttctgcattatcatctgaacattcaaaatcaagctgttaatctaataaccacagtatgttatcatttaaaatcactgtatatttggatgttaaagcaggtagtaatacagcaggaaaagtgtttctaattcacagtttcaaaactaaagggtgcagttttcaaatatctgattgcttaaattggtcactcaatttaacaactgcctccttcaatacatgtaaactatgtttgcacagcattaggagatgtcttttatttcagaattagttcttactgttacagga

SEQ ID NO: 1506 - DNA, 353 bp, Homo sapiens; identical to SEQ ID NO: 1289

SEQ ID NO: 1507 - DNA, 416 bp, Homo sapiens
gcatctaactgtccataaattcatggctacagtagagattcacggcgcaacgactttcatactggttatttttttttaattctgtcagtgagcagcatttcccagttttacactcccctaatggcagctccattaggcgagactgcaggctgcatctgtgattaggtccatgcagctcgaagatcagttcggcacgcgggagggtcccgaaagctgggtctgtccagtgtcttgcagcagcggttgcagggggtctaccagctcgccctgacagcttcgatatcgctaaccaaattctgggccaggcatatcccaaatatctgcagcaatgcaatgcctatgaaaataccagcaacgatggttaaattgtcctgcaaccacttctcaaactggggcacacagctttcgtgtagatt

SEQ ID NO: 1508 - DNA, 400 bp, Homo sapiens
agtcaactggtaaagtttatttcataagtataagtaattttaagccttttactaaactgtaaatttcaatccattaaaaactactaccggagcagttttgaggtattactgttaatttagtatagaaatgttactgtattttgatgtggtatgaaatgcagccgccatgcctttcatgaaacggtgctatcgtggtgctgactacagacatgtcctatggctttcaggaaattattgtgcatgtgcattaacagattttccaaacattaatgacaatttgattggttagtcatttgtaagcataccaaaataataaagtatagcccacgtatgagccaaacacactgagacatttgaggcatacaatgctaccctccagtctactttcgtcagaaaccaa

SEQ ID NO: 1509 - DNA, 426 bp, Homo sapiens
tttttttttttttttcacatacagtctttgttttaatgtttattggtagaaacagatcttcaatgcatactttgtgtttatataaactctacattctcttaaaggttttcgttttgttttcactggagatttttagcctccaagtgaacttaacatattgcctatgcatctgattctttatagacttttagattttaaagctaaatttgagaaaccatgcatactgtataccttatttaataatccaaagaattgtttgcactttcaaaaaagttacaaaaaggctgaacacaagttaaataacctatatgatgtaaattttccatttctgaatactttttcagtattatatattgcttgctgtctaataagttagattgtcagagacgcttcagtaaattatctctactttaaaattatatctga

SEQ ID NO: 1510 - DNA, 456 bp, Homo sapiens
tttttttttagtcataaaaccgattatttaattgaagctataaaaaaggtagtataagtgataaaataattaggaaagaatatttagcatgtttcaaaacatttaaaataggagcagaacattttacaaaaagttgtacaggaaattaaattcttaaactatcagtacaaacatgacattacagagtatcttataaaatacaaagacaaatataaaaggactatgatgctttaagtctgaaaactattggccaaatatttaggtttaaatttacagttcctgggtatgagaatcatattactatatacatctcccaaaccagtaggtagtattttccaattaaccatgtgtggtatcatcttctacaaagtctttggccatctctgctgtgatcacatcaatatgactaaccttatttctgaactttacaccatagaatttgtcagctgactcaag

SEQ ID NO: 1511 - DNA, 311 bp, Homo sapiens
tcctttatacttctgtttatttttcctgcttatgaaaacagccaacaattgcctttcaagggaagggaaggtaatgctgggaaaggtcctcaggagccctgagccaagttctcaagagagaagtgaggcagctggggatctgggaggccagagtccgggccagggcctcagcatcctagaaccagggctgcctcccgaagagcagttcagagggcgtgactccatacgggcagggcggctccacacaggcctggaacacccttctcctcagcccagggagctcatcagggtctgggcctgcttcagttctg

SEQ ID NO: 1512 - DNA, 332 bp, Homo sapiens
ttttttttaatgtagattctttattgattccaccaatgtattagtagatatgataataataaatggtatttttacattctcttaaccaaaaatataacaaatatttacactcagtaaaaatacaaaaagcatacagaggcactgtctttctaaaagacataagtttaagaggtatcgaaaaataggagacaaacattgcttgttacaggataccttaccatcaatgaattgtgcagtagaattgctatctgattattacagatgtgcagttttgtttctgtcctttgctgattagcttacatgtctcaattttaaaagatcaagttcaactg

SEQ ID NO: 1513 - DNA, 385 bp, Homo sapiens; identical to SEQ ID NO: 1116

SEQ ID NO: 1514 - DNA, 500 bp, Homo sapiens; identical to SEQ ID NO: 1117

SEQ ID NO: 1515 - DNA, 379 bp, Homo sapiens
tttttttttttttttttttggagctgatgcctctctttattcatgtatttcatcccctgctgcctggtttctcctgaatccccttgttcccctaaatagcacccccagtccccgcccctagcccagctgcaggtggagtagcagctgctgtctccattcagcagatgggcagactgaagcccaagagtgtggagcccagtctgaggtcacacagcagtctcctgggttcccacttggccttcaatggggagggaggacttggcctgggctccgtgcgccctcactgcagggtggctggctgcggcacgtcgcagggagctgccaatctggtctctgagggcctccagtctctgggccaggtttggaaccccggccccac

SEQ ID NO: 1516 - DNA, 433 bp, Homo sapiens
ttgttttttttttagatctaccttcagttttgtcattttccagtattcacaatcctttcaaagtttcctttaaaggggaaaaaacagaggcttgtaagaaatatgctcaaagaggttctaggacttacagacatcccattccagtataagatacaaaaggcaaaatgtttcctttacccatgatccaggctagctccaagaatcctaaaaacgatgttttaatttggaatctgggatgcggcgttttgtggattaacatgtgttctgacacaaggactactctacttccttaagaaacatgagcaaaaatgctttgctcaacaacctagttatgtatgtacaaatggtgatcatggtccttactgataaaaaacttataagcaatttctgttacaaaatcgatcttgctaacaggtcttggtgtataagttag

SEQ ID NO: 1517 - DNA, 207 bp, Homo sapiens; identical to SEQ ID NO: 1119
  misc_feature (1)..(207): n=a,t,g or c

SEQ ID NO: 1518 - DNA, 286 bp, Homo sapiens
  misc_feature (1)..(286): n=a,t,g or c
caacttgacctaagtgacatttatagaacactccgcccagcaacagcacagtacatattcttttcaattgcacatggaacattcaccaagataggtctcaatacatttaaaaggntcaaaattatgttaaacatgattaacaaaacagaacattttgtagaagagctagaggattaagtaaaaaaaaanttcctagantacgnagacactaaaagagtatataagtgaaaaattgagggaggatactgtgccnggaagtacagtgtctactagaagtttcagaaag

SEQ ID NO: 1519 - DNA, 457 bp, Homo sapiens
ccagtcgggttggagtttatttctgccagagcctggaggctgggagggtaaaggacactcctttagtcccagagggaagctccgaaccctcagagcaaccagaagggagggcagagcatgggcagcagcaggagtgagaggggtccccttgtcctgcccctttgcaagggttcaaggctggtggaggcctggggcttctgtcgctcaggagttcaggggtggacgcagaaatgggggaaggagagtggctacgtagagagtgagagcgagattcctaaaaagatgcacagagagaccctcagagagaagcagagggaatgggttgcactggctgaggatggtggaggagccgtctcactcccttcctaatgtctatagatcaataacgagggaagaaaggaggacagggagctgatggaaacacagcttgccaactgtacccagtcccccaacaagc

SEQ ID NO: 1520 - DNA, 526 bp, Homo sapiens
ttttattctttcttgaggcttcattttgttcaaggtcactaccttgtgatgctttagacttttgggtaggatgaataatgtgtttttctttgttgtaggaaggatccgaagataaagcttcagaagatggtatactaacatttttaggatctgctgatgaagcaatggtctttaagtttatcatagaagtaacatttttaggggctgctgacagttctgtagataatgtctgtcgaacaacataacccattggtgtccaagataactctcttgtacatgaaggagaattggtagcggcattagcagttacagattcatttgggttatttttcaccactatttcaccctttgataacactgcagctggttttactacttctcttagaagagaaatgtcggtagagacagagtggacaggtccccacttgggttgcttctgtatctctgacatattgttctctgcaccttgcagttcaggaaagtccagtgtggtaaattcaaactcaggtttggaggtagatacatt

SEQ ID NO: 1521 - DNA, 330 bp, Homo sapiens; identical to SEQ ID NO: 1307

SEQ ID NO: 1522 - DNA, 459 bp, Homo sapiens; identical to SEQ ID NO: 1308

SEQ ID NO: 1523 - DNA, 418 bp, Homo sapiens; identical to SEQ ID NO: 381

SEQ ID NO: 1524 - DNA, 269 bp, Homo sapiens
tttttttgggagggaagacatttactgtaggtataaaggtttactattattaacaagttatcactagtatttacatgtttataaaatggaaataaaaatgacatacacgtttggtgccaaaagtggcacatccaaactaatatcagtataaaaataaattttcaagctatgtgtttttaaaataaaggtcattgaaacagtaagggggaaaaaatctgcatctggcatgtgttgagatgcaatcatcatcacagcaaagcagccctggg

SEQ ID NO: 1525 - DNA, 286 bp, Homo sapiens; identical to SEQ ID NO: 1130

SEQ ID NO: 1526 - DNA, 375 bp, Homo sapiens; identical to SEQ ID NO: 1314

SEQ ID NO: 1527 - DNA, 451 bp, Homo sapiens
ttttcctgaataaatttataatcttagtagaggaaaagttctgatgtgattttaaaaacagaatcccttctcgccttacttacttggtactttaaccattacaaatttattcaggaaaactaaaattatttaaagaagagacatctagttctagagtaatctggcacattcatatgtgaaaaaaattagaaatcacttgatacatctacagtacacaaatagacgtataaacattgtattttaataatactctttgtcacttcaatttaaatcattccattatgaaaatttcttaattgaagggagactatttcttcaaaactctaaattaaacagagctttatcaattaagtttacagcaatatagcctttagaaatacatatttcttcattttataataatacttcccctttaaaaatttgccatggtttgtcacagatttaaaataca

SEQ ID NO: 1528 - DNA, 479 bp, Homo sapiens
tttttttgtatgaaaagatttaatgaattatgagccattgatcattacaaactttaagccttaatatttcttctttcctatgtaaaaccaggtaattaaaacagcctgtctcagtatgacagaagaccatagtagggataatagtaacgtctgcttccacatctgcatgcttcgttaaccaaccaaagaaagtgctccaggtttcccaagtcaacaaagtatactcagttacactttccctgatcatactatgaattgaaacagaacactcctttgacttttaatagcacttttcatccacggcacaagcactttcccattattttctcctttaccctcaatatccttgtgaggtagtgaagggagggagcaaggattttttttttctattttgcagatgagaaaactcaaggtgaattttacaacagtggttctcaaccttggcagcatattgaaatgaccagaaagtttttaaaaat

SEQ ID NO: 1529 - DNA, 240 bp, Homo sapiens; identical to SEQ ID NO: 1131

SEQ ID NO: 1530 - DNA, 435 bp, Homo sapiens
taagtgatgaaagactgaccagtagaaggtggtgaagatgaagaatagtggaactggcaagtaagaactgttcagacaagcattcattgtgtaatatccataaacaaaactataatccaaaggacttccattttagtatgttctgatgatgtactctagactgtcacctcctctggcttacagaataatccagaactttccatagacattaatcttgcttaacaaaggctgtttacctattatacacacacatttttaagggaaatatatgtatatagctttatctatacacacacatatacatacgtgtatatatagatttatacaaatgtataaataaacataatacttttcaatctttccattgacaaggcaagttcacattcagcaaagtgccaccacatcccatatacacatctctgtacagatatacac

SEQ ID NO: 1531 - DNA, 387 bp, Homo sapiens; identical to SEQ ID NO: 1316

SEQ ID NO: 1532 - DNA, 443 bp, Homo sapiens; identical to SEQ ID NO: 1320

SEQ ID NO: 1533 - DNA, 531 bp, Homo sapiens
tttaatatttaatatttgtagtttaattttctgaacctttggcttataaatttttctcaacttacatttaaaaatgtatcaatgcaccttcttcagtagtaccacatgaaaatataaacctcgttcttccatatcttctacgcaggaagagtgaatgaatagtaccctaaatatcccgcaaagttactttgtgtacttgacggaagattagggaaaaacaatccacttccatatcttgagcagtagttaactagtcttctacctcatcttcccaaatatcgtcgtcaacatccacagcataaaacagccggttaaaacatggtgaaccagggtcattgaaatgtttgtaagggcgcgactctagagagagaacccatgcaaatccaacagaaatattgcatacagccagtacatgtcatcttgttacatccgtctaatttctctatgggagttccacaacatgggcagctctttgagttcttctctagccactccttactttccatctcttccagtgccttctgaatcact

SEQ ID NO: 1534 - DNA, 416 bp, Homo sapiens
ttttttggatgagtcttccgttttattacaaaaatgaagatcagtttgatcaaaatgaaagcttgttcacaagttttacatgaatattctaaatacaaagtctcctgaaacaacatacttttgatatgattttcatttttaaagggatgcaaacattccattttctcatttataatctattccaaggcaaagtattttaataatgtatcctttctgcagttagatcacaattcacaagtataactgaaacagacaaaaccttgtcagcaaaggttaaaagtccttttttctttaaaaaaaaaaaaaaaaggaggtaaataaccagcccttatgtgttttcagaattttgtactacactgacatgatttgcagtcaggtttttcttcctaccccttaaggctacaaaattctgttgc

SEQ ID NO: 1535 - DNA, 338 bp, Homo sapiens; identical to SEQ ID NO: 1325

SEQ ID NO: 1536 - DNA, 337 bp, Homo sapiens; identical to SEQ ID NO: 402

SEQ ID NO: 1537 - DNA, 393 bp, Homo sapiens
tttttttttttttttttctctgttatgattttatttcttcaattgttccaatcacagtttctaatacagaaataaaactattcagcgtctccgttcttgcttcattttgtttcacagagatctgcatttctgagtttccaggctccaatagcagttctgttaagaacagacagccagtatcatcctgagcactgaggtatgctttccatggccgagacccagccctactcattgcgatggtctggatgttcactacttgaagagccatctggagggtgtcaggatggaattctccccgccaaggcaacacttgctgatgagcaactttaaggctaagccaagttttctcaaaataatcagcagtaagctggcgattggggactagcatgaggg

SEQ ID NO: 1538 - DNA, 545 bp, Homo sapiens; identical to SEQ ID NO: 1327

SEQ ID NO: 1539 - DNA, 412 bp, Homo sapiens; identical to SEQ ID NO: 1144

SEQ ID NO: 1540 - DNA, 263 bp, Homo sapiens
tttttttttttttaagatgtataaatgacttacttttaataataaatatttcttgatttataatgtaaatacaattaaacaaatatgggttactcgaattaaaaaaatggcacatgtaaatgagcattttagtacaaataattaaaatgtatttatattatatagaaatctacacaatggaagatactactaaaatgttgctctacagcacatcaccctagacaaaatagaattctagaattctctttaaaaaaaaaaatcac

SEQ ID NO: 1541 - DNA, 317 bp, Homo sapiens
ttttttttttttacaataaacatttattaagctgtaattttcacaatattttaattctgttctgagatctacaaatatctctacataacaccaaagccagtgatttaataaataagaggaatgtatatatcgctttgcaaaaaaatgcctgatacatttatctctatataagatatttgtagaatcagtttcccaaggctcacgaaactaaagtgcacacacacacacacaccatgtacacacacacactattcaaatcaaatggatttatattaagtgccaaattaaatgctatacaaaatttataaccagataca

SEQ ID NO: 1542 - DNA, 295 bp, Homo sapiens
ttttttttttaaattaaaatgaccttttatttgcctggacaacaaaaattttccatgattttgcttttttgaaacaatgataagaaatttttttttaggcaataagatactaagttgtatcaacaaactgcatgggatatttccacaaggagaggattttgttccctgatctagtttacgtgacattttcccttatgcttgctttctctgagctgactcttcttaaactgacctagatggtaccctatttcaactgactcagagttcattcaaaaatatgatatggtgacatggc

SEQ ID NO: 1543 - DNA, 526 bp, Homo sapiens
tttttttttttttttttttttttttcagagacctttttttattaaatgtgtaaaaagcagttctcatcttacaagctcaaaatcagacgaatgtatgagggtgtataattgttatatttataaactgtatcacccaaaaactcaatgaggacacaatctatattacattcaacatttgcatatttacatgatacttactgcaaagtaaatacaaaatgaactcccatcattttagttcagaacacaggtgatataatttcaaaacaaaggcaatttttttcaacaaagaacagaagtctcccaagtaccaattcactattttgcagaaaaatacaacactaattataagatttccattccagtttagtcagtaagatgcgttgtttgtttgtttgtttgttttgtttttagaaacagggtctcactcggtcaaacgggctggagttcagtggtggcgatcagattcattggagccttgaacccctgggctacaaaatttttcccactagggccccaagagctgggg

SEQ ID NO: 1544 - DNA, 702 bp, Homo sapiens; identical to SEQ ID NO: 1331
  misc_feature (1)..(702): n=a,t,g or c

SEQ ID NO: 1545 - DNA, 441 bp, Homo sapiens; identical to SEQ ID NO: 1333

SEQ ID NO: 1546 - DNA, 419 bp, Homo sapiens
tttttttttttttttttatgctcaaactaaggcattttattagctggctttacaacttaaataatatcttggctttcaaaggaacagcttccactaattccaaattaaactttcacaagtttacttgtttggggagggacattcttatggtcaccacaaaatacttttattataaccttccccaaatcttttcttagcattaactggaaaaaaaaaaaaaaaaaagcttaggtcaaatatcaactgcctgaaaaacccaattaagttacttttccttaaaacatgtgcagtataattgaatcaaaagagaaaactgcaaatacattgtgctttggccagaagtagagttcatttcatgatgattcagtatcttcagatactatttttgacacttgccataaatcttagcaaagtaaatc

SEQ ID NO: 1547 - DNA, 474 bp, Homo sapiens; identical to SEQ ID NO: 1334

SEQ ID NO: 1548 - DNA, 450 bp, Homo sapiens
tttggttttccaagtgttagccatttataaataagtacatttgctttcatacatacagttccttgtacagatgacaatctgtatacatggggcaggaaaatgcattcatttgaacttttcacatctatctcacacagctcacatgtacagacaataaaactgctcaagcaagtacagcaaaggaaaatgtctttccttatacacaggggtagatgcctctgtggggtgtggggcatccccactgcacggcttcacaactgtgtggtgttcaatatatcaggagagagaacaaacatgcattggataatatactgtacagagaaagtcctttacatctgagtcatagaaaacctaaaggaaaactaagtgcattaaagctttttccagcaagtgtcttgaaaggacagcaaagaggaggaagaatcaaaatcatattagtacaaatcactc

SEQ ID NO: 1549 - DNA, 135 bp, Homo sapiens
gatcccaaagatattaaatatatgcaaatattccaaagtctgaaaaaatccaacatccaaaaacacttctgacccaagcatttcagataagggaccagaattattagattaaataaggtatattattaagttaaa

SEQ ID NO: 1550 - DNA, 205 bp, Homo sapiens
  misc_feature (1)..(205): n=a,t,g or c
gatccctcactttatttatattcccactataaccagtaagttcatttcataggccctatcatgcattaatcattgnatgnnagnagttaatgaaaacttttcctgttacaacgcccattgccggcaatgaacgtaccaaaaccgccaaggaagtcattgttattgcacaatacatgaggacctggagcttttccaaaagcttaaa

SEQ ID NO: 1551 - DNA, 409 bp, Homo sapiens
aaacaataacagrggtcaaccacagatgtggacctccagcaataaaagcaggaattcagtgccagatactcagcatattaggtttcctacgtaagtcacagggtaatatgttctaaatatctctaatgtgatccaaaaccctaaaaagagctggcacaaaaccatcgtgaatgactgcctctcttgatgtaaatttttaaaaatattattacagtatcatagtccccactaacaacaactggggtacatataacaatgtattgtgaaattaagtgtatttattctctttaccaatagcaaatgytaccctaccttagtaaaaccaagacttgcttcaatcaatbctgttttgtaaaatagcaaagcaacgaatgctgaaatcattcaaagctgcattacttggggtaaa

SEQ ID NO: 1552 - DNA, 383 bp, Homo sapiens
aaaagctacaaatttttatttagctattattaaggcacgtaggcacacggacagaacaggtctcataggtaaccagttgtgtttcctaatagggtgaatacatatcattgccatgaatacatcttttatcataaaatgccaatgagcatcaaaagtaaatggtttgattgttgttgtcactgttttgtttaagaaaaatagggccttaaaataagtgcttcagtggaattcttgaacagtaagtagcctgttgatagtggacctagtttaaagcaccacacaacaatgtgtgtttacatcacccctttatttcatagttagaactaatacagttccacagggtaaattgtcaataaataatggtgtttaatcattaaacataa

SEQ ID NO: 1553 - DNA, 204 bp, Homo sapiens
agaaagaggattgtaggttttattgactaagaagataaagggatgcaaattagttatacaggttttaattccagacaacagaatagtggctattaacaataaaatcagtaagtattctggvcatgtttaacttgaatattcaggtaggggrttttattggaaatacgggtctagrgctagtggaaggbgaacgcctagagmccc

SEQ ID NO: 1554 - DNA, 425 bp, Homo sapiens
ttttttttctgaaaggcagggaaagcttagcactttttaatgcccattcccattcaaatatactcaatttgaagttattcaataaagtcaaataataggtaaatacatatgcatacaagaaaatcagaaaatcttaaaatatttaatccaaaatgaagcaagaaggatcttatgtggtctgaatattgtcactttttataaaaccaagcctttcctccttcagcagagaaggctgaaggtgaacaggaccaacagagatcaaacaggggcacagaacagaaagtagggggaggaagaagagatgttttattccagaaatgaaggaaagtaaattatgtttttgtatcccaaagtcttaggagggttagggcatgggtgggctcatgcctgtaggtcccagcacattggggagggccgaggcaggg

SEQ ID NO: 1555 - DNA, 141 bp, Homo sapiens
  misc_feature (1)..(141): n=a,t,g or c
actcngcaggtagcctggttttcagaaacaacgatgaatgatgcaaatatctagaattcagtgagtatttatcatagaagcaacagcaagaccactactattgctatatctaagtaatatcccagttaattgtcctagagt

SEQ ID NO: 1556 - DNA, 421 bp, Homo sapiens
gagttttatttaatgtcgggagcagattgggtaataaaatgtattttgagaataagactgccttttgaccttttagggtctagggctgtaaagtgtctcagggttgctgccaaacaagtcatgaactgggctggatttttatatttgatgaaaaagagcctaaatgctatctgatttcggataaagaaaaaggagcattaaccttgactatgcctttagctccagccacctttttaagagtaaattgctgggcaggagggggagggctagtcacggaacgaaactgtaagccggaccaggtgtgaggaggggaggcgataaaaagattatagggtggaggagcagaggctgaggaagaattgggacctagctcggcctggcgagaagcagcctgggaggaagggagaggtcagatgggtct

SEQ ID NO: 1557 - DNA, 192 bp, Homo sapiens
  misc_feature (1)..(192): n=a,t,g or c
acagaaaggatgacttttatttccatcctgaatgattcacaccattatttaaacatctgaaaaatcctgaaataatttaaactgaaggcacagaacaaaccaaaatatttaactatcagaactaaaaatcgagaaaatccaaatagttctatagtaacaataaattatgaacaagtttccgtcaacanaata

SEQ ID NO: 1558 - DNA, 433 bp, Homo sapiens; identical to SEQ ID NO: 1341
  misc_feature (1)..(433): n=a,t,g or c

SEQ ID NO: 1559 - DNA, 318 bp, Homo sapiens
  misc_feature (1)..(318): n=a,t,g or c
ttttttttttggttttactagtttggaagcagttttaatgaagatggaaatgtttatcaactcaacacaggtacccccaaaatacaaatcaaaatatcatcttcagctgcatagcaaatatgatttaagaatttaacatcattatttgatcacaagcgtaaatatgtcaccataaataaatgtaaattcattgtacaaaaattcccaacaactcttaatacaaatatgggtacatttgacagtttctgaaacaggattatttttaaaactttttaaaacctaaggctttatttttttccggggntattggacacacac

SEQ ID NO: 1560 - DNA, 484 bp, Homo sapiens
  misc_feature (1)..(484): n=a,t,g or c
attatanaaatagctgcaaaattgtcctcttagctgaaaatcatggatgacctcagggagggtacagagattagaagaaaataaagtaggcatgccaaacatttcagagctagagtgatgtaagatggtaatataggccagatcaggaattagaaaaaaaggataaagagcaaaacagtgcctcgtggccagcaaccttatagtcatgtaggactgactcccctttgtagcaaagaaaggtgagactggttctgcaggtggacacctccaacaggagggcaacctgttccagctctaacatttctttcgttctaattactttcctctttccttctgataattccaccccttaatgccttcaaaaactagcttgccctgatggcaaaaatcttaatccctaaaatctctttccnttctaaaattttcttcccacgngtttttagggctgttcactcaggancaagctgttctaatttaaatgttt

SEQ ID NO: 1561 - DNA, 432 bp, Homo sapiens; identical to SEQ ID NO: 559

SEQ ID NO: 1562 - DNA, 428 bp, Homo sapiens
aataggttacttgcaattgttattgcaggcaacaacttgtacatgattttatttccaaatccacaaaaaacaaattttatacaaatcagcactgtaaaaatgtcaattacagccccagaggctttgctggcagaataattgtctaaattctagaatatgggaaacaggtttttttctggattcatctttttttttcatttttttttttttacaaaaaaaatttacaagtgaaatgttactacaaaactttttataaggaatttttgcaaaacatttacattttaccatcaactatttctgttttaaaatcattatgtagatttaataccctatgctgcacatcaatttatgtgggatgacaacttagtgacatgcataaaaaaacaccacaaggcattaaaatggagacttaaatacaaatattgttg

SEQ ID NO: 1563 - DNA, 250 bp, Homo sapiens
tctttttttttttttttttagaagcagtttattacaaacctgagataatagaaaataacacttgcagtaataaaggaagcagccttgcactccacctccacactccagagtataattaaaagactcctatcagacatttctatcaccaataatgccaacctctgtatacagcagcaagaacgggcccaaatcagaagattcatgttgcttgctttctctataagggaaagtgaagctttcggtaagtatc

SEQ ID NO: 1564 - DNA, 265 bp, Homo sapiens
aatgcacctttctcttattttattttttaaaataagaacttggcattgaaacatgaaacttgagttttgaaaactaccctccaagatgctgaagtatgtttactttttctttgtaaaagggggcttaacctatgtttctgaaggtctaagtctgtgcagataaattatatgacatgtatctgtttttaaaacactctatatgctggtactcacatagaaatagaagccagaatgagaagcctcccaaattatcccatcctgacag

SEQ ID NO: 1565 - DNA, 193 bp, Homo sapiens; identical to SEQ ID NO: 1350

SEQ ID NO: 1566 - DNA, 319 bp, Homo sapiens
tcacatccttgtaaatgtgaactgtgatactatgaagaggtggaaggctgaagaattcaaaatgttcgccccagaaaatattgtctgctttggtcttgctggttgtacgagcaaagagggtatcatcaaggcacagttcgcagaaatatttctttttaggggcaaggtccttggcttcaatgatccataaacgaagaacattttcagctcgcctgcaattgtccttattaggttgaactgtcctgcgaaggttttccatccacttgtctctctcagaagcagaattacagctgaagcatttacttccacttaagtaggt

SEQ ID NO: 1567 - DNA, 453 bp, Homo sapiens
gaattttcaattttacatttaattataagaccacaataaaaagttgaacatgcgcatatctatgcatttcacagaagattagtaaaactgatggcaacttcagaattatttcatgaagggtacaaacagtctttaccacaattttcccatggtcttatccttcaaaataaaattccacacactatcaaactaaatcaagatttgctagtggataaaattaccataaatataccgtactctctctgaaacagctacaaacatcttgtttttgcaaaatatacaatgtttctcaatctttctgtccttatctcaatttgcaaaaatattttgaaacaatctcctttaaatgttattcttgttaatgagggcaaatcttttaaaatccacatgctagatcttgaaaacgcttgagaagaaaataaactgtgaaaggagtggttatttaaatacttc

SEQ ID NO: 1568 - DNA, 298 bp, Homo sapiens
tcatactaaagagaattttcatatttattcataaaataaatgagatatatttccagctgatctcttccaaagttctttatatggttgtttaaaaataaatcaaaacataacagatacatttgatgggtaataagcattttacattctgtaataaattttagaagatattaggggcaattctaaaaaaaaataagtttatctaggattccttcaaggtttcctattttgcttctcccatttttaagttaagaacacaacaaaaatgctttgaacaaaagcaaagacagagtagtgtagc

SEQ ID NO: 1569 - DNA, 303 bp, Homo sapiens
tttttttttttttctgttaattttttacagctttattttagacagatagtttaagaaccaaagacatacctctgtaatgataaaggaaagaaaacaagctttccttttaagaaaccaaagagcacaaaataagactgtttcattatacataatcaccacaggatattaggcactctgacagggttaggcaagattcttggtgtgaggtgaagcacaggcactttatttgtacagtgctgctgattctaattttgaaggtaggtattataaaagtctttacttgtcaccttatttctggcccca

SEQ ID NO: 1570 - DNA, 320 bp, Homo sapiens; identical to SEQ ID NO: 33

SEQ ID NO: 1571 - DNA, 412 bp, Homo sapiens; identical to SEQ ID NO: 1155

SEQ ID NO: 1572 - DNA, 351 bp, Homo sapiens
aagacaaggtcttactctgttgcccaggcgggagcactttgatttaagtgaaaaaactcaatgcatcctggaggatatcctagaacagaacatggaactcttctgcattccttttaatagttgcatagaattccattgtgtatatcgatcgtgatttcttccaccagattttgttgatgggtatttttttgggttgtttctggtcttttgttctcatgactacatcttaaccagtggttctaagatgtggtacccagaacaacatcattactacctaaaaatctattagagaatgaaaattattgggtggaagcccagatctactgaatcagatactctgaagtgaggccc

SEQ ID NO: 1573 - DNA, 497 bp, Homo sapiens; identical to SEQ ID NO: 53

SEQ ID NO: 1574 - DNA, 449 bp, Homo sapiens
tttttttttttttttttgattattgatttactgtgtaatcaagagcaaccaaaactacttctcaattaaaagtacccaacaaaacttttgagccttcatgctacttcaagttaaaaagaaagcaatgcagcttgtgggtttcagaaaactgggccatccggatgttcatgcagtacaagtttcaccaccatactatttccgagagttcacatttgtcaaagtgcagttaacccaaagttgcagcgacagtatatcatgccagctgaatccagccacgtatctgagataggatcatatttctgcactgtattcagataggaagaccctgagtgaccaccgacgacataaaggtagttatcgattacagcagcaccaactcctgttctaggttctttcattggtctacacacagtccactgattttgatgaggatcgtatctttcaatgct

SEQ ID NO: 1575 - DNA, 398 bp, Homo sapiens; identical to SEQ ID NO: 1157

SEQ ID NO: 1576 - DNA, 457 bp, Homo sapiens
ttttgtctaaagtactttcctccatccattactcactctaaatgccatgtgtccttacgtattacaaatccatttctctaactactgaattttccatttaactcatggcattaggatgctgaaatgaaaaaagcagtcagttacctcttgtaacaacggaataatagtatgcaggggcatccttaatacagtcttctttataaggtttacattcctagtttgaagtactttctgtgagaaaataaaaggattattaagatgagcatactgacaaaccaaggacatcacagaaaaaaaaaagtctgtaaaaatgaatcccttaaatcatttaagaccaaggcaataaactacaaactgaatttagcaaaaataaaggttggagggactgaatggagtatgttatattacgtcttgtgcttaacagacaagcacagtctttgggtatcagtaaatttac

SEQ ID NO: 1577 - DNA, 391 bp, Homo sapiens
gcagctgttgtaaaagtggttgagttcttgatttgattctctgcttggtcactgtagatgcatagaagagctactgatctgtgtacattcatccagtatcttgaaactttgctgaattatataatcagttctagcagttttctgggggaacacttagggtttggaaattaaataacctgctcctgaatgagctatgggtcaaaaacaaaatcaagatggaaattaaaaaattcttgaactgaaagacaataatgacccaacctatcaaaacctctgggatacagctaaggtggtgctaagaggatagttcattgccctaaatgcctacatcaaaaattctgaaagagcacaaacagacaatctaaggtcacaactcaaggaactagggaac

SEQ ID NO: 1578 - DNA, 411 bp, Homo sapiens
tttttttttttttttttttttttgtagtaaaatggccagatgtttattattttgttacattatttccattgcatattccacatctatttattttcacttttatttattatcattatttttcacaaaggtacaaggaatttcagaaacaacattaaaacaatcattcaaactgtttcaggcacggtttcaattaaaagcatagatttgatttctgacttcctgtttccttctatgatacaatctcaagttttgtttcaggaagcacaattattgtagcgttaaggtggatacctgccaaagctcatctcctagtgctgtcctcattctcagaaagttcctgagtcaacagaaaggggacgcccagggtatggaataaggagatgagagcatgctctgccaactggctgggac

SEQ ID NO: 1579 - DNA, 269 bp, Homo sapiens
tttttttttatccagagagattaatacacagattaatacacaaaacttttgtaaatagcattccagttcaaagttgcttgtgatcatagccacgtgtgaaccgttagacaagtgtatgctatgccccaaaatgttttataattcttcagtgcagtttcttactgatgtttcccttaaaattaaggcttaatgaaagagaaatccatagtattatgaactgattttctttagcttctgaattaagtgcactctttccaaaatcaagtggt

SEQ ID NO: 1580 - DNA, 366 bp, Homo sapiens
tttttttttagtgtagatatagacttttaaaggtaaaaagaaagaataaagatggagggtgtgataatcctatgaagtgtctgggtttgggtcctgagggcagccaattacatcccagactcactggcaatcaacagtccaagccagggtcccatcagctgaatcctgaggtggggatgcttcagtctttacagaacagggtcaaggaagagtccagaaaccgccgtcattggcttcatgaaaaccgagcacgtctttgagatctttttcaaattctgcctctaagtcaagtcctacctggccaaagtcagaagccttgtaaaatgttttatggttgcgaaacatcaggcgcatgtctcgcacaaa

SEQ ID NO: 1581 - DNA, 418 bp, Homo sapiens; identical to SEQ ID NO: 955

SEQ ID NO: 1582 - DNA, 195 bp, Homo sapiens
  misc_feature (1)..(195): n=a,t,g or c
gatcagaactgttaccaaaaaacaactgtcagttttattgagatgggaaaaatgtaaacctatttttattacttaagactttatgggagagattagacactggaggtttttaacagaacgtgtatttattaatgttcaaaacactggaattacaaatgagaagagtctacaataaattaagattttngaatttnt

SEQ ID NO: 1583 - DNA, 125 bp, Homo sapiens
gatccatgctttactgtgtttaatgggggtaacaggggtccctacagccctcccagctaaacatttggaacaaaacaccagcccttttgtagtggatgcagaataaaattgttaatccaatcaaa

SEQ ID NO: 1584 - DNA, 353 bp, Homo sapiens
  misc_feature (1)..(353): n=a,t,g or c
ttttttttttttttttttttgcttcacaaatgtcaattttattgacactagtgcacaactaaatacaataattgcaaaggaagtggaacgtgttcaaacagaaatggtgacaatgagttagaactgcagttntttcaaggtactacactattatttaaaaaaaaaatcacaaanagaaaaatgttatcactacaagtagggatttaggaagngagnaaattctgggcagtctgtctagnagggttaaaacatttcatggcatttgtgagttgctgttggagagttgttttttatttgtccaccgtaatctgggcaacatccgggggcttaccttcagctctcggcactgtgcg

SEQ ID NO: 1585 - DNA, 290 bp, Homo sapiens
ttaggaagaaccaaaactttattattaatgttctgtttatttacttattttttataatattttataaataaactttattcatataaaacaggccaaacatctgactttcaaaaatggctactgttataaaatcagaaacatagagtgttgggaatactgaaatttctaaacctttatgaataacacaattgcttaagttatatccacaaagaacagaaaagaggcaagcttgaaaatgtgaggatagaaaggtatcacagtgatgtgtttttacgaaacagtaccttccc

SEQ ID NO: 1586 - DNA, 453 bp, Homo sapiens
  misc_feature (1)..(453): n=a,t,g or c
aaaatcaaaataaaagatattatttgagctattttcatacaaactgttggttccttatatcctcccttctataataaagggcatattttactgcaaagaaaattttactttatatatatcactagccataaatttttgaatgtcattaattacatgttgtctagtaccattaaccaaatagcgtaactattttatgtccacatttcacttctgtatttacaaacatatcagtaaagagttaacaatgagatgcgatcaaacatccatattatctgttttgtagacagcaatgtagatgattttgtaatcacctttcatcggagtgaccttatataaaaaataagtcaataatttagaggttctaagtctccaaagggggattttccaaatggtaaatataggaaatggggtataggataatgggganttttagggaacccccggccntgggnt

SEQ ID NO: 1587 - DNA, 434 bp, Homo sapiens
tttctgtttttatttatgcctttatttatttttaccaatagttgatatacctatataatattcacgtgccacaaaaatatgagaagattacatgtgaatattgatctcatgggtgataaagtatacaaaatgttgattaactgaagcagaaatccattgagaaatgcttataaccatcaggtattacatttacagatgttgccaagtcaaagttgaacatccacagtgggacactcatcataaactctgtttaatctttaaaaggagacagagaaatagccaagtacgtagaataaaatctgcctaatcattctcctacgattcttctatgcttgagttcgttttataggagtcttattacatgcacgtttacattccttcccgatatacatattctcaaggaaacgtggcatcctgtagcccctgcttagaat

SEQ ID NO: 1588 - DNA, 346 bp, Homo sapiens
  misc_feature (1)..(346): n=a,t,g or c
aatcttacctatagacttgcatgattcaagataaaatgctttttaaaggagaaaaggtacagaaaataattttaaattctgccggaaagactggtataatgttctaaagtcactcactggccataacctatctttgctccttaatttctcattaatcctaacatcacccttagacacagcctggtatctccaacgacactcctcttaaataagccttgcctagacctgcttctcagcatcaactgttctttctacctacnatgcnctcctctcccatccaaaggatctctcttttaagacctaaattgagttcttccagtaaactttccacaacagtcacagccca

SEQ ID NO: 1589 - DNA, 304 bp, Homo sapiens
  misc_feature (1)..(304): n=a,t,g or c
tgtagagacaggcgcttactatgttgcccaggctcggttttaaactccaagcctcaagtgatcctcctgccttggattccaaagtgctgggattatagttgtgagccactgcgcccaacattcccatgacttttttgtgaaggaggcattcaccaagcttttcctaatctttaccataagccaggctctgcggtaaacaccccacaataaatgtttatcagaggacttagcagggaagtacattaaatgttaacgccttaatctgatactgaaaataaaagataatttcaacttggtttttnaa

SEQ ID NO: 1590 - DNA, 147 bp, Homo sapiens
  misc_feature (1)..(147): n=a,t,g or c
ttgacaattttaaattataatttttattcctcagtcaccactgctaatccttcaatttatttcaaagtaacttctggtttttattacatttggaagataaagcaacttatcacatgtaggttacaacttaaaattcgtgnattgang

SEQ ID NO: 1591 - DNA, 307 bp, Homo sapiens
  misc_feature (1)..(307): n=a,t,g or c
gatttttatattttattatgtgtttccttttactgaagatctttgtatcttcataaggctttgaataagagagtttggtaaggtttatgggtacagatcaatataataataacggttaacaattttttttttttgagatagggtctctctctgtagcccaggttggagcgcagtggcgatactacaagcccactgcagccttggtctcccgggttcaagtgattctcccacctcagcctccccgagtcatgggnaaaaaaagggccctngccaaaaggcctgggaaaaatttttgggnaatcctttt

SEQ ID NO: 1592 - DNA, 403 bp, Homo sapiens
  misc_feature (1)..(403): n=a,t,g or c
gcaagtttaatgtctctgctgtacataganttaagaccctttccccctcctcatccttatgctggcaataggatatgcactagaaaatttgactcttagagtcaatgantaaaaggatgggctcatacaccttcatagctcttttcaaaaaggatgcttataatttaaaggatgtcctaatgggaaggaaaggtacagggcaagaggctgtttcacattttagtccattagtctttgggcagagccaaccaaggccaanttcacctagggatgcccaatggctgtgggggatctccacaggggtcaaggtaaggcaaaccccaattggaacatgtttgggatttaaaaaaaaaacaagttccttggaaactctttgnaggggngggctttcaccctggnaaag

SEQ ID NO: 1593 - DNA, 430 bp, Homo sapiens
  misc_feature (1)..(430): n=a,t,g or c
ctctgtctgaaatgggacatgaaaggagtaagaggatgggggtgaagggaagggaaggggataaggaaaggctaggtggccacatctctctgctgtgacctcgccatctggaaaatnttctgaaaggaaaaaaaaaaagagttattgggaaggcacatctcctcttatctggagacaactccacaaacagaagctaaaaaggtatgcctgggatgactcaatctgattggccacatctttcttgatataacttctcatctagantcatagccttttagagccggaagggacccttgggatattaattacgtgggttcagtccttccctgttttcacagaagaggaaaacttnaaagcttaggggaggcctgattttacccccnaaatttaccaccagngggggaaaaaaangcccnggggggnaaccccc

SEQ ID NO: 1594 - DNA, 390 bp, Homo sapiens; identical to SEQ ID NO: 1378

SEQ ID NO: 1595 - DNA, 144 bp, Homo sapiens
gcatgtgcaaaacaccagacacatacagaaacaattaggattctatgagggcagagaatttgtttctctaaatggggctgttcaatgtttcacagagcacaaggacaagaaattcaatatttttgagcagaaggaagaactcat

SEQ ID NO: 1596 - DNA, 315 bp, Homo sapiens
  misc_feature (1)..(315): n=a,t,g or c
gcttctaaatataaattttgctatttagccatcagctaaatgatctaaatgcaaaccccaaagtttccagttaaaagtataaaanctgcttctaaccacagcagcatactgcttcaagtattctcctcctatgtaaggtcgagataattttgtcacatatgaattttaggtggacatctcatttcctcacatattagacatcctgctggggtcacagcttctttgttccatttgtctttttttgttgttttttaataagacattgcaaacagtagctatttcttaaagtgacataattttcgcttttgcattctg

SEQ ID NO: 1597 - DNA, 484 bp, Homo sapiens; identical to SEQ ID NO: 839

SEQ ID NO: 1598 - DNA, 287 bp, Homo sapiens; identical to SEQ ID NO: 1380

SEQ ID NO: 1599 - DNA, 428 bp, Homo sapiens
  misc_feature (1)..(428): n=a,t,g or c
tattttttgagacggancttggctctgtcgcccaggctggagtgcagtggcagagtcttggctcactgcaagctccacctcccaggttcacgccattctcctgcctcagcctcccaagtagctaggactacaggtacccgccaccacccccggctaatttttttttgtatttttagtagagatggggtttcaccatgttagccaggatggtctcgatcttctgaccttgggatctggccacctcagcctcccaaaatgctgggattacaggtgtgagccaccacacccatcctcgcccagttattaataccttccctcttcaagtcctaaccttgcaggctaattcctccctggaagaagaggattccaatgctcctgagcataaaaaattcaggtccttgaatgacgtggacccattctccagctct

SEQ ID NO: 1600 - DNA, 496 bp, Homo sapiens
  misc_feature (1)..(496): n=a,t,g or c
tttttttgagctttcagagtggttttatcattaaattaatatctaatcacataattcaaagatataaaaattggaatgtagaaggtggggcaagcccctccctcaggactggaggcggcacagggacagagccgcactgaagcgggtgagcgtgcgagaaacatacagccgagcagntgccccgaacactcagtccagggtggaagcatcgccccggcaccccccaacccccgagcccactgcgcacccacaggaagagtgcaggcttttcacatttcagagggtggggtggggtggggtggggcggggtgggcccctggcttttggggctgccctccagcagccctggaaggacacaggcggtgatggtgggagaaaggccccctctcccaggggaggcctccttgtcctgagcttgggctnaggtctctgttccagtaacagatgctggtttttgttttgtttttttttttaagacaaggtntcgcctcgtgcc

SEQ ID NO: 1601 - DNA, 492 bp, Homo sapiens
  misc_feature (1)..(492): n=a,t,g or c
aagaaagaaaataggaaaaggtgtcaagcatagaggaacactcaaaagagacaaaacattgacctcagcaggccaagaactgttgaaaaataataagatgagacaatcctggggctgtgtgggcagtcgtgttccctgaggccacatttggaacagtgcatctttatgccagaaatttgagcccgagattactacattgtgatcttatgatcaaacctaacaagacaaagacacagccaagtggtactgcttttaatatctcagagttagctgtagggatccaattattttcagtttggatacatttcccctttatcaatatctccatgtgcataaataagatgaaagtggagttccagaatcaaaaagagatgggaactcacatcactggggcagacttgttccatctggaagtgtacgggccagtctctcccacgtggatttcctgatgtctggccccaaatcttcctatcgaaggcgacatcctttttn

SEQ ID NO: 1602 - DNA, 489 bp, Homo sapiens
ttttctgtgtgttaaaataatgtaattctccctgtacatttctgtccacatgagccaataaacatcaagaatacacactttacagtatttacctgttttaagacattcaagtcaattcagatggcaaaagtagaattcaatcactagtgaaatgttttaaaaatatatattaaaccaaaaaagtgtttttacaagataaaaaataatcttccacaatgtaattaattgcagatcactgaaattttaactctttagatgatttcagttcagttttttggtttcaaaatctagagacagtcaaacaaaagcacaggcagaatctctatctgtttttacgtttctctttcttgctttgactacttgttgcgctgtttaaagacgatgatgaaggtgctcttgcatgacctgtggcctttagatgggtcaaaaagtttattccgagatggaaattcactatgggcaggttgtacagctggataagaacactca

SEQ ID NO: 1603 - DNA, 459 bp, Homo sapiens
catttttctttttagagacagctctgaacacagaatgatttcataatcagggacatttttgagacaggagacttcatggttccaggctttgagtgaggtggagaactcctaaaggacccacccaggagatgacactgcctgaacagataactgtccctgtcgcctcccactccactctacagcgacaccccttccacagcagtcagctgttttccaggtacaagagacacctcaccaccctggccagtttacagaccagctttcgagcccagaaatttccctgtaggaaatttgtaaggaccactggctcatggggaggaaataaatcaataaaaggaaaaaaaaatgaataatactgtttttttaaagagagaatgcaatcatccttttcttaagaagacagaaagccaaggcattatatttaaataaaaatttaaataattgaatgattttaaaaga

SEQ ID NO: 1604 - DNA, 401 bp, Homo sapiens; identical to SEQ ID NO: 1167

SEQ ID NO: 1605 - DNA, 431 bp, Homo sapiens
tttttttttttttttttttttttttttttttgctggagttagtttattaaagatgcctacggtgaactctctggcgcaggttaaatgcagttttgaaaacctggaaacatcaaatggaggcgggaaataggctggggcgacgttgaggggctgaacacagcagtgaccgtgggtcagcaggtcgcctgcccagcagctcctccaggagagggctcgggcgcccctggcagccgccatacccccaggacctggctcgtgagtgcgtctgggtcaggaagagacctctctgtgcgtctcaggctgagatgcagatttctgttttctaaaactggaagcgaccttgacgtgtattgaaggtgtgtgtgccaaatgcttccgacggaggtgctggccttggttggtttctctctgccccgtgtggtcatcaagtc

SEQ ID NO: 1606 - DNA, 188 bp, Homo sapiens
gcaataaataaaacttttattcaaacaagtaactgcagtacagggcacaattcagattttttaaaaaaaaggaaaggaaacaggaaaaaaatatgttcagcactttacatcttcatacaagtgttgctgttttgtgtctacattcatccattgagcatggaatcccctggatttgaaatctttagcgg

SEQ ID NO: 1607 - DNA, 346 bp, Homo sapiens
taacagtaggaaaaaccacactattaaagtataaaattttgtcaaggctctattttctaagcctatataaaggccaggtagtaaatattttgagctttgcggcccatgtgatctctactacgagtactcaaccctgctccagtaatatgaaagtagtcacagacaactggaaatgaatggatatggctgtatttcaataaaatattacttacaaaaatagcaggaccaacacttgctgacccctcactttcataggttttataaccttattaacttttaaaaggtagttctacaacctctcaaatgagaatgaaaatgaagacaaagctactttagtgttttaaag

SEQ ID NO: 1608 - DNA, 384 bp, Homo sapiens; identical to SEQ ID NO: 1171

SEQ ID NO: 1609 - DNA, 183 bp, Homo sapiens
ttttattaaagcaatgacttattagagactactggtatatgaagctgcaatacacatggggatcaattcctccaatttcatgtttccttactatgtatgtatctctttttgttttttcattctggtaaccagagtacatatgacaggctgcattatttcaaatacctaacactgaaagttact

SEQ ID NO: 1610 - DNA, 329 bp, Homo sapiens
tttttttttgcaacaggatccggtttattctgccttgggggtgggtcctgagagtggtgggtgccacctgttccggggcggaaagagggcccgaggaggttaaggcaatgggggagaagcagggggctgagcggcacatgcggtgaaccaggccgaggccggaggagctgtggtaggccagggagggtggaaggcaccggactgggaccggccagggctacagggcgaggaccaggcacacgggcaccccggaggcgggcacagggtcacgtgacacagaacatgaaacacaggcacagggtcataggccagatgcacatccagccatg

SEQ ID NO: 1611 - DNA, 442 bp, Homo sapiens
tttttttttttttttttttttttttttttttaaattgaaaggaaacttttattgagtcatgttttcaaagcaatctagtttttaaaaaagttgaagacaagacagaaaaaagaacatgacacctaagagaatcagacaggacagacagacgggagcaggggggcggggacagcggctccgtggaggtcagatcttctccatcttggagatgaggtcgtcgcagatcctggtcagctcctcgttctctttagtcttctgctccactgtcttctccagcgactggatgcgcatctgctccttcctcaggctggcctggagggcaacgcttccgcctgggccttgctccggacctgggcgatctcctcgtttgccagctgcagcttctcctccgcgtgggccttcagggcttggtacctctggccctcctgggtgatccttgcca

SEQ ID NO: 1612 - DNA, 526 bp, Homo sapiens
tttaagttgaaaactttcaccttttcatttaaaaggaagcactttgtggcttctctttggcatatccgaatcaccagcatcactactcctgctctctggggccactgttaagcaaagtgaggactgcttgggcacaggcactgtgatgctgggatagttgatctgatcaccaagacggctactaagtcactagcagggtgggtggcgtatacagcgtggatgtgctggaccaagggatgactcacatccccggccggctggagccgacagcgagagatttcatcacgctactcagaagggcacaccatttgagacttaaaattctttatttctggaattttccatttaatatttttgaactgcagttgactgcaggtaacaaactgtggaaagcgaaaccatagatacgagcgggctactgcgttcaaaaggctcttcaactgttgtggatcctctgatgttctcggagatggtttaggtggttacatgccttcccgcactccttacattcgtaggatttcggccc

SEQ ID NO: 1613 - DNA, 375 bp, Homo sapiens
ttttttttttttttttttttttttttttttttttttccacagagtgaagtttattcccaacaaagttcccctcccccctccccagcccgggacagggacggacaggctgggctgaagatggggttccagtggctgaggggcctctgagaaacaaggaagggccctgggaccccaggccaagccatgtccggctcccccagcctggctgagtccacggcgcctccctgcccagccctcgggaaaggggagagggcgctggctcctgggtagttccaaagtggagtgtgaaaatagagagatatatatatttatatgcagtgggcagtccagcgtggcactcacacctctgtctggaagtcaccatccggtggttct

SEQ ID NO: 1614 - DNA, 355 bp, Homo sapiens
agaacaaaatggttttaatcaattgcgtcaccctcactctcctgggagcggcaacgaaaaaggctcggctcctgcccccagaggacagtaaggcttatgtgtctctccacactgcagggcccaggctggcgaggcagggggtgggaagcaggacagggggcagggagggagggtgggaggcagggaggaaatggcaggtggctggaacacaagaaagcaaaggggacccagctggtccttgggccccagggcacgcccctaatactcctgctctcccttcaccctggctagagaaaggtcacggagaagagacaggggagcaggtcccagcagcaggagaagcagcagcagctgt

SEQ ID NO: 1615 - DNA, 225 bp, Homo sapiens; identical to SEQ ID NO: 1388

SEQ ID NO: 1616 - DNA, 266 bp, Homo sapiens
gaatgtcattttattccaatgataagatacagattacaaaacttctagtataattacacataattaccttttgttgttttcctacaagaaatgcacaggtattttgaggtcttttgtattgcattattggtaaaacattgcatagtattagtttgtggctctgttacaatgggtaatgacaggaatgcatacagatgtctctgctatgataaaatgtgctcttgttgggttacattaaccttccttcaaaagggatttctcagttg

SEQ ID NO: 1617 - DNA, 332 bp, Homo sapiens
ttttaatcagaaatatctgcgcacattgacaaatgtccaccggatgggaagaagaatgtggggtgtaaaattcccatttttgagacccacttgcttagaatgtattaaagacctataattgaaaataccttggcaaaatctcccaaaattgtctctcaaaataacagtatatacagtgtaacatacacaacatcctgttatactaatgaaaaaatctaagaaaaactctataggatgatatttagatattacagtcactatattaactattaggataatgtgccactaattcccaatcgtcactgctttcatgtagtgcttgctccatattg

SEQ ID NO: 1618 - DNA, 433 bp, Homo sapiens
ttttaatatctgctactgactttggctttctgaagtttgctatctggcttaccagtagaaacccttagtcaattttggaattgtacaatttcaattgtacaattcttcgttacactctcaaatccacaagtcatttgtgctgaagtagaattggaaaaatgagaagcatatttctgcatctgagttctgctctacctgcaactccctacatgacctaagtaaccaattttctcatctatgaaacaagacaaacctgctgcaagggctttctgttacccctatgggagtggtgggtaatgctgacgccctatctgacactctcatcactgaaggtgtgtcatctgcatccttctccagccttctctagcttggcccattcagatgtcaatctggtacaagatctggctcttctagttttcttaagaattgatgc

SEQ ID NO: 1619 - DNA, 258 bp, Homo sapiens
  misc_feature (1)..(258): n=a,t,g or c
gatcctgggctcataggcagtccctttcacttccttgtcttgctccctgctatgctggagatgaatgtgactaaaagggccatcttgctggcttaatgtgtggctggagagaccagcctggagacaatgtggcaaaatggggcgcttcatccagtctgtctaagccctgtcgacttggggaggtgatttctttcctggttctatatgtnaagcaaaataaatgttttaaaattaaaagcannaaagcagaatgtgagt

SEQ ID NO: 1620 - DNA, 322 bp, Homo sapiens
  misc_feature (1)..(322): n=a,t,g or c
aattnnaaanacatggctgcatttattgttcccagcccggcgagaaggttttcccagaaaggttccttgggtcacctgcccacccagccttggtctgggctgccatgtccccacgggcaggagagaggcacaagtcacagtcaggcaagggagcctcagcttcctgggcggtggctnttggggtccctccagtnttcacctgggaccctcggccaggttgggacanattccagggaggcgaggttgcatggtccagcggtgggtgcaggtggcaacaggttcggcgggttttgcaggttccaaaaggagntttcgggttggg

SEQ ID NO: 1621 - DNA, 503 bp, Homo sapiens
  misc_feature (1)..(503): n=a,t,g or c
ttttttttttttggtatcagtctctttattggatgtgagggccaaaagggactgtaactcctgtctcaggaatggggatagatgggaggttcttgaagccccaggcatantggnnacctctggctacagcttgctctctgagacctggggcttcactcggatcacgccctcctggnancaggtcacagctaggactccatcctgacgccacagccgcccatggaccagcccccgagagccaccggcccaggggctctcgcattcatagagcatccagtggtcagctcggaagggggcgtggaaccacatggaaatggtccagtgagaccatgaagtgcaccttgtctgnccactggtgaggcagcagtgcagtgcccaagaaggcatagttcggagatataggcggccacgagncagttgcatttttcatgttcgncttcgnttgcaacaggtccccttcagcctgggttcctggggtttncagttcaggaccattttagccn

SEQ ID NO: 1622 - DNA, 419 bp, Homo sapiens; identical to SEQ ID NO: 1399
  misc_feature (1)..(419): n=a,t,g or c

SEQ ID NO: 1623 - DNA, 420 bp, Homo sapiens
acaaaataacacaatttattactattttgaaacaaatcacaaaataacattcagaaactcaacatttctaaataacttaattcacaataagtttagtcataaagtcatgctacaaaactcctgtgtataaaagattattaccaaggtattcatagatgttaaaatgttcttcagaatggagttggttctagaagccaaagattctggaatgatgcttgtaatcatgactgccagcctgggagaggagctggctatgcgcatgtgctcttagcttccaactcaccagtcttttgatgggagtgatccctccaggcagtagcacctcagaggcaggtaccctactgattcacagaggcaaagagcctcccacccatataatgttagacaactctacattcatttaaaatctagaggtgggaa

SEQ ID NO: 1624 - DNA, 560 bp, Homo sapiens
  misc_feature (1)..(560): n=a,t,g or c
agtttcaatttttattatgaatgtccaaagtgacagcatactgtgaaaatgctaagttctcattgattaaatttcaagagaccacagactacagcattccaagcactttaatttttgacagagccaaaaacaaataaaagaatgataaaaatattcttttgggtgtaaagagtattcatatttgagtttttgtatttttttcttccctgcaggtattgtgaacactgataatttccaaaacataaattctggtctggatacttgcagcaaatttttataatctctacctggataagaagctaataagaaatgtacttataaagtatgtttaccgatacagtgtgatatgtttgtttatcttcatttcccctatctatcccatgaggcttcttgtctaccacccgggtacctggctggttgggtaataacaggacagggaggctgaagtgaaacactccgaagactggtacagaatccngggattttccggaaagcnggcatttacnccctttttttttaatggaaagccttaagaccttcagtggnttggggaacggtcc

SEQ ID NO: 1625 - DNA, 435 bp, Homo sapiens
  misc_feature (1)..(435): n=a,t,g or c
ttttacatgagatattcaacattttattataaaacaggctttctgttagatgattttgctcaactttaggtgttctgagcatgtttaaggtaggctaggctaagccatgatgtttagtaggttaggggtattaagtgcattttcaaattaccatattttcaacttacaatagtttcaacgggaggtaaccccatcgtaagtggaggaacatctagtgcctggcacacgagccggttctcaataaatataactcttctccatcttcttcaaacctcaggccaggtttcagtgacctcctctcactttctaagattatttttgcttgctggtgggtttactgtcatttttaaccacatctaacctaccttaaaaaagtgtatggatgggggtgccaggtacaaagacttagcataangaaaacgaccatttactttg

SEQ ID NO: 1626 - DNA, 374 bp, Homo sapiens
catgctggagtgcagtggtgtgatctcggctcactgcaacctctaactcctgggctcaagtgatctttccaaccacagcctctcaaagtagttggaaccatagacatgcaacaccatgattggctaatttttttgtagacacggtagtttttgtagacacagggtttcaccatgttgcccaggctggtctcaaactcctgggacttaagcagatccattcgccttggactcccaaagtgccgggactacaggtgtgagctaccacgcccagacgcattttctaaattcttgtgtatctataataattcaacttaattaaaactgttttgcactatggatacacaaaagggagggcccaacaggtggatttccct

SEQ ID NO: 1627 - DNA, 337 bp, Homo sapiens
  misc_feature (1)..(337): n=a,t,g or c
tacanaaatatcctggcaggatctgaaactgtttctccaaatgtctaaaatatatctgtcacacaaaatgacccccaaagagaatcctgggaagaaaacaatttctcctcctccatcatccaattaagtatttattaaacagtcactatacttaaaatacctttccagggtaccacctactaaggttaacagactactgttcaaacaccgcaaaggaaaggcatggaactaggataggaaacaaggaaaaaccttcaatttttttttgttggcctttttgtttgtttttacatgagggaaaagggaaaccaaactgaggggggnaaaaaaataaggg

SEQ ID NO: 1628 - DNA, 417 bp, Homo sapiens
  misc_feature (1)..(417): n=a,t,g or c
ccatctcagtctcccctgcctgctcattcctggggctccaggccaatgctcagcagcagagagtttataaataaataaattacaaaagcgggcagggagtggcctggccagccctcccgggnntantggctcagtgctcagtgagtgacagctgcaggatccgctgtaagtcctcctcctcctgctgcccgcgccgntcccgctcctcctgctcccgtgaaggacaactccaggggccagggcgcagtggcttctttcaaagctggggtgggaccggtgggctggggggtgtcctnggggagggggatcctnggggcccctggggatccttgtggggacaagcttncaggctttttctggggnaagggccccntttccagcttnaaagctnttttcctcaataaaccgtgggccttt

SEQ ID NO: 1629 - DNA, 295 bp, Homo sapiens; identical to SEQ ID NO: 1185
  misc_feature (1)..(295): n=a,t,g or c

SEQ ID NO: 1630 - DNA, 299 bp, Homo sapiens
tttaccagttctcgattttatttaggactcaaattaacaccaaccaaacatatcactaactcacttattttcacattttcaaagttggattgtgctgcaaatccatacatttgtgctcactacacatttggggtattacattcattgagaggctccaaagcatcagtccaataaacatttttccagcccgataaccatccttggtaagaactaagaggtaaaatcattcacacaactattttttcccttctatccttagctcataagcatttgaccaaatgccaatgtttttgccagtt

SEQ ID NO: 1631 - DNA, 404 bp, Homo sapiens; identical to SEQ ID NO: 1188

SEQ ID NO: 1632 - DNA, 346 bp, Homo sapiens
  misc_feature (1)..(346): n=a,t,g or c
gggagaaataaccagctattgttccgcattcaaacagaaattcaggtgcttgcatctttcacgtattgttcaaaaatcacaagcatctgtggaaaaaaactaaggtattacagacactacacggaggtcatgttcttacattcaagacactaaatacaaaccgangcantgcaaaattgtatactttaattttaaaacccantttttgttctcaacttgaaaagggnaacacttttttgtttcacaaacaagctgggtcgggttggganttctttttgggaacagtaggtcccgcgctaaacactgggttcttgcctccccacccccnttctctaaaatnaaccca

SEQ ID NO: 1633 - DNA, 551 bp, Homo sapiens
  misc_feature (1)..(551): n=a,t,g or c
tggggcccaatggcgatgttaataaatacataaaattttaaagatctggatttccaaggcacaagagtttaacacaggccaggctggttctcacaggaatgactccacgtgtgccccagcatcccagggaggggagggcaacagggggagggcggggagccccanggacctccactctccaaaggggttgcaggccagggccnactactcatgttcctccaggctggctcagaacagcccctttgccttggggaaggaagaagtgagaagcacctctatcacctggcaggagtttaggagacatcctccaagaccccggaggtgtcctgggaccccctgccacttcctgagagccagaggatcttaagactnttacctgtccctttggaggtagcatggccggcagctgagcacagctcaggccctttacagcaccgtggggtgaagtgtgtcttccccactccagcaccaagccaagggnttggcaccctgccctggggnaatttggcctnggtggcccttgtcatttccaaggccaagctatgaatgga

SEQ ID NO: 1634 - DNA, 1201 bp, Homo sapiens; identical to SEQ ID NO: 409

SEQ ID NO: 1635 - DNA, 3323 bp, Homo sapiens; identical to SEQ ID NO: 1190

SEQ ID NO: 1636 - DNA, 4792 bp, Homo sapiens; identical to SEQ ID NO: 993

SEQ ID NO: 1637 - DNA, 2261 bp, Homo sapiens; identical to SEQ ID NO: 1208

SEQ ID NO: 1638 - DNA, 634 bp, Homo sapiens; identical to SEQ ID NO: 1211

SEQ ID NO: 1639 - DNA, 2533 bp, Homo sapiens
ggagctcaagctcctctacaaagaggtggacagagaagacagcagagaccatgggacccccctcagcccctccctgcagattgcatgtcccctggaaggaggtcctgctcacagcctcacttctaaccttctggaacccacccaccactgccaagctcactattgaatccacgccattcaatgtcgcagaggggaaggaggttcttctactcgcccacaacctgccccagaatcgtattggttacagctggtacaaaggcgaaagagtggatggcaacagtctaattgtaggatatgtaataggaactcaacaagctaccccagggcccgcatacagtggtcgagagacaatataccccaatgcatccctgctgatccagaacgtcacccagaatgacacaggattctataccctacaagtcataaagtcagatcttgtgaatgaagaagcaaccggacagttccatgtatacccggagctgcccaagccctccatctccagcaacaactccaaccccgtggaggacaaggatgctgtggccttcacctgtgaacctgaggttcagaacacaacctacctgtggtgggtaaatggtcagagcctcccggtcagtcccaggctgcagctgtccaatggcaacatgaccctcactctactcagcgtcaaaaggaacgatgcaggatcctatgaatgtgaaatacagaacccagcgagtgccaaccgcagtgacccagtcaccctgaatgtcctctatggcccagatgtccccaccatttccccctcaaaggccaattaccgtccaggggaaaatctgaacctctcctgccacgcagcctctaacccacctgcacagtactcttggtttatcaatgggacgttccagcaatccacacaagagctctttatccccaacatcactgtgaataatagcggatcctatatgtgccaagcccataactcagccactggcctcaataggaccacagtcacgatgatcacagtctctggaagtgctcctgtcctctcagctgtggccaccgtcggcatcacgattggagtgctggccagggtggctctgatatagcagccctggtgtattttcgatatttcaggaagactggcagattggaccagaccctgaattcttctagctcctccaatcccattttatcccatggaaccactaaaaacaaggtctgctctgctcctgaagccctatatgctggagatggacaactcaatgaaaatttaaagggaaaaccctcaggcctgaggtgtgtgccactcagagacttcacctaactagagacagtcaaactgcaaaccatggtgagaaattgacgacttcacactatggacagcttttcccaagatgtcaaaacaagactcctcatcatgataaggctcttacccccttttaatttgtccttgcttatgcctgcctctttcgcttggcaggatgatgctgtcattagtatttcacaagaagtagcttcagagggtaacttaacagagtgtcagatctatcttgtcaatcccaacgttttacataaaataagagatcctttagtgcacccagtgactgacattagcagcatctttaacacagccgtgtgttcaaatgtacagtggtccttttcagagttggacttctagactcacctgttctcactccctgttttaattcaacccagccatgcaatgccaaataatagaattgctccctaccagctgaacagggaggagtctgtgcagtttctgacacttgttgttgaacatggctaaatacaatgggtatcgctgagactaagttgtagaaattaacaaatgtgctgcttggttaaaatggctacactcatctgactcattctttattctattttagttggtttgtatcttgcctaaggtgcgtagtccaactcttggtattaccctcctaatagtcatactagtagtcatactccctggtgtagtgtattctctaaaagctttaaatgtctgcatgcagccagccatcaaatagtgaatggtctctctttggctggaattacaaaactcagagaaatgtgtcatcaggagaacatcataacccatgaaggataaaagccccaaatggtggtaactgataatagcactaatgctttaagatttggtcacactctcacctaggtgagcgcattgagccagtggtgctaaatgctacatactccaactgaaatgttaaggaagaagatagatccaattaaaaaaaattaaaaccaatttaaaaaaaaaaaagaacacaggagattccagtctacttgagttagcataatacagaagtcccctctactttaacttttacaaaaaagtaacctgaactaatctgatgttaaccaatgtatttatttctgtggttctgtttccttgttccaatttgacaaaacccactgttcttgtattgtattgcccagggggagctatcactgtacttgtagagtggtgctgctttaattcataaatcacaaataaaagccaattagctctataact

SEQ ID NO: 1640 - DNA, 2427 bp, Homo sapiens
ggggcggccggcaaggggcgcgccgcagcggggccagaccccggaggccggcgcggacaagcgagccacggcgggcctctgcggcggcggcggcgggcggcggcgccaccgggcatccgggcggcgggcagggcgcggagaacctgccggcttgaagagccagggccaacgagctgttccgaagcgggcagttgcccgaggcggccggcagtactcggcggcaatcgcgctcctggagcccgcaggaagtgaaattgcagatgatctaagtattatattcaatagagcagcatgttacctaaaagaaggaaactgcagtggctgcattcaagattgtaacagggctctggaacttcatccattctctatgaaacctcttctgaggcgggcgatggcctatgaaactctagagcagtatgggaaagcttatgtggattataaaacagtgttgcagatagactgtggactccagctagcaaatgacagtgttaacaggctatcaagaattttaatggagctggatggaccaaattggcgggagaagctgtcacttattcctgctgtgcctgcttctgtgccactgcaagcttggcatccggcaaaagagatgatctcaaaacaagcaggagactccagcagccatcgccagcagggcatcacagatgaaaaaacatttaaagcccttaaggaagaaggaaatcaatgtgtaaatgacaaaaactataaagacgccctcagtaaatacagcgaatgcttaaagattaacaataaggaatgtgccatatatacaaacagagctctctgttacttgaagctgtgccagtttgaagaagcaaagcaggactgtgatcaggcacttcagctagctgatgggaacgtgaaagccttctatagacgagctctggctcataaaggactcaagaattatcagaaaagcttaattgatctcaataaagttatcctactagatccaagtattattgaggcaaagatggaactggaagaggtaactagactccttaatcttaaggataagacagcaccattcaacaaagaaaaggagagaaggaaaattgagattcaagaggtgaatgaaggcaaggaggagcctggaagacctgcaggggaggtctccacgggatgccttgcttctgagaagggaggcaaaagcagcaggtcaccagaagaccctgagaaacttccgatagccaagcctaataatgcctatgaatttggtcagattataaatgctctcagtaccaggaaggataaagaagcctgtgcacatcttttagccatcactgcaccaaaagatttgccgatgtttttaagtaacaaacttgaaggggatacattccttctcctcattcagtctctgaaaaataatcttattgaaaaagatccctcattggtgtatcagcatcttttatacctgagtaaagcagaaaggtttaagatgatgttgacactaattagcaagggccaaaaggagctaattgaacagctgtttgaggacctttcagacacaccaaacaaccattttactttagaagatatacaggccctaaaaaggcagtatgagctttaaatcaagataattgttagatttcttccatgcatgtatgtgttccaggaatgttaatgagatggtattgtaaaagagttgcatggataaaacttggcctagaaaagtttggtctgcactataaaacattttacttattttcctacatagaacatgtatattctacaatctgctttttattagttgtaaatattttcttatgtaccagaaccaaataagtatatttagaacttgttaaaaatacattttaatttatgatatacatattattttaattacttgttaaaattttgagttaagttgcatttctttgggctatgaaggagtcctcttaagtttgatagaaatgaatttcttgtaacattcttttttaaaagtggaagtcattaacagtgattattatatcacttatatcctgctaagatacacataaatcccattttgtactagtacctgtggattacagtcagttaaaatgaaatgcaacactgaagtctataacatgaaatgattattaaattgtttattaatttagagctataagaggaacttattttttctaatacggaagcattgcctaataattaagaacaaaaattgccaaaaatttctaccactttttactagattttaaaaagctactttcttttatattgcctatataagcaaaaaaccaaccactgtattaaagcaaactaagcctgcatttatatctgaattattacctccatattttaccaaacatttgaatgtcccccttcccccttttttgttttctgcttttatgactgtatttattcctttactgtaaaagaatatgaagaactcaaaaaaaaaaaaaa

SEQ ID NO: 1641 - DNA, 3090 bp, Homo sapiens
gaattcaggggacccatgggaaaatttccaaaacaaccaggctctcacctactgggaatgtgtctatttactcatggtcacaatgtccaccgttggttatggggatgtttatgcaaaaaccacacttgggcgcctcttcatggtcttcttcatcctcgggggactggccatgtttgccagctacgtccctgaaatcatagagttaataggaaaccgcaagaaatacgggggctcctatagtgcggttagtggaagaaagcacattgtggtctgcggacacatcactctggagagtgtttccaacttcctgaaggactttctgcacaaggaccgggatgacgtcaatgtggagatcgtttttcttcacaacatctcccccaacctggagcttgaagctctgttcaaacgacattttactcaggtggaattttatcagggttccgtcctcaatccacatgatcttgcaagagtcaagatagagtcagcagatgcatgcctgatccttgccaacaagtactgcgctgacccggatgcggaggatgcctcgaatatcatgagagtaatctccataaagaactaccatccgaagataagaatcatcactcaaatgctgcagtatcacaacaaggcccatctgctaaacatcccgagctggaattggaaagaaggtgatgacgcaatctgcctcgcagagttgaagttgggcttcatagcccagagctgcctggctcaaggcctctccaccatgcttgccaacctcttctccatgaggtcattcataaagattgaggaagacacatggcagaaatactacttggaaggagtctcaaatgaaatgtacacagaatatctctccagtgccttcgtgggtctgtccttccctactgtttgtgagctgtgttttgtgaagctcaagctcctaatgatagccattgagtacaagtctgccaaccgagagagccgtatattaattaatcctggaaaccatcttaagatccaagaaggtactttaggatttttcatcgcaagtgatgccaaagaagttaaaagggcatttttttactgcaaggcctgtcatgatgacatcacagatcccaaaagaataaaaaaatgtggctgcaaacggctcaaggttgcagctagatcacgctattccaaagatccatttgagttcaagaaggagactcccaattctcggcttgtgaccgagccagttgaagatgagcagccgtcaacactatcaccaaaaaaaaagcaacggaatggaggcatgcggaactcacccaacacctcgcctaagctgatgaggcatgaccccttgttaattcctggcaatgatcagattgacaacatggactccaatgtgaagaagtacgactctactgggatgtttcactggtgtgcacccaaggagatagagaaagtcatcctgactcgaagtgaagctgccatgaccgtcctgagtggccatgtcgtggtctgcatctttggcgacgtcagctcagccctgatcggcctccggaacctggtgatgccgctccgtgccagcaactttcattaccatgagctcaagcacattgtgtttgtgggctctattgagtacctcaagcgggaatgggagacgcttcataacttccccaaagtgtccatattgcctggtacgccattaagtcgggctgatttaagggctgtcaacatcaacctctgtgacatgtgcgttatcctgtcagccaatcagaataatattgatgatacttcgctgcaggacaaggaatgcatcttggcgtcactcaacatcaaatctatgcagtttgatgacagcatcggagtcttgcaggctaattcccaagggttcacacctccaggaatggatagatcctctccagataacagcccagtgcacgggatgttacgtcaaccatccatcacaactggggtcaacatccccatcatcactgaactagtgaacgatactaatgttcagtttttggaccaagacgatgatgatgaccctgatacagaactgtacctcacgcagccctttgcctgtgggacagcatttgccgtcagtgtcctggactcactcatgagcgcgacgtacttcaatgacaatatcctcaccctgatacggaccctggtgaccggaggagccacgccggagctggaggctctgattgctgaggaaaacgcccttagaggtggctacagcaccccgcagacactggccaatagggaccgctgccgcgtggcccagttagctctgctcgatgggccatttgcggacttaggggatggtggttgttatggtgatctgttctgcaaagctctgaaaacatataatatgctttgttttggaatttaccggctgagagatgctcacctcagcacccccagtcagtgcacaaagaggtatgtcatcaccaacccgccctatgagtttgagctcgtgccgacggacctgatcttctgcttaatgcagtttgaccacaatgccggccagtcccgggccagcctgtcccattcctcccactcgtcgcagtcctccagcaagaagagctcctctgttcactccatcccatccacagcaaaccgacagaaccggcccaagtccagggagtcccgggacaaacagaagtacgtgcaggaagagcggctttgatatgtcttccttcacttcccccattgccaccccccaatcccagtacccccatcggtctgttcacatctctgtgttcatcttggcaagacctactcaatcaagtgatgatgccagttgataaacttccctggaaaacatttacagctattccatttggcaaacttgcttctctgtcaatatttcatcctcctttaaaccaggagggttattaatggcaaaagcattggtcttctttatgcttgatcagtatgactcaaattaaaagtgttctgctgtgtatatcaactcagtagcccacacccagttatctgggagctgatggttcagtcactgtattacccaaatctttcctgccagctgcctttcagacatttgttaaatcccaaccagagaccgggcagatagagagaagtaaatctgaagtgcgtttt

SEQ ID NO: 1642 - DNA, 1161 bp, Homo sapiens
ggggggcggtgccgttgggaccacggcggccagagcggcaggatggcttccggcttcaagaagcccagcgctgcctccaccggccaaaagagaaaggtggcacctaagcccgagctcactgaggatcagaagcaagaagttcgggaagcatttgacctcttcgacgtggacggaagtgggaccatcgacgcgaaggagctgaaggtggccatgagagcgctgggcttcgaacccaggaaggaagagatgaagaaaatgatctccgaggtggacagggaaggcacggggaagatcagcttcaatgacttcctggccgtgatgacgcagaagatgtccgagaaggacaccaaagaagaaatcctgaaggccttcaggctctttgatgacgatgagaccgggaagatctcgttcaaaaacctgaagcgtgtggccaacgagctgggggagaacctcacggatgaggagctgcaggagatgatcgacgaagctgatcgggatggggacggcgaagtgaacgaggaggagttccttcggatcatgaagaagaccagcctttactgaagtcggttcagaagctaaagtgactctctgggttgcctgcttccattttgtgaaaccttagaggacagcggctgcctgtcccttcttcaccccctcacccccataatttgtctagatctatttccatatctctagttcaataatagaatttgaaagatgcttgtaatgtgagttttgggttttaattctcaagagccaacctggagcacatgaggttaaacaaagggccctgaagtttgagtgcgccctccatttgccctgtgctgaacttgctgttcatctgttgatctggaggcaggacagcttctgggacacacaaaaatgtggttccctttgtcacttctttggtggtcttaaattatcttgcttcatatatcattccttaaattccagtcattgttccagcataatgagatggaatctgccagtagatttgcctagcctgtccacttagctgaataccagtttgaaggaaaacagggtggccacttacaaacttacggagctcaggacagatattcttataaagaatagacttgcttgggtggtagtacgttgtgcaattttgactattcactggctttatacctgcaaatgccc

SEQ ID NO: 1643 - DNA, 2040 bp, Homo sapiens
tgctctaaagcaaatgttatcactgagtcattgccatctgcagaatcagaacctgttgaaattgaggtagagattgccgaagccattgaagtggaagatgaaggcatcgaaacattagaggaagtggcttctgccaagcagtccgtaaagtacatacagagcacaggttcctctgatgattctgctctagcactgttggcagatattaccagcaagtaccgtcaaggtgacagaaaagggcagattaaagaagatggctgtccatctgaccccacgagcaaacaggtagaaggtattgaaattgtggaacttcagctgtcacatgtgaaggacttgttccattgtgagaaatgtaaccgttcatttaaattgttttaccattttaaggagcacatgaaatcacactccactgagagtttcaagtgtgaaatatgcaataaacgatatcttcgagagagcgcatggaaacagcacctaaattgttaccaccttgaagaaggtggagtcagtaagaagcaaagaactgggaaaaaaattcatgtatgtcagtactgtgagaaacagtttgaccattttggacattttaaagaacatcttcgaaaacatacaggtgaaaaaccttttgaatgtccaaattgtcatgaacgatttgctagaaatagcactctgaaatgtcacctcactgcatgccaaactggagtaggggcaaaaaaaggaaggaagaagctctacgaatgccaggtctgcaacagtgtgtttaacagctgggaccagttcaaagatcacttggtaatacacactggagataaacccaaccattgtactttatgtgatttgtggtttatgcaaggaaatgaattaaggaggcatctcagtgatgctcacaatatttcagagcgtctagtaacggaagaagttctttcagtagaaacacgtgtgcaaactgaacctgtaacatcaatgactattatagaacaagttgggaaggtgcatgtgctaccattgcttcaggttcaggtggattcagcacaagtgactgtggaacaagtccatccagatctgctccaggacagccaggtgcacgattcacacatgagtgagcttccagagcaggtccaagtgagttatctagaagtgggccgaattcagactgaagaaggtactgaagtacatgtagaggagctgcatgttgaacgggtcaatcaaatgccagtggaagtacaaactgaacttctagaagcagatttggaccacgtgaccccagaaatcatgaaccaagaggagagagagtctagccaagcagatgctgctgaggctgccagggaagatcacgaagatgctgaggatttagagaccaagccaacagtggattctgaagcagaaaaggcagagaatgaggacagaacagctctgccagttttagaatgaaattacacatgaatatatttttaaatttacttgttgggtttttgaactgattatgggcagtttgactgtccttaattaagcctaacagacaagtggaccaaagttaagctgtttcctgttgtgctgaactgttgtccgttgaaacacattgattcccctccccctacttattgccacagaggagggatcttttccataactgaaggggagttttgagaagtatatttctggaaacttaaatggattatattcttattatatagttgggtacgaatgtatctattttcattgtggtaaaagttcttccttttctctttcccaggtcatgttcttcctcaaattttttccatattgtaaaatcaaacttaaatcattagaatacaagtttatgtattctaatgcatgttagaaaattgaataatataggaaacacaaggctgcatgatgaaaagtgcattgttactgtgcagttaaattttggcttctggctttctttagtttgaacaaacgttcttgtctaccccagtagtcacagatgccatctttgcaacagaaagagtggtggtggcaaaatttctagaatgttctttagagcacactggggtaccggat

SEQ ID NO: 1644 - DNA, 2635 bp, Homo sapiens
gaattcggcacgaggggtgctattgtgaggcggttgtagaagagtttcgtgagtgctcgcagctcatacctgtggctgtgtatccgtggccacagctggttggcgtcgccttgaaatcccaggccgtgaggagttagcgagccctgctcacactcggcgctctggttttcggtgggtgtgccctgcacctgcctcttcccccattctcattaataaaggtatccatggagaacactgaaaactcagtggattcaaaatccattaaaaatttggaaccaaagatcatacatggaagcgaatcaatggactctggaatatccctggacaacagttataaaatggattatcctgagatgggtttatgtataataattaataataagaattttcataaaagcactggaatgacatctcggtctggtacagatgtcgatgcagcaaacctcagggaaacattcagaaacttgaaatatgaagtcaggaataaaaatgatcttacacgtgaagaaattgtggaattgatgcgtgatgtttctaaagaagatcacagcaaaaggagcagttttgtttgtgtgcttctgagccatggtgaagaaggaataatttttggaacaaatggacctgttgacctgaaaaaaataacaaactttttcagaggggatcgttgtagaagtctaactggaaaacccaaacttttcattattcaggcctgccgtggtacagaactggactgtggcattgagacagacagtggtgttgatgatgacatggcgtgtcataaaataccagtggatgccgacttcttgtatgcatactccacagcacctggttattattcttggcgaaattcaaaggatggctcctggttcatccagtcgctttgtgccatgctgaaacagtatgccgacaagcttgaatttatgcacattcttacccgggttaaccgaaaggtggcaacagaatttgagtccttttcctttgacgctacttttcatgcaaagaaacagattccatgtattgtttccatgctcacaaaagaactctatttttatcactaaagaaatggttggttggtggttttttttagtttgtatgccaagtgagaagatggtatatttggtactgtatttccctctcattttgacctactctcatgctgcagagggtactttaagacatactccttccatcaaatagaaccactatgaagctacctcaaacttccagtcaggtagttgcaattgaattaaattaggaataaataaaaatggatactggtgcagtcattatgagaggcaatgattgttaatttacagctttcatgattagcaagttacagtgatgctgtgctatgaattttcaagtaattgtgaaaaagttaaacattgaagtaatgaatttttatgatattccccccacttaagactgtgtattctagttttgtcaaactgtagaaatgatgatgtggaagaacttaggcatctgtgggcatggtcaaaggctcaaacctttattttagaattgatatacacggatgacttaactgcattttagaccatttatctgggattatggttttgtgatgtttgtcctgaacacttttgttgtaaaaaaataataataataatgtttaatattgagaaagaaactaatattttatgtgagagaaagtgtgagcaaactaacttgacttttaaggctaaaacttaacattcatagaggggtggagttttaactgtaaggtgctacaatgcccctggatctaccagcataaatatcttctgatttgtccctatgcatatcagttgagcttcatataccagcaatatatctgaagagctattatataaaaaccccaaactgttgattattagccaggtaatgtgaataaattctataggaacatatgaaaatacaacttaaataataaacagtggaatataaggaaagcaataaatgaatgggctgagctgcctgtaacttgagagtagatggtttgagcctgagcagagacatgactcagcctgttccatgaaggcagagccatggaccacgcaggaagggcctacagcccatttctccatacgcactggtatgtgtggatgatgctgccagggcgccatcgccaagtaagaaagtgaagcaaatcagaaacttgtgaagtggaaatgttctaaaggtggtgaggcaataaaaatcatagtactctttgtagcaaaattcttaagtatgttattttctgttgaagtttacaatcaaaggaaaatagtaatgttttatactgtttactgaaagaaaaagacctatgagcacataggactctagacggcatccagccggaggccagagctgagcactcagcccgggaggcaggctccaggcctcagcaggtgcggagccgtcactgcaccaagtctcactggctgtcagtatgacatttcacgggagatttcttgttgctcaaaaaatgagctcgcatttgtcaatgacagtttcttttttcttactagacctgtaacttttgtaaatacacacagcatgtaatggtatcttaaagtgtgtttctatgtgacaattttgtacaaatttgttattttccatttttatttcaaaatatacattcaaacttaaaatt

SEQ ID NO: 1645 - DNA, 1009 bp, Homo sapiens
tcagctcctccagcttccgccagcgaatgttggggaacctgcttcggcctccatatgaaaggccagagctccccacatgtctctatgtaattgggctgactggcatcagtggctctgggaagagctcaatagctcagcgactgaagggcctgggggcgtttgtcattgacagtgaccacctgggtcatcgggcctatgccccaggtggccctgcctaccagcctgtggtggaggcctttggaacagatattctccataaagatggcatcatcaacaggaaggtcctaggcagccgggtgtttgggaataagaagcagctgaagatactcacggacattatgtggccaattatcgcaaagctggcccgagaggagatggatcgggctgtggctgagggaaagcgtgtgtgtgtgattgatgccgctgtgttgcttgaagccggctggcagaacctggtccatgaggtgtggactgctgtcatcccagagactgaggctgtaagacgcattgtggagagggatggcctcagtgaagccgcggctcaaagccggctgcagagccagatgagcgggcagcagcttgtggaacagagccacgtggtgctcagcacttgtgggagccgcatatcacccaacgccaggtggagaaagcctgggccctcttgcagaagcgcattcccaagactcatcaggccctcgactgaaaggttctcagtggggccagactggctcctggagctgacaagcgaccccgtggtgaggagaaatgggggccttgatgctcaccctggttcaggcccagaggtccaagctatactgtgcaggacatggccaggcctggtggacacaggaagcctacccaacacgctggtatttggccaacactgaggatgtggttcatgggggagcagtcccctccccactcttgcccatgggtgactcttacccacagctgactagggccagcgcaaatactggaacctgtaacagaattaaaggtgaatgttctg

SEQ ID NO: 1646 - DNA, 1896 bp, Homo sapiens; identical to SEQ ID NO: 1436

SEQ ID NO: 1647 - DNA, 3172 bp, Homo sapiens; identical to SEQ ID NO: 1225

SEQ ID NO: 1648 - DNA, 2200 bp, Homo sapiens; identical to SEQ ID NO: 1227

SEQ ID NO: 1649 - DNA, 1033 bp, Homo sapiens
ccactaaagtgcaagaattacattgcactgtttctccactttttattttctcttaggcttttgtttctatttcaaacatactttcttggttttctaatggagtatatagtttagtcatttcacagactctggcctcctctcctgaaatccttttggatggggaaagggaaggtggggagggtccgacagtggcggtagagaggagactccggctggcgaccggggactggtggagtggggtgatagccaagccatgggagacaagaagagccccaccaggccgaagcggcacgcgaagccttcctcggatgagggttactgggactgtagcgtctgcaccttccggaacagcgccgaggccttcaagtgcatgatgtgcgatgtgcggaagggcacctccacccggaaacctcgacctgtctcccagttggttgcacagcaggttactcagcagtttgtgcctcctacacagtcaaagaaagagaaaaaagataaagtagaaaaagaaaaaagtgaaaaggaaacaactagcaaaaagaatagccataagaaaaccaggccaagattgaaaaatgtggatcggagtagtgctcagcatttggaagttactgttggagatctgacagtcattattacagactttaaggagaaaacaaagtcaccgcctgcatctagtgctgcctctgcagatcaacacagtcaaagcggctctagctctgataacacagagagaggaatgtccaggtcatcttcacccagaggagaagcctcatcattgaatggagaatctcattaaagtttattttctccaatttcttagtcacttctgtcctaccatgcaaatacacagattatgccaagaggtaccacattttcatgacagatacattcatgcacaatccataatttgagttttacataaaatagaaatttgttagaatttgttagattttattgcaatgatgcctaccaaacatttccagacttaacattttggtctctgcagttaagtgccatgaaaatgtggttgaat

SEQ ID NO: 1650 - DNA, 2738 bp, Homo sapiens; identical to SEQ ID NO: 1438

SEQ ID NO: 1651 - DNA, 1548 bp, Homo sapiens; identical to SEQ ID NO: 1439

SEQ ID NO: 1652 - DNA, 1952 bp, Homo sapiens
gtggaagagacctacttgcacattcttaacctgtatttgaacacaaaatatctatacttcatgctccagcccaagcctataccctgtaatagcatactattattgaaatcgcttgaccggtcttgttcacataggcctctgggagtgatttggttctttgccctaatgtttcatttgacggtctctttttgatcaaccaatttttctaaaagttcagtcgaaagcttttaagtatagcttcctcccttgaaaaaaaatgtaaactatgactgctgagtgataaaacactgtggtgtgaaagtgtcatcttcactgccaatcaggcaaagaccggaaagatttgcattttattatgtctgtcttatcatgcaatggaaatgatgctttttgtaagtatgcatcttaccaatgatgtaatggtttaatacctttgaatgttttaataaccaagttgctgctgaacttatactaaatcaggggaccaaaaaacttgctcttatcttctcaaattgtattctatatccattaatgtatcagttatcccaaagccttcaggtggaggggtttaccaccttcctaggtcgttcaaccaggttttgtgaggaatgcattcaaagtggctttataaaagaagattttctttagcaagaataatgaggtcatgtcatttgttaataagtatctgtgataaatccgtggttcaaggttaagccattctggtattctggtattagcaactgtaaattctgccacctcatacatggaacagagcttgtgggatgctaatagttagtgaagtatacatgatttaatttctaataatctttatgttttctttaaggatggtggtgtattgctctttttcagctttatttttaagagtacagtcaggaaaccaacaaggggcctaagagtggctgcccctgcttgggacattacagcaagtgaaacaaagttaatgtgacaagctttgctttgttatcattggtcttcactagaggataccttttacatgtacttctctcttggatcaaatatgtctttaactgtacatctcagtggctggaggccatgccttttaagcatgtgtaaaatttttaaagaaatgaacatacacatagttattttagtaatatttcctgaaagaaaaaccaaattctgctataagtcttgatcttcaatgaacttttaaataatgcatttagctggaaaacaagactttctcagcttgtattacctagaagcgtgaatgtataggatacctgactactaagactatattctcagccctgccctgtcttttatttgcgggtctaatctaatattagaatatattaaccgcttaaggcattgaagccatatgggatggggaatgcatttcttcagtgtttctccgagagactttccatttccttggagttatggcggcaagtaagtatcatagtattaagaaatttgcctaaatctgagttgtgcctttctttactcacaaggcatgggctttgtcctggtgatcagtttgtaagccttcttccttcccagctccttaataaaagcaaagtgattgagtaggtaatgttcaaagtgtctgcctgtgtacatgtacttgtattgattatgtagttcagtaagatgtgcccaagtcatttcagaaagaaagacccttcagttttgatgcattttgctgaacacttgggtagtgagtgggatcctatccagttgaggaatgcttgcaatgctcattgaagggatttgctttgggactttgtcatcttccagaaaggaaacatattgtatatttggcccagtgtgattgattgctttatctttggtaacttttacttgaatgggatttgctgaattaatgactattgaatttaaaactaattatgagttgacaaataaataaaaggtagtgtttatgtctgaaaaaaaaaaaaaaaaaaaaaaaa

SEQ ID NO: 1653 - DNA, 4739 bp, Homo sapiens
ggggagataggtaggagtagcgtggtaagggcgatgagtgtgggccgggcgggagtgcggcgagagccggctggctgagcttagcgtccgaggaggcggcggcggcggcggcggcagcggcggcggcggggctgtggggcggtgcggaagcgagaggcgaggagcgcgcgggccgtggccagagtctggcggcggcctggcggagcggagagcagcgcccgcgcctcgccgtgcggaggagccccgcacacaatagcggcgcgcgcagcccgcgcccttccccccggcgcgccccgccccgcgcgccgagcgccccgctccgcctcacctgccaccagggagtgggcgggcattgttcgccgccgccgccgccgcgcggggccatgggggccgcccggcgcccggggccgggcctggcgaggccgccgcgccgccgctgagacgggccccgcgcgcagcccggcggcgcaggtaaggccggccgcgccatggtggacccggtgggcttcgcggaggcgtggaaggcgcagttcccggactcagagcccccgcgcatggagctgcgctcagtgggcgacatcgagcaggagctggagcgctgcaaggcctccattcggcgcctggagcaggaggtgaaccaggagcgcttccgcatgatctacctgcagacgttgctggccaaggaaaagaagagctatgaccggcagcgatggggcttccggcgcgcggcgcaggcccccgacggcgcctccgagccccgagcgtccgcgtcgcgcccgcagccagcgcccgccgacggagccgacccgccgcccgccgaggagcccgaggcccggcccgacggcgagggttctccgggtaaggccaggcccgggaccgcccgcaggcccggggcagccgcgtcgggggaacgggacgaccggggaccccccgccagcgtggcggcgctcaggtccaacttcgagcggatccgcaagggccatggccagcccggggcggacgccgagaagcccttctacgtgaacgtcgagtttcaccacgagcgcggcctggtgaaggtcaacgacaaagaggtgtcggaccgcatcagctccctgggcagccaggccatgcagatggagcgcaaaaagtcccagcacggcgcgggctcgagcgtgggggatgcatccaggcccccttaccggggacgctcctcggagagcagctgcggcgtcgacggcgactacgaggacgccgagttgaacccccgcttcctgaaggacaacctgatcgacgccaatggcggtagcaggcccccttggccgcccctggagtaccagccctaccagagcatctacgtcgggggcatgatggaaggggagggcaagggcccgctcctgcgcagccagagcacctctgagcaggagaagcgccttacctggccccgcaggtcctactccccccggagttttgaggattgcggaggcggctataccccggactgcagctccaatgagaacctcacctccagcgaggaggacttctcctctggccagtccagccgcgtgtccccaagccccaccacctaccgcatgttccgggacaaaagccgctctccctcgcagaactcgcaacagtccttcgacagcagcagtccccccacgccgcagtgccataagcggcaccggcactgcccggttgtcgtgtccgaggccaccatcgtgggcgtccgcaagaccgggcagatctggcccaacgatggcgagggcgccttccatggagacgcagatggctcgttcggaacaccacctggatacggctgcgctgcagaccgggcagaggagcagcgccggcaccaagatgggctgccctacattgatgactcgccctcctcatcgccccacctcagcagcaagggcaggggcagccgggatgcgctggtctcgggagccctggagtccactaaagcgagtgagctggacttggaaaagggcttggagatgagaaaatgggtcctgtcgggaatcctggctagcgaggagacttacctgagccacctggaggcactgctgctgcccatgaagcctttgaaagccgctgccaccacctctcagccggtgctgacgagtcagcagatcgagaccatcttcttcaaagtgcctgagctctacgagatccacaaggagttctatgatgggctcttcccccgcgtgcagcagtggagccaccagcagcgggtgggcgacctcttccagaagctggccagccagctgggtgtgtaccgggccttcgtggacaactacggagttgccatggaaatggctgagaagtgctgtcaggccaatgctcagtttgcagaaatctccgagaacctgagagccagaagcaacaaagatgccaaggatccaacgaccaagaactctctggaaactctgctctacaagcctgtggaccgtgtgacgaggagcacgctggtcctccatgacttgctgaagcacactcctgccagccaccctgaccaccccttgctgcaggacgccctccgcatctcacagaacttcctgtccagcatcaatgaggagatcacaccccgacggcagtccatgacggtgaagaagggagagcaccggcagctgctgaaggacagcttcatggtggagctggtggagggggcccgcaagctgcgccacgtcttcctgttcaccgagctgcttctctgcaccaagctcaagaagcagagcggaggcaaaacgcagcagtatgactgcaaatggtacattccgctcacggatctcagcttccagatggtggatgaactggaggcagtgcccaacatccccctggtgcccgatgaggagctggacgctttgaagatcaagatctcccagatcaagagtgacatccagagagagaagagggcgaacaagggcagcaaggctacggagaggctgaagaagaagctgtcggagcaggagtcactgctgctgcttatgtctcccagcatggccttcagggtgcacagccgcaacggcaagagttacacgttcctgatctcctctgactatgagcgtgcagagtggagggagaacatccgggagcagcagaagaagtgtttcagaagcttctccctgacatccgtggagctgcagatgctgaccaactcgtgtgtgaaactccagactgtccacagcattccgctgaccatcaataaggaagatgatgagtctccggggctctatgggtttctgaatgtcatcgtccactcagccactggatttaagcagagttcaaatctgtactgcaccctggaggtggattcctttgggtattttgtgaataaagcaaagacgcgcgtctacagggacacagctgagccaaactggaacgaggaatttgagatagagctggagggctcccagaccctgaggatactgtgctatgaaaagtgttacaacaagacgaagatccccaaggaggacggcgagagcacggacagactcatggggaagggccaggtccagctggacccgcaggccctgcaggacagagactggcagcgcaccgtcatcgccatgaatgggatcgaagtaaagctctcggtcaagttcaacagcagggagttcagcttgaagaggatgccgtcccgaaaacagacaggggtcttcggagtcaagattgctgtggtcaccaagagagagaggtccaaggtgccctacatcgtgcgccagtgcgtggaggagatcgagcgccgaggcatggaggaggtgggcatctaccgcgtgtccggtgtggccacggacatccaggcactgaaggcagccttcgacgtcaataacaaggatgtgtcggtgatgatgagcgagatggacgtgaacgccatcgcaggcacgctgaagctgtacttccgtgagctgcccgagcccctcttcactgacgagttctaccccaacttcgcagagggcatcgctctttcagacccggttgcaaaggagagctgcatgctcaacctgctgctgtccctgccggaggccaacctgctcaccttccttttccttctggaccacctgaaaagggtggcagagaaggaggcagtcaataagatgtccctgcacaacctcgccacggtctttggccccacgctgctccggccctccgagaaggagagcaagctccctgccaaccccagccagcctatcaccatgactgacagctggtccttggaggtcatgtcccaggtccaggtgctgctgtacttcctgcagctggaggccatccctgccccggacagcaagagacagagcatcctgttctccaccgaagtctaaaggtcccagtccatctcctggaggcagacagatggcctggaaacctctggctaatcgggccatccgtagagcgggaaccttcctgaggtgtccttgggccacccccaagtgttgggccatctgccaagagacagcgacccaaagccgaaggacaggtggcctgggcagatctcgcccaggtctgggagccccaggctggcctcagactgtggttttttatgtggccacccgagggcgccccaagccagttcatctcagagtccaggcctgaccctgggagacagggtgaagggagtgatttttatgaacttaacttagagtctaaaagatttctactggatcacttgtcaagatgcgccctctctggggagaagggaacgtgaccggattccctcactgttgtatcttgaataaacgctgctgcttcatcctgtg

SEQ ID NO: 1654 - DNA, 490 bp, Homo sapiens
atccctgactcggggtcgcctttggagcagagaggaggcaatggccaccatggagaacaaggtgatctgcgccctggtcctggtgtccatgctggccctcggcaccctggccgaggcccagacagagacgtgtacagtggccccccgtgaaagacagaattgtggttttcctggtgtcacgccctcccagtgtgcaaataagggctgctgtttcgacgacaccgttcgtggggtcccctggtgcttctatcctaataccatcgacgtccctccagaagaggagtgtgaattttagacacttctgcagggatctgcctgcatcctgacgcggtgccgtccccagcacggtgattagtcccagagctcggctgccacctccaccggacacctcagacacgcttctgcagctgtgcctcggctcacaacacagattgactgctctgactttgactactcaaaattggcctaaaaattaaaagagatcgatatt

SEQ ID NO: 1655 - DNA, 2161 bp, Homo sapiens; identical to SEQ ID NO: 1236

SEQ ID NO: 1656 - DNA, 2824 bp, Homo sapiens; identical to SEQ ID NO: 1057

SEQ ID NO: 1657 - DNA, 2545 bp, Homo sapiens; identical to SEQ ID NO: 1241

SEQ ID NO: 1658 - DNA, 2930 bp, Homo sapiens
gaattccggtttcttcctaaaaaatgtctgatggccgctttctcggtcggcaccgccatgaatgccagcagttactctgcagagatgacggagcccaagtcggtgtgtgtctcggtggatgaggtggtgtccagcaacatggaggccactgagacggacctgctgaatggacatctgaaaaaagtagataataacctcacggaagcccagcgcttctcctccttgcctcggagggcagctgtgaacattgaattcagggacctttcctattcggttcctgaaggaccctggtggaggaagaaaggatacaagaccctcctgaaaggaatttccgggaagttcaatagtggtgagttggtggccattatgggtccttccggggccgggaagtccacgctgatgaacatcctggctggatacagggagacgggcatgaagggggccgtcctcatcaacggcctgccccgggacctgcgctgcttccggaaggtgtcctgctacatcatgcaggatgacatgctgctgccgcatctcactgtgcaggaggccatgatggtgtcggcacatctgaagcttcaggagaaggatgaaggcagaagggaaatggtcaaggagatactgacagcgctgggcttgctgtcttgcgccaacacgcggaccgggagcctgtcaggtggtcagcgcaagcgcctggccatcgcgctggagctggtgaacaaccctccagtcatgttcttcgatgagcccaccagcggcctggacagcgcctcctgcttccaggtggtctcgctgatgaaagggctcgctcaagggggtcgctccatcatttgcaccatccaccagcccagcgccaaactcttcgagctgttcgaccagctttacgtcctgagtcaaggacaatgtgtgtaccggggaaaagtctgcaatcttgtgccatatttgagggatttgggtctgaactgcccaacctaccacaacccagcagattttgtcatggaggttgcatccggcgagtacggtgatcagaacagtcggctggtgagagcggttcgggagggcatgtgtgactcagaccacaagagagacctcgggggtgatgccgaggtgaacccttttctttggcaccgcccctctgaagaggtaaagcagacaaaacgattaaaggggttgagaaaggactcctcgtccatggaaggctgccacagcttctctgccagctgcctcacgcagttctgcatcctcttcaagaggaccttcctcagcatcatgagggactcggtcctgacacacctgcgcatcacctcgcacattgggatcggcctcctcattggcctgctgtacttggggatcgggaacgaaaccaagaaggtcttgagcaactccggcttcctcttcttctccatgctgttcctcatgttcgcggccctcatgcctactgttctgacatttcccctggagatgggagtctttcttcgggaacacctgaactactggtacagcctgaaggcctactacctggccaagaccatggcagacgtgccctttcagatcatgttcccagtggcctactgcagcatcgtgtactggatgacgtcgcagccgtccgacgccgtgcgctttgtgctgtttgccgcgctgggcaccatgacctccctggtggcacagtccctgggcctgctgatcggagccgcctccacgtccctgcaggtggccactttcgtgggcccagtgacagccatcccggtgctcctgttctcggggttcttcgtcagcttcgacaccatccccacgtacctacagtggatgtcctacatctcctatgtcaggtatgggttcgaaggggtcatcctctccatctatggcttagaccgggaagatctgcactgtgacatcgacgagacgtgccacttccagaagtcggaggccatcctgcgggagctggacgtggaaaatgccaagctgtacctggacttcatcgtactcgggattttcttcatctccctccgcctcattgcctatttggtcctcaggtacaaaatccgggcagagaggtaaaacacctgaatgccaggaaacaggaagattagacactgtggccgagggcacgtctagaatcgaggaggcaagcctgtgcccgaccgacgacacagagactcttctgatccaacccctagaaccgcgttgggtttgtgggtgtctcgtgctcagccactctgcccagctgggttggatcttctctccattcccctttctagctttaactaggaagatgtaggcagattggtggttttttttttttttttaacatacagaattttaaataccacaactggggcagaatttaaagctgcaacacagctggtgatgagaggcttcctcagtccagtcgctccttagcaccaggcaccgtgggtcctggatggggaactgcaagcagcctctcagctgatggctgcacagtcagatgtctggtggcagagagtccgagcatggagcgattccattttatgactgttgtttttcacattttcatctttctaaggtgtgtctcttttccaatgagaagtcatttttgcaagccaaaagtcgatcaatcgcattcattttaagaaattatacctttttagtacttgctgaagaatgattcagggtaaatcacatactttgtttagagaggcgaggggtttaacccgagtcacccagctggtctcatacatagacagcacttgtgaaggattgaatgcaggttccaggtggagggaagacgtggacaccatctccactgagccatgcagacatttttaaaagctatacacaaaattgtgagaagacattggccaactctttcaaagtctttctttttccacgtgcttcttattttaagcgaaatatattgtttgtttcttcctaaaaaaaaaaaaaaaaaaaaa

SEQ ID NO: 1659 - DNA, 1378 bp, Homo sapiens
ggtagcagcatccaccgggcgggaggtcggaggcagcaaggccttaaaggctactgagtgcgccggccgttccgtgtccagaacctcccctactcctccgccttctcttccttggccgcccaccgccaagttccgactccggttttcgcctttgcaaagcctaaggaggaggttaggaacagccgcgcccccctccctgcggccgccgccccctgcctctcggctctgctccctgccgcgtgcgcctgggccgtgcgccccggcaggcgccagccatgtcgatgctgccgtcgtttggctttacgcaggagcaagtggcgtgcgtgtgcgaggttctgcagcaaggcggaaacctggagcgcctgggcaggttcctgtggtcactgcccgcctgcgaccacctgcacaagaacgagagcgtactcaaggccaaggcggtggtcgccttccaccgcggcaacttccgtgagctctacaagatcctggagagccaccagttctcgcctcacaaccaccccaaactgcagcaactgtggctgaaggcgcattacgtggaggccgagaagctgcgcggccgacccctgggcgccgtgggcaaatatcgggtgcgccgaaaatttccactgccgcgcaccatctgggacggcgaggagaccagctactgcttcaaggagaagtcgaggggtgtcctgcgggagtggtacgcgcacaatccctacccatcgccgcgtgagaagcgggagctggccgaggccaccggcctcaccaccacccaggtcagcaactggtttaagaaccggaggcaaagagaccgggccgcggaggccaaggaaagggagaacaccgaaaacaataactcctcctccaacaagcagaaccaactctctcctctggaagggggcaagccgctcatgtccagctcagaagaggaattctcacctccccaaagtccagaccagaactcggtccttctgctgcagggcaatatgggccacgccaggagctcaaactattctctcccgggcttaacagcctcgcagcccagtcacggcctgcagacccaccagcatcagctccaagactctctgctcggccccctcacctccagtctggtggacttggggtcctaagtggggagggactggggcctcgaagggattcctggagcagcaaccactgcagcgactagggacacttgtaaatagaaatcaggaacatttttgcagcttgtttctggagttgtttgcgcataaaggaatggtggactttcacaaatatctttttaaaaatcaaaaccaacagcgatctcaagcttaatctcctcttctctccaactctttccacttttgcattttccttcccaatgcagagatcaggg

SEQ ID NO: 1660 - DNA, 2457 bp, Homo sapiens; identical to SEQ ID NO: 1244

SEQ ID NO: 1661 - DNA, 1882 bp, Homo sapiens; identical to SEQ ID NO: 1245

SEQ ID NO: 1662 - DNA, 322 bp, Homo sapiens
aaatatcatatggaaaggcataagagaacccatagtggagaaaaaccttaccagtgtgaatactgtttacagtattttccagaacagatcgtgtattgaaacataaacgtatgtgccatgaaaatcatgacaaaaaactaaatagatgtgccatcaaaggtggccttctgacatctgaggaagattctggcttttctacatcaccaaaagacaactcactgccaaaaaagaaaaggcagaaaacggagaaaaaatcatctggaatggacaaagagagtgctttggacaaatctgacctgaaaaaaaaaaaaaaaaactttag

SEQ ID NO: 1663 - DNA, 860 bp, Homo sapiens; identical to SEQ ID NO: 1251

SEQ ID NO: 1664 - DNA, 2620 bp, Homo sapiens
ggcgggccttgggaaccgtctcctggttgtggggtgggggggaaagatggcggagctgatgctgctcagcgagattgctgacccgacgcgtttcttcaccgacaacctgcttagcccggaggactgggacagcaccttgtattctggcctagatgaagtggccgaggagcagacgcagctcttccgttgcccggagcaggatgtcccgtttgacggcagctccctggacgtggggatggatgtcagcccctctgagcccccatgggaactcctgccgatcttcccagatcttcaggtgaagtctgagccatcttccccctgctcttcctcctccctcagctccgagtcatcgcgtctctccacagagccatccagcgaggctcttggggtaggggaggtgctccatgtgaagacagagtccttggcacccccactgtgtctcctgggagatgacccaacatcctcatttgaaaccgtccagatcaacgttatccccacctctgatgattcctcagatgtccagaccaagatagaacctgtctctccatgttcttccgtcaactctgaggcctccctgctctcagccgactcctccagccaggcttttataggagaggaggtcctggaagtgaagacagagtccctgtccccttcaggatgcctcctgtgggatgtcccagccccctcacttggagctgtccagatcagcatgggcccatcccttgatggctcctcaggcaaagccctgcccacccggaagccgccactgcagcccaaacctgtagtgctaaccactgtcccaatgccatccagagctgtgcctcccagcaccacagtccttctgcagtccctcgtccagccacccccagtgtccccagttgtcctcatccagggtgctattcgagtccagcctgaagggccggctccctctctaccacggcctgagaggaagagcatcgttcccgctcctatgcctggaaactcctgcccgcctgaagtggatgcaaagctgctgaagcggcagcagcgaatgatcaagaaccgggagtcagcctgccagtcccggagaaagaagaaagagtatctgcagggactggaggctcggctgcaagcagtactggctgacaaccagcagctccgccgagagaatgctgccctccggcggcggctggaggccctgctggctgaaaacagcgagctcaagttagggtctggaaacaggaaggtggtctgcatcatggtcttccttctcttcattgccttcaactttggacctgtcagcatcagtgagcctccttcagctcccatctctcctcggatgaacaagggggagcctcaaccccggagacacttgctggggttctcagagcaagagccagttcagggagttgaacctctccaggggtcctcccagggccctaaggagccccagcccagccccacagaccagcccagtttcagcaacctgacagccttccctgggggcgccaaggagctactactaagagacctagaccagctcttcctctcctctgattgccggcacttcaaccgcactgagtccctgaggcttgctgacgagttgagtggctgggtccagcgccaccagagaggccggaggaagatccctcagagggcccaggagagacagaagtctcagccacggaagaagtcacctccagttaaggcagtccccatccaaccccctggacccccagaaagggattctgtgggccagctgcaactatatcgccacccagaccgttcgcagccagcattcttggatgcaattgaccgacgggaagacacattttatgttgtctctttccgaaggggccacctgctgctcccagccatcagccacaacaagacctcccggcccaagatgtccctggtgatgcctgccatggcccccaatgagaccctgtcaggccgtggggccccgggggactatgaggagatgatgcagatcgagtgtgaggtcatggacaccagggtgattcacatcaagacctccacagtgcccccctcgctccgaaaacagccatccccaaccccaggcaatgccacaggtggccccttgccagtctctgcagccagccaggcccaccaggcctcccaccagcccctctacctcaatcatccctgacctctgccattcacactgacttagaacggggggagggggtaccaggtggccaggtgggactgtttcaaatttccctgatccccaggcttggggcaattggtaaaggaaagagcaggtgtgggggttaagcacttatttgaggtgggggtgttcacctctcttctcatccctttatcagaatatagggctcctctcattcctgtgaacccccagtcctggcttctttgtttgaggggattgtgtgaggttcagttgtggggtgggtggtgagctgctgcatattttttattgtgtttctctagtgttatggcagtggaggtgggaatttagtccccaggtgggacaagggaagttttttcattttggagctagttactgggagtaagggagggtggggtgggggggagttcaggtttatgtgtgtgcatttcttttttattattactaaataaacaacttggagggagttga

SEQ ID NO: 1665 - DNA, 455 bp, Homo sapiens
  misc_feature (1)..(455): n=a,t,g or c
acaccatgagcttcaataccctgtagagatacttcattcttctatttggtttatttagaaatcacctattctgactgatctttaagaatgaatgctataaagagctaccaaattttctttcaaattcataaaactgttcacacttttttgaaacaggagttaatgccgagaatccatcagaagtatctactgtttagaaggaaatggagcagcaccaaatgggtctaattcgactggttgggactgttgggactgatgtggagtgatgctttgcaccacaagttctataaagggcacggcaccaaaatcatccattttcaatacatctgcactatggaatgacccatgtagtgaattttgtcttggcccgccctggcaggaccagtattgtgatcagcacggatgtcgctncaggccctgatggtggagggtgccatgacagggtctggagaatg

SEQ ID NO: 1666 - DNA, 448 bp, Homo sapiens
  misc_feature (1)..(448): n=a,t,g or c
aagaagtggcccctctgcaacatgtcctcacagaaacgaaatggtgtgtagcaatcaacactagaaagtagaccttttgcaaattaatatgtccttgaccttttttgcccttttgtgggggtgaggtggggataaaaagactgtcatatcaagaactgtgacttttctttccctcaaacaatanaactcctttattatcttaatgctcccatgttaacatgtttgctgctaaattacaatgtagaattgataatggtttatagtgaactgtgctcttccctcattaaaatcccagggtgccctggtaaagatgcagatgtttcttcctgaaaacttctttttttacaaagaaaattagatgtacatgtataattcagtgtgctttgtctttctccagattaatatcggttacactgctgatgtttgtanattanacagatatttactt

SEQ ID NO: 1667 - DNA, 567 bp, Homo sapiens
  misc_feature (1)..(567): n=a,t,g or c
agagaagaccgtggatcacctggggacagaggtgaaaggcctgctgggctgctggaggagctggcctggaacctgcccccgggacccttcagccccgctcccgaccttctcggagatggcttctgagccctggagctggagcccagcagttggaggtggtgcacctgccaggcagcgccacagaaccagccctgtcctctcgacttccttccttagcttcatgtgaaataaaagctattctggtctcctctgtgtctgctgacagagtaacccgtttaactacagcctcctctcactccacttccatgcctggaggaagcctgcaaccccctccaggctcagacctggggacacccccantcctgtcatttataggggaagatggagcaggggttgattcacacagatggggggccctctgaattggcctgcttctcagaatgttggccataggtnaaaagcaaggggatcggggttcaggaccancagaatgtttagtgaatctgnatgaatgagaccccaggatttatgtgtccattaagtggttgttgtgntttaaaaaaaaaa

SEQ ID NO: 1668 - DNA, 283 bp, Homo sapiens
cccagtactggtagacggagaagagcacgtcggttttccttaagacagatgggagttttgtggttcatgatataccttctggatcttatgtagtggaagttgtatctccagcttacagatttgatccgttcgagtggatatcacttcgaaaggaaaatgagagcagatatgtgaattacatcaaacatcagaggttgtcagactgccctatcctctcaaatgaatcttcaggtcacctcttacttattaaagggaatcgtgggctgacagcttctatgaccga

SEQ ID NO: 1669 - DNA, 263 bp, Homo sapiens
gttcagtgctcatacgtatctgctcattttgacaaagtgcctcatgcaaccgggccctctctctgcggcagagtccttagtggaggggtttacctggaacattagtagttaccacagaatacggaagagcaggtgactgtgctgtgcagctctctaaatgggagttctcaggtaggaggcaacaccttcagaaagagctcaaaataaattggaaatgtgaatcgcagctgtgggtgtgaccaccgcctgtgtagagtcccagg

SEQ ID NO: 1670 - DNA, 308 bp, Homo sapiens
gagcagcttgttgagacctgtcgattgttacgacacatatctgggacagaaacctctggaaataacctcctatacatgcagaggagacattttcaggtgactggccaacagataatttctgctgctgaaacattgacattgcatccatctagtaaaattgctaaagaaaacctagatgtattttgtgaagcttgggaatcccaaattagtgacatgtcaacactgctgagagaaatcaatgacgtgtttgaaggaagacgaggagagaagtatggcaccttcacttccaagcaattaggatatgcaac

SEQ ID NO: 1671 - DNA, 182 bp, Homo sapiens
cctcggttggcacggtgcgtcttgattaattagttactctgactctggtctgccgagatccatttccaacccagttgcgttgggagagggttgggaggcagcagagcatgggtgacagtgggagcacacgacttccttggagcctgggcctttgcgggtcccaggtggtcaggcagctggag

SEQ ID NO: 1672 - DNA, 450 bp, Homo sapiens
cagaactcagactaaccttgtggtttcaacgcgcactctgctctgtcctgaaatctggaactcattacctcatcaccaagaaactgcacgaaatctctcccccaccgccccaacacccactcgggaaaggaacgagcaaacatccctctaagaaagaaacctacacttgaatgatttaaattaaggtggatggaagttatttccctttctggcgcttgcagatttcaagaaaagctgaaaaatgggagcgggggagggaagcaacagacggctggagggcagcagcagaacaagcgaggggcagcaccgagttaaagtgggggccatccatttcgggcagaggagacaaatgaaagccgaccccgctgggatcacgtaggttcgtggctgcagcaaaagttgggtttcacaaagttgaaaaacagccggtttctcaaacaattgtgattt

SEQ ID NO: 1673 - DNA, 269 bp, Homo sapiens
cgaaggtttccggctgcccttgctgctgggtggagtggagagggagacttctttttgttggttttaatttaaaaacacaaaggcctaaagaaatacgtatcttataatttttttaatttttgagacgttcatttaatgaattgtgcacgaatgaattctatatatataaaatatacatatatagctctatatttggggaggggcactgtctcttttttctctcatttttaaaatgaagtgttgttgcctttgtatgtggttcaaccatc

SEQ ID NO: 1674 - DNA, 282 bp, Homo sapiens
  misc_feature (1)..(282): n=a,t,g or c
cttcattggcccagcttggcgaaagcnaggcacactgcttactgccttggggttgtggagatggacccgtgacctcgtggaggccgtgtgggggcagcagcctggcctgtgccatggtgggtgtcctggggcctgtgcggagggagccacctcaccctgcagcccagtttgcaggtgtggccttgtttctccttgcccagcagtgctgccttcagcggccgtgacggggccagctggacacacggtgagattttntcgtatgtaaataaaaggnattttggt

SEQ ID NO: 1675 - DNA, 142 bp, Homo sapiens; identical to SEQ ID NO: 373

SEQ ID NO: 1676 - DNA, 348 bp, Homo sapiens
  misc_feature (1)..(348): n=a,t,g or c
gcaagtgtggaccccaggtagcctcttggagatgaccgttgcgttgaggacaaatggggactttgccaccggatgcttgtnntngcacatttcaggggggtcaggagagttaaggaggttgtgggtgggattccaaggtgaggcccaactgaatcgtggggtgagctttatagccagtagaggtggagggaccctggcatgtgcaacagaagaggccctctgggtgatgaagtgaccatcacatttggaaagtgatcaaccactgttccttctatggggctcttgctctagtgtctatggtgagaacacaggccccgccgcttcccttgtagagccatagaaatattc

SEQ ID NO: 1677 - DNA, 567 bp, Homo sapiens
caattttctatcacactgggctccatgatattctgttccctaagaactgcttctgtgtgccctgttttcatcccaagatttctcacttcatcctctcctacctggctcttttgtcccagggaggggtcctgttcggaagcagtggctgaatttatcccctgaaagtggttttggaggaaccgggatggaggaggccttcccctgtgggaatagaatcgtccactcctagccctggttgcttctgatacacagccactgcacacacacactcacactcacactcccttgtctgatgccccaaagccaattcctggggcaccctaccctctcgttatttggagtttccgttggtttacctgagttttctctggggtctgcacagaggcagcagcatggacatcatggcctctcaggtcccttttggttctcagtttcattggttcctctttctgttcccccattgacttctgtgccccaccctagccttttccataaccttaggtattcagtttggaggggttttttgtatttttgaggattcctgtattctgtatcctctcctcgcat

SEQ ID NO: 1678 - DNA, 532 bp, Homo sapiens
aacaacatgatatgtgctggactggaccggggccaggacccttgccagagtgactctggaggccccctggtctgtgacgagaccctccaaggcatcctctcgtggggtgtttacccctgtggctctgccagcatccagctgtctacacccagatctgcaaatacatgtcctggatcaataaagtcatacgctccaactgatccagatgctacgctccagctgatccagatgttatgctcctgctgatccagatgcccagaggctccatcgtccatcctcttcctccccagtcggctgaactctccccttgtctgcactgttcaaacctctgccgccctccacacctctaaacatctcccctctcacctcattcccccacctatccccattctctgcctgtactgaagctgaaatgcaggaagtggtggcaaaggtttattccagagaagccaggaagccggtcatcacccagcctctgagagcagttactggggtcaccaacctgacttcctctgccactccctgctgtgtg

SEQ ID NO: 1679 - DNA, 1522 bp, Homo sapiens
cgcgggggagaagcgggagcgggagcgggagcgagctggcggcgccgtcgggcgccgggccgggccatggagctgtggccgtgtctggccgcggcgctgctgttgctgctgctgctggtgcagctgagccgcgcggccgagttctacgccaaggtcgccctgtactgcgcgctgtgcttcacggtgtccgccgtggcctcgctcgtctgcctgctgcgccacggcggccggacggtggagaacatgagcatcatcggctggttcgtgcgaagcttcaagtacttttacgggctccgcttcgaggtgcgggacccgcgcaggctgcaggaggcccgtccctgtgtcatcgtctccaaccaccagagcatcctggacatgatgggcctcatggaggtccttccggagcgctgcgtgcagatcgccaagcgggagctgctcttcctggggcccgtgggcctcatcatgtacctcgggggcgtcttcttcatcaaccggcagcgctctagcactgccatgacagtgatggccgacctgggcgagcgcatggtcagggagaacctcaaagtgtggatctatcccgagggtactcgcaacgacaatggggacctgctgccttttaagaagggcgccttctacctggcagtccaggcacaggtgcccatcgtccccgtggtgtactcttccttctcctccttctacaacaccaagaagaagttcttcacttcaggaacagtcacagtgcaggtgctggaagccatccccaccagcggcctcactgcggcggacgtccctgcgctcgtggacacctgccaccgggccatgaggaccaccttcctccacatctccaagaccccccaggagaacggggccactgcggggtctggcgtgcagccggcccagtagcccagaccacggcagggcatgacctggggagggcaggtggaagccgatggctggaggatgggcagaggggactcctcccggcttccaaataccactctgtccggctcccccagctctcactcagcccgggaagcaggaagccccttctgtcactggtctcagacacaggcccctggtgtcccctgcagggggctcagctggaccctccccgggctcgagggcagggactcgcgcccacggcacctctgggagctgggatgataaagatgaggcttgcggctgtggcccgctggtgggctgagccacaaggcccccgatggcccaggagcagatgggaggaccccgaggccagacgcacactgtccgagccctctgctcagccgcctgggacccaccagggtgcagctgggctccagggtccagcccacaagctgcatcagggtctctgggagaggaggggcctccagggccaggagtcccagactcacgcaccctgggccacagggagccgggaatcggggcctgctgctcctgctggcctggaagactctgtggggtcagcactgtactccgttgctgtttttttataaacacactcttggaagtggaaaaaaaaaaa

SEQ ID NO: 1680 - DNA, 550 bp, Homo sapiens
cacgagccaccatggatgttttcaagaagggcttctccatcgccaagaagggcgtggtgggtgcggtggaaaagaccaagcagggggtgacggaagcagctgagaagaccaaggagggggtcatgtatgtgggagccaagaccaaggagaatgttgtacagagcgtgacctcagtggccgagaagaccaaggagcaggccaacgccgtgagcaaggctgtggtgagcagcgtcaacactgtggccaccaagaccgtggaggaggcggagaacatcgcggtcacctccggggtggtgcgcaaggaggacttgaggccatctgccccccaacaggagggtgaggcatccaaagagaaagaggaagtggcagaggaggcccagagtgggggagactagagggctacaggccagcgtggatgacctgaagagcgctcctctgccttggacaccatcccctcctagcacaaggagtgcccgccttgagtgacatgcgggtgcccacgctcctgccctcgtctccctggacacccttggcctgtccacctgtgctg

SEQ ID NO: 1681 - DNA, 460 bp, Homo sapiens
gcaaagtgagttttatttttttgtaattcctttatctttacttaaaggtgaatgtgtattcctctgggaggaataggaagaaaacaggaatgttaataatgtcgaacagaaaacttcctcccttattaatatataatcctcatgtatttatgcctaatgtaagctgacttttaaaaagctttcttttgttgcatgccctgtgcaggcatctgtattgtacatgcatgcctttcgtcctgttttcctgtataaagttagtgaacaaagaaatatttttgcctagttcatgttgccaagcaatgcatattttttaaatttgtcatatatggaaagagcatgtttgttacatgtaaaagctttactgatatacagatatactaatgtttgaagatgctgttctttgcaagtggtacagttttcaaatgttgttaccagtgaacacccttgtggtttaacttkg

SEQ ID NO: 1682 - DNA, 1595 bp, Homo sapiens
ccggttcgcaaagaagctgacttcagagggggaaactttcttcttttaggaggcggttagccctgttccacgaacccaggagaactgctggccagattaattagacattgctatgggagacgtgtaaacacactacttatcattgatgcatatataaaaccattttattttcgctattatttcagaggaagcgcctctgatttgtttcttttttccctttttgctctttctggctgtgtggtttggagaaagcacagttggagtagccggttgctaaataagtcccgagcgcgagcggagacgatgcagcggagactggttcagcagtggagcgtcgcggtgttcctgctgagctacgcggtgccctcctgcgggcgctcggtggagggtctcagccgccgcctcaaaagagctgtgtctgaacatcagctcctccatgacaaggggaagtccatccaagatttacggcgacgattcttccttcaccatctgatcgcagaaatccacacagctgaaatcagagctacctcggaggtgtcccctaactccaagccctctcccaacacaaagaaccaccccgtccgatttgggtctgatgatgagggcagatacctaactcaggaaactaacaaggtggagacgtacaaagagcagccgctcaagacacctgggaagaaaaagaaaggcaagcccgggaaacgcaaggagcaggaaaagaaaaaacggcgaactcgctctgcctggttagactctggagtgactgggagtgggctagaaggggaccacctgtctgacacctccacaacgtcgctggagctcgattcacggtaacaggcttctctggcccgtagcctcagcggggtgctctcagctgggttttggagcctcccttctgccttggcttggacaaacctagaattttctccctttatgtatctctatcgattgtgtagcaattgacagagaataactcagaatattgtctgccttaaagcagtacccccctaccacacacacccctgtcctccagcaccatagagaggcgctagagcccattcctctttctccaccgtcacccaacatcaatcctttaccactctaccaaataatttcatattcaagcttcagaagctagtgaccatcttcataatttgctggagaagtgtatttcttccccttactctcacacctgggcaaactttcttcagtgtttttcatttcttacgttctttcacttcaagggagaatatagaagcatttgatattatctacaaacactgcagaacagcatcatgtcataaacgattctgagccattcacactttttatttaattaaatgtatttaattaaatctcaaatttattttaatgtaaagaacttaaattatgttttaaacacatgccttaaatttgtttaattaaatttaactctggtttctaccagctcatacaaaataaatggtttctgaaaatgtttaagtattaacttacaaggatataggtttttctcatgtatctttttgttcattggcaagatgaaataatttttctagggtaatgccgtaggaaaaataaaacttcacatttaaaaaaaa

SEQ ID NO: 1683 - DNA, 383 bp, Homo sapiens
  misc_feature (1)..(383): n=a,t,g or c
tgccttcccttcaattttaaactgaagcattttaatgtgggtagaaactctacaccaaatacactaaacattttggtgcttagtggatttctttttaggtaactggtacttacttccaaagactgaatacaagccacactccatcatatcccttaaacttcatgaaaaaccattcaagatccccttgctgcaacactgttctcttcttctctactaaattctatttccaaaattggtaatagagccagaaggatcccccagtacccagccctctgcctggnacaaactgggtagcacaattaaattcagtatggggtggagcatggtacagtcttgggtggccaataggaaggggtagttggcataggtcacaccatncattt

SEQ ID NO: 1684 - DNA, 375 bp, Homo sapiens
  misc_feature (1)..(375): n=a,t,g or c
cacgagctgctatgaagacatacttgagactcggtaatttatatagaaaagaggtttaattgacaaaaaagctaacaaagtgagcccatgattcaaaaatgactgtctacacttggcacatgagggactttatgatattaagagattaattaaacaacagtggatggggaggaagaacagacttttgagctcttcccaatataggaatgtgttagttctaaaaattttcttaagttgtttgcttggaactcagagtntatttatccatacgaaaaattcagaactatttnatttatgatatgggctaaaaagacttctgtaatctagcttgggaaacttaataatcattaaacttattttcaatgaaaaaaaaaa

SEQ ID NO: 1685 - DNA, 222 bp, Homo sapiens
ggggcatggctaacacctccctgggcctcttcttcctaccttgattgagggtgtgatgcctggagccacagcagccactttgctaccatgacaaaaaggccaagagaatcacagagtcattgaccctatcattatttcaccaagccaataccagccgccatccttctccagaattcttgtaaataaaataaatccctctttgtttaaaaaaaaaaaaaaaaa

SEQ ID NO: 1686 - DNA, 471 bp, Homo sapiens
  misc_feature (1)..(471): n=a,t,g or c
ctgacacctgtcccccgccccagtgactccgtctccttcacccctgcggctaccagcactccctctaagcaggccctccagttcttctgctacatctgcaaggccagctgctccagccagcaggagttccaggaccacatgtcggagcctcagcaccagcagcggctaggggagatccagcacatgagccaagcctgcctcctgtccctgctgcccgtgccccgggacgtcctgggagacagaggatgaggagcctccaccaaggcgctggtgcaacacctgccagctctactacatggggggacctgatccaacaccgcaggacacagggaccacaagatttgccaaacaatcctttgcggaccttnttgcaccttttgcaaccgttattttnaaaacccttcggcaatttgtnggagcaagttgaagttccngggggcttaagggtcaaaaggccaaggagttgaaggt

SEQ ID NO: 1687 - DNA, 403 bp, Homo sapiens
  misc_feature (1)..(403): n=a,t,g or c
gagaagaggatctggctgctctgtttgaagcttcaatgaaactgtattaattgtcattttaactgaaagaattaccgctggccattgtagtgctgagagcaagagctgatctagctagggctttgtcttttcatctttgtgcataacttacctgttaccagtataggtgggatatacatttatcttgcaggaaattccccaaagctcagagtccagttccttccataaaacaggctggacaaatgaccactatgttagacccccagggctcgacttcaggggtcagtgttcctgtcccaaaccccacacagaatactctggcctctggctttcatgtaggccaaatgaggcaaaaaacttcagtatctattcaaaagtggtaaaattattatttccnatgggc

SEQ ID NO: 1688 - DNA, 380 bp, Homo sapiens
  misc_feature (1)..(380): n=a,t,g or c
ggcttttggccangcttctttacagcatcctgcactccagcctgggtgacacagtgagactccgtctccaaaaaaaaggatgaggaatagaattctgtgcagatgtcctgacttggcaattttgtgtccctgcctcactgtctccaccaacccccgcctgtcctagtgttgttctgcctcctgtcctctcttgctctcttgtcagtctctggcttcctcggccccatttcacttcactgagtcctgacacccatctccctaggggcctgtgagaggagagggaagggtctgttctgctcagctccatgtcccccattttcctccacaataaaactggggactgggctgaaaaaaaaaaaaaaaaaaaaaaaaaaaaaaaa

SEQ ID NO: 1689 - DNA, 511 bp, Homo sapiens
  misc_feature (1)..(511): n=a,t,g or c
gctggaagaacctttgtctgagggtagttcatagctggaaatacttggaatattttccagagtctctaaactctcatcttcccccacagatacacatccaagctcacaaataggagtagcaattctaggtggtagggttgtgtacggaacccctggctgtctgcatatatctcagaattaccccaggaccattgtcccaaagtctagagtctttacaggtaggcaaaatttgttttcaatgcctgtgcctcagctgctgtcacaaatacccatcttaggatcccatcagcttcccatcccccaccagacagccacagtaccctcactttctccctattgttctttcaaatcctgttctcaggaaagaaactgccactaattcattcacactaaggtgtaaanggattgataatagggattgagttaccttttcccacagacnttgtttttaagtatggacagagcgggccttattccaggggaaaggtttgggactggagggggtgaggtt

SEQ ID NO: 1690 - DNA, 1700 bp, Homo sapiens
cggcggcccagactatccgctcccaccgcgcccccggcccacctggtggccccggcctggccgccgcccccgcgctgtgcccgggagctcgtcccggacgcgcgaccgggcggcgggggctcggcggccaccgctgcctcaagggagcgaggcgggagggtgtgtgtgcgcggctgtgagcaggggtgccggcgggctgcagcggaggcactttggaagaatgactctggagtccatcatggcgtgctgcctgagcgaggaggccaaggaagcccggcggatcaacgacgagatcgagcggcagctccgcagggacaagcgggacgcccgccgggagctcaagctgctgctgctcgggacaggagagagtggcaagagtacgtttatcaagcagatgagaatcatccatgggtcaggatactctgatgaagataaaaggggcttcaccaagctggtgtatcagaacatcttcacggccatgcaggccatgatcagagccatggacacactcaagatcccatacaagtatgagcacaataaggctcatgcacaattagttcgagaagttgatgtggagaaggtgtctgcttttgagaatccatatgtagatgcaataaagagtttatggaatgatcctggaatccaggaatgctatgatagacgacgagaatatcaattatctgactctaccaaatactatcttaatgacttggaccgcgtagctgaccctgcctacctgcctacgcaacaagatgtgcttagagttcgagtccccaccacagggatcatcgaatacccctttgacttacaaagtgtcattttcagaatggtcgatgtagggggccaaaggtcagagagaagaaaatggatacactgctttgaaaatgtcacctctatcatgtttctagtagcgcttagtgaatatgatcaagttctggtggagtcagacaatgagaaccgaatggaggaaagcaaggctctctttagaacaattatcacatacccctggttccagaactcctcggttattctgttcttaaacaagaaagatcttctagaggagaaaatcatgtattcccatctagtcgactacttcccagaatatgatggaccccagagagatgcccaggcagcccgagaattcattctgaagatgttcgtggacctgaacccagacagtgacaaaattaactactcccacttcacgtgcgccacagacaccgagaatatccgctttgtctttgctgccgtcaaggacaccatcctccagttgaacctgaaggagtacaatctggtctaattgtgcctgctagacacccgccctgcccttccctggtgggctattgaagatacacaagagggactgtatttctgtggaaaacaatttgcataatactaatttattgccgtcctggactctgtgtgagcgtgtccacagagtttgagtaaatattatgattttatttaaactattccagaggaaaaacagaggatgctgaagtacagtcccagcacatttcctctctatctttttttaggcaaaccttgtgactcagtgtattttaaattctcagtcatgcactcacaaagataagacttgtttctttctgtctctctctctttttcttttctatggagcaaaacaaagctgatttccctttttttcttcccccgctaattcatacctccctcctgatgtt

SEQ ID NO: 1691 - DNA, 2255 bp, Homo sapiens
gctggcctgtttgggtactgggggaacaaaggtggagtcaacatctgcctgaagctttatggctactatgtcagcatcatcaactgccacctgcctccccacatttccaacaattaccagcggctggagcactttgaccggatcctggagatgcagaattgtgaggggcgagacatcccaaacatcctggaccacgacctcattatctggtttggagacatgaactttcggatcgaggactttgggttgcactttgttcgggaatccattaaaaatcggtgctacggtggcctgtgggagaaggaccagctcagcattgccaagaaacatgacccgctgctccgggagttccaggagggccgcctactcttcccgcccacctacaagtttgataggaactccaacgactatgacaccagtgagaaaaaacgcaagcctgcatggaccgatcgcatcctgtggaggctgaagcggcagccctgtgctggccccgacactcccataccgccggcgtcacacttctccttgtctctgaggggctacagcagccacatgacgtacggcatcagcgaccacaagcctgtctccggcacgttcgacttggagctgaagccattggtgtctgctccgctgatcgtcctgatgcccgaggacctgtggaccgtggaaaatgacatgatggtcagctactcttcaacctcggacttccccagcagcccgtgggactggattggactgtacaaggtggggctgcgggacgttaatgactacgtgtcctatgcctgggtcggggacagcaaggtctcctgcagcgacaacctgaaccaggtttacatcgacatcagcaatatccctaccactgaagatgagtttctcctctgttactacagaaacagtctgcgttctgtggtggggataagaagacccttccagatcccgcctggctccttgagggaggacccactgggtgaagcacagccacagatctgagccaggatgggagtgaatcccaggcggaggccagagctggcagccagctctgcctttccactgccgggagtgctgggggcccagcctggccccctgaagagacagccaagtgtcgtccacatactcctcccagagtgagctctaaccaggctcatttgctctctccactactcatctctggaattagccgcttaaatacaggtttttgttgctgagatgtgagtgaaaccagctagtgtgtcaacagtgaagacctggggacagttctgcgtctcatttctggattcctaccccctcttctagtcttgcccaagtagtcctgccaggcacatgccccatttggcacaggcctgcattcttgtcgtgccgtcctgggcctcaggctgtctgggaggggagatgctcacatttgtacaggctacatagactggtgcaagcagtgctggattccaggagtcttggcatctcatagcttgtccccgtgaggagtgagcagagggtctgggatttctgctttcagcaaaagcagtctgactcagtgggcagaatggaggggcccctctagccaggctcttacgccatggttatgagcaggttgatgagggtccttcggccagcacaaccttcctccctactcacggcatggagtctgactgcatggaagttccagatcctgacagagagaactgggaaggatccaggttcgcttccgttggtagcttgagtcccatgcctccaccctgccatctgaggaaggggtgacaagtggtcaaggagctgtggccacagacttttccagggtggtccttggcaggtgaggtgcgtctgtsccacccttgtcaggagccattgacgacgggccccccctggaccccccgggacctcagagtgggggcaggcagaagggagaaccagctcaagacattttggaggatctggccctggggttcttcagagaacaccctctaggggctttggggacatggcctgtccccacatccagcacttgcctccgccatggtcactcggcagcccttttcccaggagaagacacctctgggagcctgctcagtgcttgtcctgccatcctgtgtcctgggactgagggttactccagttgctctgtgttgcatactctcccccgcaagcctgtgtatgaagaattgtcccctggcttccagcaggccatggctggctgttttgtgactgttacattgtgcaggggtaattattagcgtggcttttaaaaaaaaaaaaaaaaaaaa

SEQ ID NO: 1692 - DNA, 1259 bp, Homo sapiens
cggcgcccaagcggccccagcgggctcgcgtcgccccgctctcctcaccgagccgccaatgggctcaggatccgcccctgacgacgcgggccccgcccctggagacacgcaccgcgcagtcgtcacccgcccgggatcaggaggccgggggcgcccgccggtcgggcctgggcggccgccatgaagctgacgcggaagatggttctgacccgagccaaggcctcggagctgcacagcgtgcgcaagctcaactgctggggcagccgcctcacagatatctccatttgccaggagatgcccagcctggaggtgatcacgctcagtgtcaacagcatctccaccctggagcctgtgagccggtgccagcgcctgagtgagctgtacctgcggaggaaccgcatccccagcctggctgagctcttctacctgaaggggctgccgcgtctgcgggtgctgtggctggccgagaacccgtgctgcggcaccagcccccacgcctaccgcatgaccgtgctgcgcaccctgccgcgcctacagaagctggacaaccaggctgtgacggaggaggagctgtcccgtgcactgagtgagggagaggagatcactgcggccccagagagagagggcacaggccacggcggccccaagctatgctgcacactgagctccctcagctccgctgctgagactggccgggacccgctggacagcgaggaggaggcaaccggcgcccaggatgaacgtggcctgaagccgccttcccggggccagtttccttccctctcagccagggatgcctcgagcagccacaggggcaggaacgtcctgactgccatcctgctgctgctgcgggagctggatgcagaggggctggaggccgtgcagcagactgtgggcagccggctgcaggccctgcgtggggaagaggtgcaggagcacgccgagtgaccgcaggacctgaacgccgctccagcctccacggggaccccagcgtcttccccagcccccgggagctggagggtggctgccatggccgcagccccggccccacacaaaagcctccccggtttgccacatcggccgagggcaggagtgggtgttaggtactggctaaccggggcggtggagatgcctgtctacaccagtcctgtcccaggactccccttctgtggtctggaggttctaggctggcctgggctcttaaagggaggattttgcaggctgtcctccctaataaaagattttcccaaaaaaaaaaa

SEQ ID NO: 1693 - DNA, 563 bp, Homo sapiens
  misc_feature (1)..(563): n=a,t,g or c
ggggggggnttactcacaaaggacagaaatctccaccaaggaagtccccattgtccaaactgagaccaaaaccatcacatatgagtctccacagattgatggcggggctggtggtgattcgggcacgttactgaccgcacaaaccatcacatctgagtccgtgtcaacaacgacaaccacacacatcaccaagactgtaaaaggtggaatttctgaaacaagaattgagaaacgcattgtgatcacaggagatggagatattgatcatgaccaggcactggctcaggcgatcagggaagccagagagcagcaccctgacatgtcggtcacaagagtggtggtacacaaagaaacagagttggctgaggaaggggaagattaagttagaaagtcatttttttanacaacactcanctttgggaacccctgagggattttntgggcccccnccgganttcagnttgggcttnaccagttgacttggnaannnnnnnntnnnncnnnnntnntnnnnnntncnncctnnnncnnnnnnncnntnttccncnnnnnttnnnnnnncg

SEQ ID NO: 1694 - DNA, 432 bp, Homo sapiens
  misc_feature (1)..(432): n=a,t,g or c
aaaccatttgactcggtttgcctccctgcccgttgtttaaaccttacaaaccctggataaccccatcttctagcagctggctgtcccctctgggagctctgcctatcagaaccctaccttaaggtgggtttccttccgagaagagttcttgagcaagctctcccaggagggcccacctgactgctaatacacagccctccccaaggcccgtgtgtgcatgtgtctgtcttttgtgagggttagacagcctcagggcaccatttttaatcccagaacacatttcaaagagcacgtatctagacctgctggactctgcaggggggtgagggggaacaagcgagacctttggggtaatganttaacaccccatgctgggggatgcatggaaggtgaaagggggccagggaaccagttggaagaattttccaatcc

SEQ ID NO: 1695 - DNA, 430 bp, Homo sapiens
cttgctccctctttctcttactttttccttttggcatgtttaattagagaacattttctataagcattattaagaataattgtccttaaggaatgatggataatataagggaaatgaaaataataaagaaaatgctacatggaatctcttattcttgaaccatgttcagacactattagctgtgaccactgcaataggaaatgaaaaagagggtactttttcactgaaaatcccactgttcaaagaaacaaagaaacggccacataaactaaatattcacaatactggaaatgaaccacagactttttgagtaatactccagtgaactcatgtccttaaatgagaagggcagccacagacatctgcccactggaactctctggtggccacatttagggatgcattcttccttacaagggcagccacctgt

SEQ ID NO: 1696 - DNA, 450 bp, Homo sapiens
  misc_feature (1)..(450): n=a,t,g or c
cggagatcaaacaagatttattcaatttggtcaaagcaagaagttgggagagcaagatgtctcaaatccatcttaacaaaaagaggaagcagtgagtttttaggtagctaaggagtaaaggagaggcagtttcagggaagtgagggggaaaagtctgcgtttctttattctcaggtaacatcttgagcaaccagattcctgngtatcagcagctggtcgcaacgtccttcaaggcattcattccttctgcaaattttttcatgaccctcaagtgaccttctcatgtcttctttaggttgggacttggtgagcagttcaggtgatttgattctngtgcagtccagtntgtccagctgnggggttcagtcatttgagactgaacttngagctggatggatcnttcttccaaaggacaactatggtgatgcttgggaggctaaaattcttcct

SEQ ID NO: 1697 - DNA, 265 bp, Homo sapiens
tctggaaaaaacacgctttattgggtagacaaataggcctgatgggaaggcctgagtcacagtgcactggggagtgaaaaagtaggcaaagtgcttgaagcttcccctttgcccccaccttaacctcctggggagcagctctggacactcagtacccagacctgggctcagcaaggcctggggtgactgtgcccctcactcctgctgcctgatctgggcagcccacccttcactggtaagacagaattctcaagggataggcgca

SEQ ID NO: 1698 - DNA, 491 bp, Homo sapiens
  misc_feature (1)..(491): n=a,t,g or c
tgtggtgagggctttgggcttgttccctgaagctttttattataaaaacaagatgaaacatagatcacattgcagtctcgattgtaatgaacctcagctgaatgtgccgacagcggagtatctgatctaatgtggactttgaagcattttgaaatgaaaaaatcttgggatgtttttgtttttaaaattcctgtggttgttcgctaaatggcaaaatagggggccaccagccggacaagctccagaccacctacagaaagaaagtctcaggccattatgaaggccgaaacgctaacagccatcttcttctgggtgcacagccctgcggccatccccaccgtgagatggtagaaagggcgcgtgcaaggatcagcacccagtgtagaaactgacttgtaccccgaaggtaatgcaatgcgattcccaacaggctcattccagatataaaaaatatgtcatcactttcattaggtaatatttaanccaacant

SEQ ID NO: 1699 - DNA, 388 bp, Homo sapiens
aaagacacatgcacacgtatgtttattgtggcaccattcataatagtaaaacattttctttttggtgtgagagaccctcccattccttagtaaaaacgtatttacttgcatgttattattgtccttacaaacttgtttttccctagagcaattgattttgctttaggtactagctgaaggtctagaggcaatacaatttaggatccttgtctagaaatcaatatgattcaattcttttcaagccaaatgatatctgtagactccagttgtgtgcaagccctgtgtggagcctcaagtcatctgcgttagtccagcttcctattcttggaaatcagctttgcttgattggacctatattggcatgttaatgtttgatggtggcctggcc

SEQ ID NO: 1700 - DNA, 516 bp, Homo sapiens
tttttttttttttttcagcaaatgtttgttgaattttattactttttaaacaaattactgagtaatcttccttagtaatcatttctgtaactcagataaaaatagaaatttataagagtttttatttttgttacttgtaaaagtatatttcctagagaaaatatcagcagtggtagagaccagaaaaagtaagtgtgtgtgttctaaacagtgattccaactcaatgtgttcagagaaaacactttgaccctgtctgtgtttacagtccctgctgactgtgtactgtcgtatcctcagccttgttctatttctttattttagctttacagagattaggtctcaagttatgagaatctccatggctttcaggggctaaacttttctgccattcttttgctcttaccgggctcagaaggacatgtcaggtgggaaacgtgtttctctttcagagctgaagaaagggtctgagctgcggaatcagtagagaaagccttggtctcagtgactccttggct

SEQ ID NO: 1701 - DNA, 314 bp, Homo sapiens
  misc_feature (1)..(314): n=a,t,g or c
ttttttttttttttttttgagtgtgtttttaatgcattttttttaaagattaaagtaaaatgtctcaattgtaaaaaatacacaccgggcaaatccttacctggataataaatatctacatcacagtacaataaaatttcttctctataaaatttaaatatggattatagtctatcactatcaaaagaaacactatgctaatatttccatattattaaaataacaggaaaaattacggggcttattttagaacctgangccatagccgttggaaagggcaaagagntttcaaatgtcgatcatcactctccatt

SEQ ID NO: 1702 - DNA, 233 bp, Homo sapiens
gaaagttcagttcagtttattacagtgtcaagtagatttacaactattgcacttatcattctggtgacagaaggccaaaactgaagattgagattttcctctaataaagataggttttcagaatcttcaatataagatgttaaaattataaaggcaaagatatatacctcatgttccattccatatccttcctgctgttgtacagtttgctgcaaatgataatttaatttggg

SEQ ID NO: 1703 - DNA, 361 bp, Homo sapiens
  misc_feature (1)..(361): n=a,t,g or c
tttgcgcactgaacgttgctttattcattggttaattttcctaacagcgttgtaaacccaggccgggatgtcctgagcgttctggcagaggcccgtgcagcctcggccccttccggtccgcgctanctggcctttgccctgagctccctcagcttcgcaagatgagcttcccagacggggccggggctgggctctgagggaaaggcgttcccgcaggtctggggccgccttcccatgttctctaaagcccagcacctgtggttcgttggcggggctcgtgggattggggtaagggctgtggtttcgaggccgtctgtggcgcccccagcccctaagtctgcgagacgccggccccgccttt

SEQ ID NO: 1704 - DNA, 407 bp, Homo sapiens
ttttcatttttcttacttttaatatctaagataaaaaaaaaaacccaaccaccaaaacaacccatttgcatgtcggcgacacgctggtctcgggctccctttctggggctgtcctcccaggcggctcccaggtcctcatccagggaagagcccagcctcggccagaagccaccgcggcctccagttccgcaccgtgacaacctgggacccagcctttcagaaaggccaccaggaactgtttttaaagcatagggctgcactaggaggaagttttcccttgaggctgagagttatttcttgtggagaaatttcattttattgcctagtcccttcaggaacttattgacaccgctgtgctctccactggggagtgtttccagatactcttggggctcggacctcaaaca

SEQ ID NO: 1705 - DNA, 371 bp, Homo sapiens
ttccgcaacacacacaaagaccggcatcagatttattattatctcttgttaaatattttcgatcttttctcagaacatggtctagaagggcatagtagtttttttcccggtacatgcgtgggtgggtagtgaggagaagggagcagaggtgcgcgccaggagccaggctggttctctgcagagaacaacctccagatcctcccagggaagcccgacacgccagtcccacgttggacgacgtgcagaggaagggggaggtccacggggacgacgaagatgaccttatacgtgcactcggcatatcctggagtaacgcgcagtgggggaggtggggaggggagggtcggccgggcaagcccctgcccgctgcg

SEQ ID NO: 1706 - DNA, 384 bp, Homo sapiens
ttttttttttttttcttaaattatatttattatatgaaatacaaaatgtggaaaatttggaaattacagaaaaaccaaagatgaaaattacagtgactttgttccaccatacaaagataaccactcaacattttttagtatgccttccgtcttttttatctgctctacgtatacaagcatacacccatattttaaaaaacaaaattgaaatcacataacatgcactatttttacaaccttttaatattcaaggagcatttttctttcagtcagatgttcttttacatgacttttaatgtctgcgcggtactccaccatctggatggagatacaataatttacttaagcaatcccctattgcaaactttcgttacagcagaaaag

SEQ ID NO: 1707 - DNA, 342 bp, Homo sapiens
ggaataatgtttatttaaagttacatttcagaggaaactatcttcaggagggcatgaagcctatattggctactgcaaaacaaccagaagttttataaaatatttctgatttaaattactaaggcactatagataggcacctatattacatacaatcttcaaacatttttaaaagttgaaactatgtattagttgatatctaaaatattaaagcccctgacaaactgaacggctaagaacttgacaaaatgagatgcctgtttcaatgattctgttgccagcatattaattaaaatacaatttgagattctaaattacacgatccagccttagtccagggac

SEQ ID NO: 1708 - DNA, 478 bp, Homo sapiens
ttttggggtcagggtgcctttattggtgaatgggaatgtgtgggttggagctcaatggccatatgtcggcacgtccagggtccccaaggcagcaggttccaaggcactggggcagcccacgccgggggaggcccctgagcagcaggcaccattctcgccctggcagggcctgccacttggggagagcggaggctggccaggccttcagcaaagctgttgcagctcaatcagctcctcttgtgggacccggaggctttctgccggtagatctcagcggtgaagggctcttcgtataggagagccattatgtaggtgagggccaccagcaccgtcaggagtaggcccgtgggcgtggcgtgcatgatggcccagccaggtagttggctgtgcttccccagtacatggggttgtccaggatgttgaaggggaacacggtcactctcgcctccttgaggatcccgaagtaatcacctaggaa

SEQ ID NO: 1709 - DNA, 359 bp, Homo sapiens
tttttttcaccgtgttcctggagctgcccgctgccctctgccctgtccgtccccggcagagactgggagccggccctcagcatgaccaccgaaactttatttacaacacgaggctggagtaagaggggtgggatggaggacagcagcagggccgacagaccctacttctgctcccgcctccagacgatgaccatgccgctgggttcactggaggccagtaggctctcgtcgcagttgaagctgacatcaagcacaggtgcactgtggccctgcagcttgttgacagcagccttggccgcccgctccacatcaaagaagtgcacgcacatgtcctcactgcccgtcaccacgcaggcccc

SEQ ID NO: 1710 - DNA, 343 bp, Homo sapiens
tttatttgtgaaacgatacaaattttattaatatacaacgggaaatttgacagtttagggaatcaggtactcaatcttttgattctcttctgcacttatggtatatgagaagccagattataatcacatagttatttgataacacaaatatacaaagaacaaggagtgctgattttataatgcagtgttcagggacatgaagacttgactgtgtactcattgggccatgtttcttaaaatgaagttcaagagtccctcaaaccagaggtacataaagcccaggataaatatgacacatctgcctagggtaccaaagatttggggaataaaaagctaaataact

SEQ ID NO: 1711 - DNA, 411 bp, Homo sapiens
ttttttttgacattttcacagggtgtgttttcatttgcctttgcgactaatgggtctctggaacgttccatcctggccggggaggtcagggcctgggcggccagggccagtttcgagaaagcaggttttcctttgtggcatgcttatttcaagcaccattttccctcctggttatacttgaaatggggctcggtgttgggaggtttcaaatgtggacattccgggcaaggagcctcatgaactctgtggacattcaaggggcctcatgaactctgtggacattctgggcaaggggcctcatgaactctgaaggttgagcttggaaggacggacacaggtcttggcagcctgagtgggtacaaacgctgatttttctggagtcagtcctctcctgctgatgggctgagagag

SEQ ID NO: 1712 - DNA, 398 bp, Homo sapiens
tttttaatactgctggcatttattttaaaaggtattgagatacaaaaattgtatcttatcttgtaaaaaatatttatttatcaatctttctggcactattaaaaatgtcccattttcactagacagaatcacaaaggtatacccactcaatcataacaatttgttttctatggagcaatattcacagatcctgtgaataaataggtgacaaactccaggtggccccctgtagggtctgttatatttagagttttctggaacacacataattatgaggtttggctctcctacagtcttttgtttgccatttcccttgtctttgaaccaaaacacagctctttccaagcttggagcgtggagagggccctcttctcccattggtgaaggcaacaggttca

SEQ ID NO: 1713 - DNA, 494 bp, Homo sapiens
tgaaacatgattaattttaatgtttatccaccagcagaaaaaatttaatatgtaaatccaccagcagaaaaaaaattaccaaaactaacattttacagatttttagtatcaaagcacaatacatttttcatagaaacaaatatatcaccattataggtaccatgatatggcaatatttatatacaaggtcatttaccatttaaaaaaaaatcagtggcaatggtaatgtaatacattagttcatctttgttcaactttttgctattatacttcctggcctgcaggagtatttgccaggatacaaaagaaaatatgtgacctcaattttaacagtacatagaaagctctggctgtccatgcttaaccctacatttactacatgatcactaggaatgttttcataccaccactctgactttattacatttatttttaaggccattcccaaggaatcaaacattttaacagattcatttggatattaaaggattatt

SEQ ID NO: 1714 - DNA, 310 bp, Homo sapiens
cagttaagctattttttttaataaattgaaaagatgttctgtacaacataatagagtcataggaaatcaaaagcatatcagtaacaacttttagaaaaagaaatgaatgataaagaaaaacagatatgacctctcaatatcttggggaagtaagttaggatgatgtttcattcacgtcttaatgatataaataaaggataactctgtgtaagaagtagtgtttgtatctggtggtaaatttagttaaaaagcataatcacaagttacaaaaactgtaattacaaattacaaagaagaacaggcagacaat

SEQ ID NO: 1715 - DNA, 315 bp, Homo sapiens
ttttttttttaaggaatgaactttttaatgtttttctgtttccattctaacaaacatgcatttttgccttcagaaaatagagtcaatagctgtgcagagttgaagaaaaacgtcctctggtgttccctctgcatttatcttgtgtagctgtgtttttgtctcgtagtaggcgatcacggggatggacgctcggtagtaggcttctaggcgcttggcgatggtcttggtggtgtcgtccacaggcaggctgctccggctccttttgagaaggcggttggtcatggtgtctgccgagcagtccatacagatcaccaa

SEQ ID NO: 1716 - DNA, 415 bp, Homo sapiens
tttttttttatttcaaaactatatatatgagatttatttcacattttctacctactcagtcatgtgagctgttgctacatttgtgaactttctgacaccaagtgacaaatatccacaaaagatcatttacaatgtagacatcactaaagtctagatttaaaagtccagtgaaaatggcacacagttggcttacagaaataaaaaagtacaatatatttgaaatagtagggtttttgttttccatttatgcctacatcatggtgttacctatggatatgttatcaacgatattgatatcagatactatgacccatgacatttagtatttttagcaataagaagcacacttaaatctatttcaaaaatatgacatgttaaattcttaggaaagtatcaactttacaaagtatcatac

SEQ ID NO: 1717 - DNA, 315 bp, Homo sapiens
ttttttttttttttgcaacagagcagaaaggatgctttatttgcaaaagagtggtgaacatctaaaaagttgacattgtatatgattacaaagtaaagagtactcttgtgagagaagttacatgttcattgttaaggaaattatatgtaaatcacaaagatcatggtctgtgaataatgtgccatatctcacaaaatatggtcattggaatcttattaaaattatctacaggtgacttcagtttccattctccaccctctgccttaagatacgaagccttgacatgaccacatcccagtcagcataagctccttc

SEQ ID NO: 1718 - DNA, 495 bp, Homo sapiens
gcggccgcgacctcaaccgaagctttcccgaccagtttagcaccggcgaaccccccgccctggacgaggtgcccgaggtgcgcgccctcatcgagtggatccgcagaacaagtttgtgctttctggaaatctgcatggtggctcagtggtagcaagctatccttttgatgattctccagaacataaggccactggaatctatagcaaaacctcagatgatgaagtatttaaatacttgtcaaaagcttatgcttcaaaccaccccataatgaaaactggtgagcctcattgtccaggagatgaagacgagactttcaaagatggaatcacaaacggcgcacattggtatgatgtggaaggtggtatgcaagattacaattatgtgtgggccaactgttttgagatcacattagaactgtcttgttgcaagtacccacctgcttcacagcttcgacaggaatgggagaacaatcgtgagtctttgatcacattgat

SEQ ID NO: 1719 - DNA, 441 bp, Homo sapiens
ttacaataggaaatttaatgaaattcatacttttaagcaatcatttcagtaaaagaaattgttatagatgatgtgtatgtatgacgatagattcagaactggttagagttgaatttcagcattacattttaaaggtatttgccaaaccctaaagctcattttatttcaagtgaaaacatcatcatgaaaaaagtcacgtcacattgactaacaaggttggtaacaaatgtaatgatcaactttatcatttaacatttcacaagactttttattggtttctaaaaagcagttaatattttaaggtacggtatataaacaaaatagccatatctgatttttggcaacatgaaaatgccaatttcctttcaaaccaattcccggactacagctacaaatgtggtcaacaacgtcatcctggagtaaaattcagctcctgacaca

SEQ ID NO: 1720 - DNA, 378 bp, Homo sapiens
tttttttttttttttttggtcatactacatttcactttattattattaacatttatcatacatggttactattccaatctttcatgcagacaaaaataaacaatataaaatacataatgcactttgataattttaaccatacataaaatatggagtaatggaagctatgttacatggatattttacaaaggaaaaaaagatgacttttataataacacatccagatgaaatttatcattaaattttggatttcatatgatgttaagtatggatatattcaaaacaattactatttatagaaccaatttgatattttgtcatttaaaataatgaatactatgtaaatgagtacttataaaaatatttttaggcaaaaag

SEQ ID NO: 1721 - DNA, 308 bp, Homo sapiens
ctaaatgctttaatttyytstcacaaatatttctgcatctctcagtcccttcttgttggaaaaaggagggctagtsatacatttstyaatggcacttttaaaatgtrgctttggtatatagaggtaacactgtacttctyaggtatgtyaataatammtymmggttataatggttgccatattagagaaaatgaataagcattagtctcagcaaaaacaaaaattagtttggmagtagataagctagacatatcamamctgcaaaammmtagcttcccagatagcgcttctactatgctgcamwtycc

SEQ ID NO: 1722 - DNA, 325 bp, Homo sapiens
gaataatctgtgctttaatggaaaaatgaaacattaatttgtttagtttctcatacaacatgtttactaaacatttcagtgtcaataattycttaagattgtaacatttaaccttgtattggrgctaataccaattctagccatgggrgtatgttttggmctttytgaacaattttgrgtaaaatgaatgycactgtctttaaattgtacttggrgcaaagacaaagaaacatcagctcattctttccaactaatagaacatttaatgatgcaattythattacattattccaaggctattatcataatgttaaatattcttatt

SEQ ID NO: 1723 - DNA, 320 bp, Homo sapiens
attctcacctctgatttatttyttacttcatataagatacagtgtaattcatttttactctctctagrggtttctcccatctaaacagtacaaatcttttatggacagrgtactttaaaaatcaaagtgtcagagtctatgatttgtagtttcatgtgaaaatactaagtattctggattccccaaggttaaattatattcagtataatycbbggtaaaatatattybgtatttbavgtttttggraactgtttattcatatatggtgtacatacataataactaaaagcaggaatgtyttatttcattaagatgtatag

SEQ ID NO: 1724 - DNA, 263 bp, Homo sapiens
  misc_feature (1)..(263): n=a,t,g or c
ggttagtacacaaatagtttatgcagtaaataactgtggttacagttcattgttgtcagcaatacagcattttccatcacaattataggtgaaacaaaacctcatgaagtagtcatagcacattcatgctagcgagagcatattacaaagcaatgcacgtgcattataggggcagacaaaactggggaagggctatatttncactcacctctggttaactttgtgtattttgtcattaagacttacattatgtttgggtcaaa

SEQ ID NO: 1725 - DNA, 180 bp, Homo sapiens
  misc_feature (1)..(180): n=a,t,g or c
cctactgttagttttatttcagaagcagtgtgaagaggtacatagctcgtgacatgttgcttagactctccttttctcagctctgcaccctgttatgtctttagctcaaaaacagaaagctctccctgctgtagctgagaccaccctccttccatcccctccatcaagaagctncccaaa

SEQ ID NO: 1726 - DNA, 229 bp, Homo sapiens
  misc_feature (1)..(229): n=a,t,g or c
aaagaacacatttgctgtttttattggtgccttgcatggcagtaatactgaaaanggagaatgcaaaaaaataaaataaaataaacaaaaaacaaaaacgaaaaacaggttggtggcaacccacatcttttttttaagagcacataaactcctgttttatttttattgtggcatgaatgataacataaaaccaaaancatgaaaatatacaacttatattacactatgt

SEQ ID NO: 1727 - DNA, 316 bp, Homo sapiens
gagtgctgtagagtttaattgtaagacaaaagcactgctacattatactttaaacataagtcatctttcagaaggaaggattcagtgcaaattaaaaccctatgaaagcccaactgtaaatttcatatgaagactctagaagtaaacttctagaactggaaacacttggttccaacagaatttgcttggggagaatatgtcttgaaaatgttaaatggtacagagaacatcatgtttaagtcaaccagatactaaaaaaagacatgctgataggtcttaatacataaaactaattgattagtagtagcatgcttta

SEQ ID NO: 1728 - DNA, 294 bp, Homo sapiens
  misc_feature (1)..(294): n=a,t,g or c
gcgaatctgttgatttatttacggctcggtgagacgacgctggacgctggttagggtaagggttagggcaagcattagcagcaggggcatggccctgggaagcacctggaccccagaacataagacaggagggagagatgccatccattcagcgggcacttatgcccacgaccagctgagccagaccagcattcccatttcaccaccccttactcctcaagatgcaaatnaagctcagggctgggcggaagctggcagggctgtccacagggaggacccccgtgtgtctctcgg

SEQ ID NO: 1729 - DNA, 345 bp, Homo sapiens
aagaggttaactcattgtttttatttggtaatcagaagaacatacaagtacttatgcattactagatgctgggggaaaattatacattgaaggactgtcaggctcatctgtgcaataaagatttacaataaacacatcattaattttcctgagaacagctcagtatactctgttttacatgaatccttatgatttaatcttgtatttggagatatgatgctatggcatttggataacattggttaagcagcatcttagagaacagaacactcttcctcagaatggatggccattcttttaccctgtgatgtacaaatgcaaattacaacctgcattttatctgcc

SEQ ID NO: 1730 - DNA, 325 bp, Homo sapiens
  misc_feature (1)..(325): n=a,t,g or c
aagatattttacttttttnctttaatcagcacatttcttttgataaatagtcatgagacgtgttctgtgagtcactacaattctcacttggcacttggaacagtcgtgttatataggtttaccataactctcagaacaggagtatattacaaacaagtggagtagaacatagagaatacataatttgttctaatattcctcttccttagagccttcaaacttaaaccaagttgaaaaaaaaagtttcccaaattgaaaacattgcctatggattatctacagaagagaggaaaataagcaaccattttgattccacaaaccaagc

SEQ ID NO: 1731 - DNA, 215 bp, Homo sapiens
gactattcatgttttcaaacaagtctctatgtacagtaaatatacataaagttctaataaacaacagtgcaatgcttcccaaagtcttaagcactagtatcagattcttacaacacagaaaccttttagtttgccaaatgattggattaaggatacagaatatgtcaaatactcacttgtggctttccaggtcaccctctcccgccaaacaaaca

SEQ ID NO: 1732 - DNA, 424 bp, Homo sapiens
  misc_feature (1)..(424): n=a,t,g or c
tttttttttncactttttgccgaacgaaatttttacctcacgttcatctcaccaaagtctcttcagaggagcctggtttacagggtgatgaagctgatgatgatacagtagtgtacacactgctaacgtgaatcagactggaaagcaagtcagtacttcagagtagccccgcagaaaaagagcgatactaagccttcttagtgtttcgtttgttagtagtgatgaagagaaaactgcttggaagcttccatgggtcactagttagggacagagcagcacaggtgatcagacagggctgagcaaacacctgactgaccaacagaaccagtctcctcaggcagcttacattgcagtcaatacagagggttatgggaatttattgatttctgcttggaaataaacaaggttaaggcaaattagggag

SEQ ID NO: 1733 - DNA, 409 bp, Homo sapiens
ttttttttttcatgaaatgacatttattgtttaaaaaagcgtgagtctggaattagatagtggtgatggttgaacaagtttgtgaatttactaaaaccactcaattgtacgcttaaaaaaaaaagcaagcttgagctgcctaagtcccgctcacacacactggacttgtactaaatgctcaacgattccattctctcagactatggaacattctgtcacatttttttccttcaggagatttccctaagaagagctgtttgcaaaatattgcacttaatttgaatccgggggacctgatgtctcctggaagaaaacgtacacttcacatgccttcctgcctgcggcagaatgggcgggagtgggtggggacaaggggcttcaacagcagtttccatggaacattgttttc

SEQ ID NO: 1734 - DNA, 470 bp, Homo sapiens
  misc_feature (1)..(470): n=a,t,g or c
ttttttttaatnagaagaattactgggaactagcttggcactgttggacacagtctttgtctcagctactcgagaggctgaggcaggaggttcgctcgagcccagcctgggcaacatagcaagaccctatgtccgaagaaaaaaaaggcaaaatcagaattaccagaactgatttcacatgtgtaggtagcagatggtggccatgcaattcaggtctgtctgaaggcccccaggctgggttacaaaactgtgtaaggccagtacaaggccctgacaggttcccaagtggctggactngaagagatgccaagttcatggcctcctaacctgactccacccaggcactccctggggcccagcgacgttccctcctgaagccttgaaatttcacctccacctnaggagggccatctggctgggggattagggtttttggcaaaaattgaaaaacattcatttttccagaggca

SEQ ID NO: 1735 - DNA, 350 bp, Homo sapiens
  misc_feature (1)..(350): n=a,t,g or c
aatgagggnaagggaggcaaactggactagaggggctaggaggaggcaatgctgggaaccaggtctccccaccacctgcgagtaatgtcgtgcaaatgaaaatgtgatacaagaactaatggggactaactcctcagtaaaaaaagaaacacaggttgagagaagagtgatggaacaaaaagaaatggaaagggatagcagtatgtaatgatacgctaattaacatgctgggacgntcccaaagaccttgggattcttagggaccaagtgggggccagtctcagagcctcccaatgggntacaaaggaaggatgttaccctaagggaagcctgggacaggtgcttgttgt

SEQ ID NO: 1736 - DNA, 461 bp, Homo sapiens
  misc_feature (1)..(461): n=a,t,g or c
tttttttttctattttaagtgcaaatatcataagggaagactgaacttcttttaggagtataggacaagcagcaaggaggtgggatggctggagtagagtgaggaagagcaatacagagataaagtaagaggaagaataagccgggtcacatagatctcacagcaaagttttaggttttcttttgagtaatatgaaaagccatcggagggttttgaagagaagagagagacatgatctgacctacattttcaaaagcttactctggctattgtgtggaagtagaagcaaaaagtccctatggtggttgttgcaaccatcctggggacagaacgtggtggnctttgaaggaaggcagtggtagtgatggtgctgatgacaaaagaagtccagatttcaggatgttccnagggagccttttntaaattgaaaggacanctgagggcttcccaagttaaccgag

SEQ ID NO: 1737 - DNA, 307 bp, Homo sapiens
  misc_feature (1)..(307): n=a,t,g or c
ttttttttacatgagatattcaacattttattataaaacaggctttctgttagatgattttnctcaactttaggtgttctgagcatgtttaaggtaggctaggctaagccatgatgtttagtaggttaggggtattaagtgcattttcaaattaccatatttncaacttacaatagtttcaacgggaggtaaccccatcgtaagtgggagggaacatctagtgcctgggcacagaagccggttctcaataaatataactcttctccatcttcttcaaacctcagggccagggtttcagtgacctcct

SEQ ID NO: 1738 - DNA, 224 bp, Homo sapiens
  misc_feature (1)..(224): n=a,t,g or c
aaaaagctacataatatgttatttatttgatattctggagaagtccaaacacacaaagtgattctgtatttgcgagaaatttaaggagatgatgaaaatgggtaaaaaatagatttaaaagggtgatgaaagtattatgtataatattataatggtaaatatgtgatatgantttgttgaaatcaacagantatacagcataaagggttaattccanttcacaa

SEQ ID NO: 1739 - DNA, 424 bp, Homo sapiens
  misc_feature (1)..(424): n=a,t,g or c
acatnattatatttgagaagatctttctacgcagagactgtgattgcttaaactgtacacaaacacctggaagaaaaataagagatgtagtcaatcacttgggaattttgcctgcaagaagccacacagctatatgcctggcatcatgtaaatgtccagatccaggagcccatgagagaaattcgtaaagttctagatgtgtaggtgtcatgtagataaggattggttcatatcttcccattttaacagtgcttccagtttcctgtcaccattgagtgacgctcattttacagtcagaactgtatgccatggacacattttatgtgtaacccatgtgggcaatcgcttcaagtcatttaggcagggaggggaaaactccctaagcctctaagntcagggttttcccacccttttggaccaggga

SEQ ID NO: 1740 - DNA, 384 bp, Homo sapiens
  misc_feature (1)..(384): n=a,t,g or c
gttaccaagacacaattttaagatcaaacaagtgtcaaggtaggccatggcttgttggcagtagtaggggccctatggctatttccaggtatgggtggccccttttccttggttatctggggaatctgccacagcagacagcaaaaggtaaaaagcatccctttaataactacaccccactccagcaattgaggtttattcaggggtgggtcaaagtagtacaagacaaaaatagcttagtgaaatggnttagaatccagactgaggtgccagactgcctgcatctgaggtctcaggtcccaccatgtatggaggccgtgtggaccttgggggtgaggttactaggcctccccggggtttcaaatcttcttcacctgtaaaatg

SEQ ID NO: 1741 - DNA, 332 bp, Homo sapiens
  misc_feature (1)..(332): n=a,t,g or c
ggaagtgagagtgtggtgaattaagtgatgagtattatgtacaattgcctttacaaaaaacgtatttttactgtggaagaaattcatgcagagatgcctgtggaaaagtatcaaaaaaaaaaaaaaaacacctttaacactatgacatactgattataatatactatgatatgtattattacagcattacttacacattctactttagggcaatgtaatctacttctgaatgaccttgttaatttttaagggcatcaggtggcatcaaggggcaaagctccnttaaaataantattaaaaacaggaaaggcttngctaatttgtgggcctag

SEQ ID NO: 1742 - DNA, 494 bp, Homo sapiens
  misc_feature (1)..(494): n=a,t,g or c
tttcaaaaataatataggagaagagagtgggtgaggttatagaggaaacaagattggccatgagttgataaccagtgaggttgggtgaggtattttcatgaggtacatgaaaatttattgcactgctctgtctgtatttgtagagattattaaatttccataacaaatttaaatgtagtaaaaacaagcaagcaaattcctggtttcccacaatatgggtattgaaataaatttaaccctaatcgaaccagtcacagtggctcacacgtgtagtaccagttactcaggaggatcagctgagcccagaaggttgagaccagcctgggcaacatagctagatcctgtcaataaatacatggccgggcgcagtgcctccatgcctatagtcccagcactttgggaggcccgangcaggcagatcactgaggtcagaagttcaagaccagcctgaccacatggctcgtgccgaattcttggcctcgagggcnaaattn

SEQ ID NO: 1743 - DNA, 464 bp, Homo sapiens
  misc_feature (1)..(464): n=a,t,g or c
tctactcaaactataagcttttattattgtattttacagatcattcattcaggacatgctgcatctggggttggcatcatttcccttttgaatgacagaatgtgcataaaagtctcttgcccacgctgaactcacacgtgcccggcagaaggagctctcacgaaggccagctggatgtgagcttgctctggcagcagcagtgctgtccttgtttctgagctgccacctattcactggagttaaggtgggtcaaagctgaaatttagcttggaatttaaagtttctaattttatacttttcattgtggtctggtcagattttaagtctgctttaaaatcaaaaggtcactcagtcactctaatatggatccattttngaatatggaaatttggttatttacatgctgtacctcaaatcaaagaaaagcacgcctcaatatcacgcgtagggaaaaactaggaaaa

SEQ ID NO: 1744 - DNA, 223 bp, Homo sapiens
  misc_feature (1)..(223): n=a,t,g or c
tttttttttttggcgtttttatctttttgtattaaaaaagtagtaacagacacaaatatcaaaaacacaaatgccatcgnagacgggtacagctgagaacgcctgggtcccacctgaggggcagcaccagggactccatggtccaccaacctcccccactccagagcagctaggggctggaacccccgggtcctgcttgggcctcaggtctcctcccatctgg

SEQ ID NO: 1745 - DNA, 372 bp, Homo sapiens
  misc_feature (1)..(372): n=a,t,g or c
cattaacttgacatctggtaaaacaaaattttgcgtanatctaaatcaaaacaaanaacagacatgacactttctcagttaaaatagtttaataaaagcaacaaaactgtgctaacgatcagaatcaaaaatgagatattaggtagacttataaaacaaagtatagttattttttgatttcaaataaaccatgtgcaaaattgtaaaatgccaatgtgtctgagaaaagcattaacagtccttttagcaatttatatataaagatgtttttaaagtgccacagcttaaggcattatattttaaagtttaataaacatctaatttcaacatctctccaagaacagacttcttctcaataagctataaactatt

SEQ ID NO: 1746 - DNA, 489 bp, Homo sapiens
  misc_feature (1)..(489): n=a,t,g or c
aaaattgtcaagatatttattgtgttaacatgtgagacatacaatttgctcagtaaaaatagcacatgaaaaaatattataagcttatattcataaagaaatgggtatgttattacctctttttcttgcttgctcaggactattaatttgacaaggttggaatgtgcacagcaaagctggagacaccacccattttaacactgaatcactataccatgaactgacaggaccctgcatgaaggatggaaaactcatacccnaaagtcnaaggatccacaccaggcagccatgggaggggggggaaaatggacctataatggatggctaanccggcattttaattttccggaagtggggggggaaaccaggggccatggggggngtggaataaatggggttggaagttcccagggcccntaacctggtaccaancccttaagggtaaanttaaggttttaacctccatccaattaaaaaaggtgggggtta

SEQ ID NO: 1747 - DNA, 479 bp, Homo sapiens
aaggaggaaatcttgtcatttatgaaaacatgggtgaacccggtgcacattatgctgagtgaaataagccaggcacagaaagacaaacactgcatgatctcacttacatgtggaacctataaaagctgcccttatacaagtaaagagtcaaatgctggttaccatgggctgggaggagagggactgggcagatgtgtcaaagaatacaaaatttcagttaggaggcataagttcagggatcttgtacagcatggtgactatagttaacaacaacgtattgtattcttgaaaaaaaggagtgatataggggtaccagagatgggcaggatgattgaagatcacagtccagccttgcaggaccccgggggacagggcgggcactcagaggttggacctccagcaggtagcgcaggcgacactggctctcctggtagatgaggtactcgctctgggagaatgttgagctgctgaaactctgg

SEQ ID NO: 1748 - DNA, 446 bp, Homo sapiens
ttaaccagaaaagaatctctttaatatcttgtagccgtaagactgatacaactgaaaacataaccctaaatttgattctgcaggttgcagttacaacacaagttgaagtcacagccttgccggaactcttatgtaaagtttagggcattggatctggaaggagtgggaccctgagaatcgtaaagggatatttgggtggacttgagcaaatccaagaaccctgaactgaggaagagcagtgtgagtacatggtcaggggctccatgaatattcctgcctgcaaccccagcttcacaggcaattcagccttctccacactggcccggcactggctagctgctcaccttatggctcgaggcaggacccccccgcagccttacagctggagtgggaagttgctggaagttgtatctgtttattgcttttaaggctgtcatgagcagaca

SEQ ID NO: 1749 - DNA, 566 bp, Homo sapiens
  misc_feature (1)..(566): n=a,t,g or c
ttaaaatgttcttttttggtcagtagtcttagtaagagatttatatgaaaagaggtaggagtatataaatagggtgttaaatatatcatgtcaccaaaaaatttacccgagaaatagaagtttaaaagcaattttaaaaaaccttcaatcaacaatatataaataacttaatctgaggtaagagggaaaaatgccctgcaaacactttagaaaaacacatctctgccacactacagaaatagacctttaccacatcttctggaatccccagttccctccatctaccaaagattttgggcaccagaactaaagattgagaatctctcccacccctaccacttccaggtaaacacaaagttcatgttcagccagggctaaagtaccaagaaaactggacccactctccatcccaccccatcctaggataggtggggccagggcagaaatcatggaatgctcaggactccanccctcccaagtgcactgagggaaggttctggaactggggcttcctcccaacaaggcantcacctcctctggggagttcattcacctcctctcccttc

SEQ ID NO: 1750 - DNA, 438 bp, Homo sapiens
gattaactatgtgactaaattatattcaaattttatgaacagaaaatgatataaatgttatcagctaataaagagattatcaaagagtaagcaaccaaaacaagtaggcaaaaagcatcagagagtaattaatacaaagatgatgttgtttttctggatttcataatgtttatcatagttgtcaacttttctcattcaaaaaaacccttatttttatacctaattttaattaaaaatttttcagtttgtattaaagaggactccccaaattatatgagtttccaacttcataaaacctaaatctgtctttgttcatatcagataaaaataggccacacagactgccaagtaggtacagtcttggaactgtctgtggtgctggacccaaggttcacttgggctctctccatgggtacttactggcccaagccaaagctg

SEQ ID NO: 1751 - DNA, 382 bp, Homo sapiens
  misc_feature (1)..(382): n=a,t,g or c
ccgagtgaaaacagtctgtttattacagcgtctagaggtggggatgcagaatgaggcggtgcccagaggaaggggcgcctcagcccagggncgnaccgtgacaatgcgcgcaatccaaatacagttcacccggaagacacggcagagctcccacgttacaaaggctgacacagaccagcagcgtgttgtgttgggaggggggtctgaccacgatggcgagggcagtcggcggggggtggggggcctgctgaccactgaacagactgaccgcatcctgggggcaagataaattaagggggaagtcttaaataagtcactgtgcgtgcctcatgggcccgaggagggggtatcctaagtttttagggttcctatcaattcctga

SEQ ID NO: 1752 - DNA, 400 bp, Homo sapiens
  misc_feature (1)..(400): n=a,t,g or c
gagtgtaaattcaattttagcagattaggttttattttaactgcatcgggaaaaccacatagataaaactatcttattgtttatcctttacaattttttaaagcaaaacaaacacaacagcattttatttatttaattgtagtgcatccgtattttcacatattggattttaaaaaatctctgcttacaagaagaaacgaaagcccaaacaagaatgtagtatgtaagcgagtacaaaatgagatagagtagaaggcaaactgattacctaagtcccaagaagtcaggaaacaaagtgtaactcagatccaagcagggttaaccaggaaaggctggcatttcggtgngtaccnggctngctttcttcagcaactgcgctgntacaacattcctgggggca

SEQ ID NO: 1753 - DNA, 230 bp, Homo sapiens
cagtaaaaactctttattcattccttcatgtgacagttggccttgagtagttacaaagacagagcagttcctgcctctcagaattctaagcagacattccagagctcacagatcagtgtcccaccagctgctaccctggaagcttcagggagatggggagcctggagtaggggggtgctgcaggaacccccggcaggcagtggggccaggcttcacaggcacccagggct

SEQ ID NO: 1754 - DNA, 434 bp, Homo sapiens
ttttttttttttttgccattagaaatgcttttatttataaaagaactacttaaatataaacatctctacatagaaacactcttcacaaaaggactcttgcattactgccttctgaccacgaccagcagacactgtggatgtaaggactccacggtgtctcccgactcccaggattttaaggctaaatgtgcacttggaggaacaggggctgtaaggctatttcttccctttcttttaaaagacaaatttcatggtttcccattccaagataggcttcatagctggggaagatcttaagattcttggtctaaggggtaagcaaatatcttcctgagactgggaggtatgatcaggcacttgggaatctggctttgaatgtcatctctgaagcatggaagttagtggtgaaaaaaatcttatttccaagtctagga

SEQ ID NO: 1755 - DNA, 453 bp, Homo sapiens
gggtaacataagacatttattactttatactaattttttcattcataaaaaggacaaagcacagtcctatactactccattgaaaaaatgataaaaaataactaaaaaatcaattcaatatttatcagtatcaaataaaactactatcacctttcctgaaatacaaagaaacaacagatgtatctatacctatataaagtttaattcagaatcttgcgtcttaaagcagatgattattagttagcttgacaacagtttaaaactgatggtcccagttaaatctgtacaactgtatgagaaaatgaaaagcttcgagttatcagtgtacgagagattttaaactactttatctctgtcagaaattcaaaactaaacaacctccaaagtctgttttcctcttacctttcagaaccatttcatggaaaatctaaccagttttgctcgttattatca

SEQ ID NO: 1756 - DNA, 519 bp, Homo sapiens
  misc_feature (1)..(519): n=a,t,g or c
gaaacaacaacagtgtaatctttaacagggatgttaaaggtaagaagtcaggaagataaaccaaaatgattgagtatgataaagaattttgcatggcgattaaaatagaaaacctataaatgtagaaaaagcaggtctggacttagcaaagaaacaatatagtttggagaaggcatgaaataagttcttttcatgttcactgctggtcacancataacagagagtgatgtggagagctttgggaaggtttcacgttgagttacatcagtggtcaacaatggagcaacaagactccgtagaggatgccaccctgggagaattgcaagggaaaggaggctgaagcacaactggtaatagccttcagatatttaatggatatgcaaataaagctctgattaattgtattttcacttattatatatcatctttggacctttctaaaagtgggacnctagaaaagatatactgaaactccaaaagaatacttcagctcgagttgaatggattcaagatgttgtt

SEQ ID NO: 1757 - DNA, 462 bp, Homo sapiens
ccgtgaaggaactattattactttaaaagtgagggtaatttacatatggggtgtatatattctaaaaatagtaataaaagtaccttttataagcaatgttgtgtggcttgtagaagaaagcagggaggaaaaaaaggcaggcaaaactagtctaggtctaggccctaaaaatgagcttccttcccacttgactggaaacgcccatgtgatttctaggctgaaaataggtaggatttaacgagtaacctagttcccttctgtctctgatttctgatcagctgatggagctgctagtaagaggggccgatcatgctcccagacgagtcctttggcctcttgctctccatcccaagcctgactccttcagcagcagccccctccttctgtgtccatctgatgcaggcaagcaggagcagtaagagggcatcccatgttccagttcaccttctatggggtgactag

SEQ ID NO: 1758 - DNA, 202 bp, Homo sapiens
tacagaacaaacgtgttctttactgtgaagttcattatgaacctgaatccctgatcatttaaagcctattatccaacttatgcctcaagcagcaacatttttgtgttcaacaatttaacttactacacacaccttgtgcaaaatcacaaaccttctcatacatttatgagcttcagaatgtaactgggaagtgtagcacagc

SEQ ID NO: 1759 - DNA, 417 bp, Homo sapiens
  misc_feature (1)..(417): n=a,t,g or c
aactattcttgttttatattttattatactggaacagctcgtgtcctctgtctcttgcctcggtgcctgggtggcttgcgcccacnatctcccccctttttattaactagaatcgccatcgccatcattgcttgttgttgacttcggacttggtttcggactccttagaggcatctgcagactaaaaggagacaacataagcataccaatattaataatgccagtaacaacaatgatcctctgacgggtttgagccatttgaagggattaaaatcagggtaattgtttagttatgccttcaaaaatgtgtgagccagggaactgtgggataaatggggcttgtgaagcctccaaagatttgctctttaaggttgtggaaatatcccaagggttaaggttatcatcccnggggttttt

SEQ ID NO: 1760 - DNA, 381 bp, Homo sapiens
  misc_feature (1)..(381): n=a,t,g or c
tactgaaatacacagattcacttcagctcagcgtttactgagcatctgccatagggcactgtngcttggagctgggatttaaacagctccagtccctggcctgcacagaaagtgaaggccagtggggacaggcatgtaagcccgtagcagcagcacacccggccacagcggccaagtgcagcaagtactcacagaattccagggcgatgccaagaggctttcagaggggccaacctgtgagccagaactttgaagggaccaacggatttccccagatgggacaaggaacagaatgggtgttattacccaaggcaagattaaagtgttattgggaaggttnacagagggccagccaacatttggggcacaccacaggggcaa

SEQ ID NO: 1761 - DNA, 449 bp, Homo sapiens
  misc_feature (1)..(449): n=a,t,g or c
tctanagacaaggtctcactatattgcccatgctggtctcaaattcctgggctcaagcaagccttatgctgtggcctcccaaagttctgggattacaggcatgagcactgcacctggctgaaaatgttttttaatgcaaaaaagctttacatttttgcagaatctaatctatttttaaattttgttactagtgcttttggtgtcaaatctaacaatccattgtcaaatctgaggaaatgcagatctacttctatgtttgcttctaagaattttgcaatcttaccccttacattgaggnccttgatccatgagttaattattatatatgagttaattattttatatgggggtcccacttcatttttttttaccatggccattatacaaatgttccaggnatggatttgttgaaggggacnccttctttcccccattgaatggggcggggg

SEQ ID NO: 1762 - DNA, 428 bp, Homo sapiens
  misc_feature (1)..(428): n=a,t,g or c
ttttttttttttcaagttgctttttccctttttattaaaaatagactcaagcactttantgtatcatacaaaagtttcattcgctggtggcagccacgggaaagactggccccgtagcactgattttccacctcccctccagggacttgggtcccaggagcagtgactgggcctcagagaaagcccataaagactgcttactctggaagcagccgactaggggctnttccgcgagcagctntccccaccccacccaatggcaaaagttagatactcgaaagtgcctcttcagtgccaagataaactaacaagtgggagtgaaatgggaaaaccctttgattattttactattttcccaggggcctgggggnttttnagtttttccctgcaattcaaagtccttttttcccttacaataggggggtagg

SEQ ID NO: 1763 - DNA, 341 bp, Homo sapiens
  misc_feature (1)..(341): n=a,t,g or c
tttttttttcacactttgtggttattcttttattcttgggtgtcccccaccagaccccagctgactgggcagggattggccccaggnttggcacangtgccaanncacccgagtgctcagccacctcttgccaaacatctgaatcaatgtcacagcaacacttggtttgctcctgttgcattctcatgacaggctcagcgtcaggtacgacgttcttgagggcaaggctgtcctccacaaagccctctggggttggggggtntccagaggcaagccctcagctctngggagacttgtcttgccttccgggaggaaacttggggggcaaaagggacaaaggg

SEQ ID NO: 1764 - DNA, 560 bp, Homo sapiens
  misc_feature (1)..(560): n=a,t,g or c
tttttttttttgactttctcagatttattgtatgtcctcagacangtagataaaaatgcatggggtttacttccagggatttacagaccaatataagtaaacagctggggtttctttttaggctgtttctcttggaggtggtgcaggaggttgaggaaagcacctctgatgagcagatagctggaggctgttcccacagtcatgtctcagcgaagaagtcggagttcagcagccatcagaaccaaggtatgtgtggtgatcttcggaatgccactccaaatcctttgcactttcttttncacacagcaggagttntaaaagantgcttccttttattattaacactgagaatccatgcagagagtttacactaaacacatgantacattgtgtttttaggaaggctgggtnccctcagtccccagatctttgaattctaccattaagttcaggtaggtttttngagacagagntttgcccgcatcatatctgtgacactgactcttctgggtntagggttttctttggccaggggtttcttgagttcagnccctgatcat

SEQ ID NO: 1765 - DNA, 356 bp, Homo sapiens
  misc_feature (1)..(356): n=a,t,g or c
tttttttttgaattaagtatttcatgtttttatttcaaaagaaaaaaggataccaagaagcagaagaatgaagcagttaaaaccagcaaagctgcaaagtaggaaagaaagctgagggagagattgatccgatttcaacgatgtggccacttaatgcaaacacaggggtctgatgctgcaaacctaagttcacatgagtccagtgacttcagcaggtccactggatccnccacagtgacagggccagggcccttcctgctgaatcctaactttacacattctaggncacatgtcatggcacatacagggttacactttatgggttacatggacattggcatgccatttgcacacag

SEQ ID NO: 1766 - DNA, 377 bp, Homo sapiens
ttttttttttttcctagatacaattcctttattatcattatcatgccccctagcacatgaagctgggcttccacctagatcagctaaggacaggggtatgtttacaatgagaacaatttctctatgcgcattaggttaagacctcttctctgtttctagaatactgtgatgactcacatccatgggccagctgcttccagggaatccatctggcctcaacaacattgggctgcctgggaataacggtctgggcacttgcacaggggcaggggtatgggggagcaggcctcaggtttattaaggcagggactggggcactgctggaaatagggggaagggggggcagccaacatgttagccaggttcttccccaaggg

SEQ ID NO: 1767 - DNA, 426 bp, Homo sapiens
ttttttttttcaccttattgcatttttaaaatctttattctgtagtgaattggtattcccaatctgcctaagcaaaggcatgcccttctaacaagatttgcttagagcagaggtgatagaaggaagaatccgaagaccctctggcatggcaatctgggagcagcacattgttgatggagtccaagtgagcacatttcacacaattcatttagtgacaagtgggcttgctcccttttcatccaggaaaaaaactactcacagaccactgcccagaatctggaataagaaccctcattttaaggtattcttcccaacaaataaatatctaaatattgaaagggggcatatcaggaaaacttaaaaggacacatttaaccaaaaccaaaaccctttttcaaaacaagtaaggcatgtctgtatttagtt

SEQ ID NO: 1768 - DNA, 367 bp, Homo sapiens
  misc_feature (1)..(367): n=a,t,g or c
tttnttccaaaaatcaccacctttaatactccccggtcctgcacacacccacagtctcactgggctccaccctcacttactgcccgccgtggatggccttggaggctgcctgcccgcgccaggatgtttggcacaaagagcagccccgaagcccnctnaatgntctcgatgggcaccaggtaagcgntccagtgggatggcctnatccacaggtgcgttgggcatcacgtaggtgcggantncaatttgcccanctgntncctccaggttcagcaccttgaagaagtttgtgggcactgccangtggtttttgccgatgacctgggtantttacgtaggatttcccatcagnctctgtccatgggac

SEQ ID NO: 1769 - DNA, 424 bp, Homo sapiens
  misc_feature (1)..(424): n=a,t,g or c
ttttttttttttgttttaacttcgttttgttttattttacattgttttaggagcttacacaatcagttctcccttgaatttaaggataaaacttgtcttgtttataggaaaattggtctcattggataagatcaaaacaaatcctatatatttttgtcctagctgtcaggatgttcagacctaacttaggcattcaactatattaatacttcccagatgtcagccacattcatttgcctgttattttttaaaattatattaaaattatggcggtaaataaaaatgtactcacattctcatcatgggacgatgggttacgggtttaggcttgtaggctaggtggaaaggccaaatttggtgggaaaaggtattggccntttatggggnggcctggtttctaactaggcctttggccaattttttt

SEQ ID NO: 1770 - DNA, 339 bp, Homo sapiens
  misc_feature (1)..(339): n=a,t,g or c
tttttttttgtatacggtaactactttattattttcaaatgcaaactctttgcatttagtttgctattttacaattttacaaactaggtataaaagaccataaataaatgacataagttatgtgtacctaaagttcatgaagggaagaaaaataccttgacaaattaaaacaaaataggaaaatctatgtctaactccagaaatcactcaaattttgggaacgtgtgaaccgaacaatgttctgttaatttctttttcagtatggaactaaattataatatggccttatacattctnatttggaccacagtccttggcatatttccacntacttggggg

SEQ ID NO: 1771 - DNA, 302 bp, Homo sapiens
  misc_feature (1)..(302): n=a,t,g or c
ttttttttaacctttatatacagatatatttatagaataagctatattaatttgtctctcctttttacagcaatattagtttgggatctttcatacattaagtacaaaaaaagtctggggagaatggcacgtaagagagtgcatgagggtctgtggggcccngctgctcgctactgattgcatatggggtcgcccaggnccctgggagggacangcccgcgcacttntctggcagggtctngggatggagtnggggtcggtctnagccnaacggggctgaggggggtngctcanacccccca

SEQ ID NO: 1772 - DNA, 413 bp, Homo sapiens
ggttgtcatttattgttttcaacactatcttcatgacctgtttgtgttcagagtggctcacagataaggaaacatttttgcccagtcttaagttcatggaagataataggaagagtaattaactgcagcaaaaggttaggacaaaacatggcattatcagggcttgaaaggactttattgtggctgtggtgaagcaggccctgggtcttggcagatgataccagaagggcactgagtgcaggcgtgcaacttgaatttgatcccataaagtcagggcatcaggaagccattcagaatttttcaccctgtcagatgctcagatttgctaggagaactctgggtagtgggcaagaaccagagctgttacttcaggaattggggacagagggcatttttccccaaaaaaaaaaaag

SEQ ID NO: 1773 - DNA, 454 bp, Homo sapiens
  misc_feature (1)..(454): n=a,t,g or c
tagtagagacagggtttcgccaagttggccaggctggtcttgaactcctgacctcaggtgatccgcccgcctcagcctcccaaagtgctgggattacaggcgtgacacatgtgcccggccccccttaaaactctttaatggtgtctcattgcttacacattacagttcaagctcccaaacacggaacacacgactccttcctcctgttcctaagaacttaaaatggnagtctcaattcttaccacttcctgcctcgcctatgatacaccaggcaacaccagattgcttgtaattcttgacaaacacataacacagcttgttctacctctgggtgtttgttcacaggtacccactctgtcgggnactgccataaccctcattnttattccttaaattcaaattggcatttcagntcactantttttttgggggnggctttttnttaatttttccc

SEQ ID NO: 1774 - DNA, 398 bp, Homo sapiens
  misc_feature (1)..(398): n=a,t,g or c
ttatangcattacntntttattcaagctccacaataacgcagcaaaatacatactgatttcatatcaccagcgaaaaaaccatactcaaataagttaggnaacatccaactaggagtggatggacaaaaacctaggctttgactccacacaccacactctactggatcaggagaatactctgatgaggtctcatttccacttgagtttgaagagcctgtcgtttgggatttctaggaatatttagtctaatgattattcctttctgtagcataggatgatgccctcacaaaacagccagtgtgggttaattactacacagctgtcagctgccatacatcctaataccnattatttaataggcagttaacacttgggngcttggntgctttacaatggc

SEQ ID NO: 1775 - DNA, 357 bp, Homo sapiens
  misc_feature (1)..(357): n=a,t,g or c
ttttttttttgctgactttaattacaaactttatttgtcaatacaattcacagtttatacatggcgcattccaccatataaattttcggaacagttatttgaggaaatgggtgtagctttctttctaaaagagcctgactttctaaaattttggttggattttttttaactttataaaagtacttttaacaaattaattgaatatttacatttctagcttaaatttaaattttggaaaataagcgtctattagtttatttggcttcttttaaaggattcnggggtttattttttccaggaccccaatccggatggccnccttattccggataccngctccccaccccccaccaccac

SEQ ID NO: 1776 - DNA, 347 bp, Homo sapiens
  misc_feature (1)..(347): n=a,t,g or c
accaaacaaaanctttattaatgcattgacaatcagtgaagacaatgaaaacccaccacttttgtccgtgaactgagaaagaaaatggcaatgtcatatggcattaatgatgcatgagatctatgggtgtagtgtcacgtctaggcgtgtagtaatccagtcttcggccttactccagggagaaagattcagctttgttactttccagtcactctctcccgtaacacagcaccttgggcacagaaagcagagcgnccaaaacccaggantgagggacagttaaaattcaacttcaaggctacagccatcccaacgggtcctncccagctcccgcgggattttttacc

SEQ ID NO: 1777 - DNA, 367 bp, Homo sapiens
  misc_feature (1)..(367): n=a,t,g or c
tnnaatanatttttactgaaaacttttattgtaatcaaaaagtgacataacagggttgtaatgaattcagcaaatcattctgctgatattttagaacttatatcagcttttgccaggcaattaaaaaattcaaatgtgaaaatttcacattacagtaaactccaccccaactaattaatggtggttaaaaataataggccctagcaaaacctctcatgttacatggtcacaactcacaattctgtacaaaagttcgtgttataangctctgatgtaaaantcaaataatcaaggcaggcaatattttaggtgcagcacagggtcttccatgtcattatttacaagggcttgaatctctttacattat

SEQ ID NO: 1778 - DNA, 390 bp, Homo sapiens
  misc_feature (1)..(390): n=a,t,g or c
nagaatgatattagagttttattttgaataaaagantatgttttagaaatacatagtgaaatatggatagatgatgtgacatttgggatttgcttcaaaattacctagntcagggtgcggcggataggttgggggttacagatcgggagttagcaaattttttctataaagcgctacacaaagtaattattttaggttttgcaagccatagagtctgctgcaattactcaactctgccaatgaagtacaaaaacagccaaaaacaataagtcaacaaatatgtgtgggctgtgttccaataaaaccttatttacaaaaacagtcagaggggccgggnttttgtccncagggcccatcctaggtgtgcccgactaggtttgtaccgggtgg

SEQ ID NO: 1779 - DNA, 424 bp, Homo sapiens
  misc_feature (1)..(424): n=a,t,g or c
ggaaacatgatcaagattgtntattagaaaaacataaagatgaactttcttggcacagaaatgagataaaatatacagtgctacaactgcagaattagcacggacgccaatctaaaaacagcaaatatttaacagtagctttaatgaattaatgcacaatattttgaaaaatctttgaccttgctcataagcagatgcctgccttgaagaaacactccaagtctgccgtgattccgagcgaaatgccaaggcagagtcaagacaatcattacctttagggctgaaacctgggcatgaggctgccccttctgggatgcctcctaaccagtctgatgtactggggaaggaggagtgaggtggggtcttcctcgggtcccagaagctgaaaacccagcccttcctttgccatcagttctgtgccaag

SEQ ID NO: 1780 - DNA, 330 bp, Homo sapiens
aagaatgagtatttttgatttattcaaagtttcaatctaaaacctcaatgaaatctaccacctttattacaaggggactgatggttcctgaacagaaagaaacaaaggtcaggaaagatggcaccggacattggagagggaactggccgagtgtgcaggaggtttggtccaatagatcactgacaggctaaaagccacattttgttgagaaattacatcagaactgtttaaagagtataaacctccataagaaaactaaagatggcaaatgagattcaactctgttacttcaagtctataatgtcttcatcggagaaagccgtgagctgg

SEQ ID NO: 1781 - DNA, 399 bp, Homo sapiens
tttacttttcataaatttatttatgaaattaaatgtggtttctggcttggagaaggaatagtgcaagagtgactgtccatgctgctgaatcctgtgggctccacgccagctcgccaggccctggctctgctcctggcgccccttggcaggacagggcgccatctccacacacccgctgcctgggctgtgggtcagtcctgtgtgctgagccacagaattcggtctctctcttatggcttctcacgctcacgagcgtaaggcaatcttctgtgtcactaagaatcaattctttttctccattgtttgttgttagaaaaacaagatgccaaaatccaaacaaaaaccaggaacgaggtgggttctggagctaccgcacagcaggaggcagactgaccacac

SEQ ID NO: 1782 - DNA, 259 bp, Homo sapiens
tttattgagtacttactatgtgtcagtcacagttccaagggcttcatgagttttaactcatttaatgagttaatccggacaactcagtagaccaatgagacaggtactcttatcatctctatattacagatgaggtcactgaggcatacagcacctatgtaagttacccaaagtcctactgctgctatgaggcagctccaggattcaaacccagcagcctggctcacatctggcaccttttaactgccagcctactaca

SEQ ID NO: 1783 - DNA, 415 bp, Homo sapiens
  misc_feature (1)..(415): n=a,t,g or c
tagagacagggtctcgctctgtctccaaagctggagtgcagctccatcatggttcactgcagcctccgnctcccgggtttgagcgatcctcccatttcagtgtaaccaccattcttatctctatcaccatagattagctctgcatgtctttgaacttcatataaatggaatcatgcatagataggctcttttgtgtctggattctctctgttaacactgtgtctgtgagactcactcatgctgtgtgtagtattatgcttcatccttttttgttgttgcatagtattccactgtataaatataccacaatttatttgtctgttttcccaattgctgtgcatttggggattgttttggtttttcacctattttggaataaggctgcctagggaccacccttggtatagggcctggg

SEQ ID NO: 1784 - DNA, 477 bp, Homo sapiens
  misc_feature (1)..(477): n=a,t,g or c
tattaccntgagattcttcaactacctgcaaccnttctttaaacctaacgcaatctgatataaaagagcctgggatgagacttcgaaggcagaagtctactgtctcattaaaacaaggtcttggctattccatgaaatcaaatcttatttcagtgcatgtgtgttccaataaaactactgtattgcaggaggcaagtctatctggcctatgggtgtagcttgctgactcctgctgaagcctccctcataaaattaaaaacaccctcaagattaaaattacggtaggggcccgaattttgataaaatattttccttctctttttccacctccatgtatgactgcttgcaaaggcatttcaacaaatggcagtcactaataattgtcttccngtgggcagcccctgggagggctgccatnaaggttaacaaacctggtttcttttaaagggccantaatcccggctggggngctgcggc

SEQ ID NO: 1785 - DNA, 514 bp, Homo sapiens
  misc_feature (1)..(514): n=a,t,g or c
ttttcaggaaagtttttattttaaatattggtgattctttaaccaggaatgcaaatgctactgaagtgctgtgtgtgtctctgtgagagccttcatataaataaattcatgcatctaaagagtccctggncaggccgcatgctgatattcaatttggggaatggtgatgccatcacatgcatctgggggaggcaacagggangcctagggnctttttntggccccctntntnacaaattccggggggatttnnantntttagccccggggatctctgggctttttggaaagggttcctgcttttcctgagttcccatggctgccctgctgccggggctgactaagcaggcggggctggctttctcagtgcatattttacatttttctccttcaaagagaagccaggggagacaagctggagctacagaaggtgctctgtgggggacttggggccnggtcagcaaccaagcccccacctgccccttttgggttnaagggcttngctcctccccca

SEQ ID NO: 1786 - DNA, 298 bp, Homo sapiens
  misc_feature (1)..(298): n=a,t,g or c
cttcaacacagcagaaatttatttcccacccaggtaaggggaccctgaggtaggcagtgacttctgtcggcagcgaactaggccctctcaccaggctgccctaccgtgctcagtgctgcctcatggtgcaaagtggttgctgagctccagtcatcactttagccngcngaanggggaagggnangggnaaaanntttcccccccnctngggggatttctttncnnncccccagtnaggattttgngtttattataaggnaagaagagacagttagcngaggcttccctgtccaccagg

SEQ ID NO: 1787 - DNA, 498 bp, Homo sapiens
  misc_feature (1)..(498): n=a,t,g or c
tgggttgggattttcaatctttattatttgaaattattgtttcaaattttattacataccatggccctagtattttgtttaaaatatctttatttttctgtaaagaacaagtgtgccatatttagcttttgatagaaaaaattaagaaactatcataaagggaatagctaaaagaaaggttagtaaagggagccatcacaaggagagattttggaaaagggtggtgtcttagtccattttgtgtttctgtaacagaatatctgagactgggttatttataataaacagaaatttatttggcttagttgtagaggctagggaaattcaagaccnaggggccagcatctgatgagggccttcttgctgtgtccacccacgggcaaaggtgaaggcagaaggggaaaaagagtntgtgagggaaaagaggggagcccaaacttgcttttataacccaacacactcctgaggataatggggnttaatcttttcatgaggggc

SEQ ID NO: 1788 - DNA, 537 bp, Homo sapiens
  misc_feature (1)..(537): n=a,t,g or c
acattttatttataacaggaaaaatatatccctctatattttagtttaaaaaaatactgcttggaagcagcccatatcctgtgcgttttgtgaattttcaggtgagactccctcaacccgctttcccccctcactgccacaccactgctagtccatggggagggggctggggttcaggtgggacctcttggttgggagcctccattgctactttgcatttaaaggaccgagagtctcctcaagacaagaccactgttatgtgatggatggggggtgtctgttgctggatccagttccaaaaggtgcccagggaacctggggaaggtgactaccctatcatctcacagggactccccacactgggaaccccagcctcctggggtcctgggtccaggggctcttttcccctgggctgggtccatgggttgcgacacccacggcacccgggcattccacgntggtncttcgaggggagggcttnagagggctaagctncaccttctntttccctggggtngccagattcantccttncct

SEQ ID NO: 1789 - DNA, 402 bp, Homo sapiens
agtttttaaataatgtcacactgaacaacacatttaacagctgaataatttgtaatgaagactaagcaatagttaaaatataacattattaacagttgtggaaaatacagaaatttatcatatcattaaaccagtttttattaaaaaacaaaatgtgatgttaggtcagttcagggataaattaagccatacattatattgacttccacttacatgagattcctagcaatcatatttgctgcaatgattacccactgacttgcattcattataacaaggtacaaataaaccaaatggccaaacagcaaccaaaatatactgttttaagagttaaacacattcttaaaattaaaatgctaaaaaggtacctaaggggcttaattgggggctctcatatttcaa

SEQ ID NO: 1790 - DNA, 552 bp, Homo sapiens
  misc_feature (1)..(552): n=a,t,g or c
ttacaattgaaacaggtctttatttacacggaagcagagagacagagggatgagggcaggcaccccaaaagtgacttcacattcaccaatgtttcagtggcttctaagaccacagcagangnatnccntgggactcacagggtatgaaaatgtgttaccctccaaagcctcaaaacaaaagggttggattaaaaacaaataccaagtgtttctggcatcagttgaaaaagatctgagaaagaggaactattgaatgtccagaaaaatcaaagttctgggaggctaggaaatctgacatttctctgatagagagatcactgggtcatcagttcattttggggaaattctttacagttaaggtgatgtgtttcctttcattggtaaatttaacagggagaggcatcattatggggatacatgcagggctcgtgccgaattcttgggcctcgagggccnaaatttccctataggtgagtcgtatttaaattcggtaatcctgtccataggctgttttccngtggtggaattggttatnccgcttcacaatttcct

SEQ ID NO: 1791 - DNA, 388 bp, Homo sapiens
  misc_feature (1)..(388): n=a,t,g or c
atcaaagatggctcagagaatggtaaggcaacagtgagaaacatcagctgtacttgtcgagaaggtgtctgattacacagcgttaccatcccagctggccctttgctataacagaggagtgggtgagtgatatgttccaacagctggtctaaagaccagaggcacagtttcaggtaaagtgcaggaacagggtagaggctacaggtggaaagatctagaagctctgtgtccaacaaggtcctcacgcttcttatcagcatggactgactcaatctaaatttggtgtcccccctccacaggttctagtagaaacctacggcatgaaggaatagaatgcagacagantatagttaaatcccaaaaaagggcccttttctttcaaaccctg

SEQ ID NO: 1792 - DNA, 495 bp, Homo sapiens
  misc_feature (1)..(495): n=a,t,g or c
gtggagatggagtatgtatttattttacaaaaataaatcaccatcttcggaccatttgtagactggaacatttcgagcaatgagtgcgccacacggacgagtgccctggtgactccctgatgttcgcgtcacccccagggccaccttggcgcccgcatgagcctcgnttcccactcccggcctccaactcccttccctcgcagccgccattcaccttctgctgtttatttgtctgcagangcctgggacaccggaaaaggcgattccctgagcgcctgggagttggagacaattcctggttcagaatttaaacatctttctaggtaagcgntgctccaaaactcttcgccgcgtgggacttttgcaccaggggcggttggggagganttggccctccacggttcctgggcaaccgcggcctttttgaaagaggttctggtcaatatttaacttcggaggaatttggaattggattcctttaagttcttnccctgc

SEQ ID NO: 1793 - DNA, 501 bp, Homo sapiens
ttccatccatttagcaaactttattcctgaccacattttatgccctgggtgtgaagtggtacaaggaaaatgactaagacatagcctaaatttttaacaagtaaatctggccatgcaaccaataaacagttcttagtcaggtgcctatagtcccaggtacttgggaggcttagggaagatgattgcttgaggccaggagttcaagtccagcctggggcaacacagtgaaacctgggtctctaaaaaccaaacaaaaaaaaactacagtgcttctcaaacccaaatcaccttcccagggctctttctgcccaaatatccctcaaaccaacaggatgtgtgttgggtaaatgttggaaccaattgggctctctggaaaaacttgtgtgtgtgtgtgtgtgtgcgtgtgtgtgtgtgtgtgtgtgtattaggtctgtatttaatactgggctattaggattccccaaaatttgaccaggcaccattccccaggccagcatagcg

SEQ ID NO: 1794 - DNA, 422 bp, Homo sapiens
agcaaggttttaatggaaagcataaaacactggaaatatggacagaaatcagattattacccttttatttttttccctgcccctttcacaatgagactggaggggattcaagaaccacttgaaataaaggcgaaatgattagatttttttctcctaattgcctaacgctgatgtcatggtgtacgcaaaatcaacattgatctctaagtgaaagaggagaaacagaacaacatcaacagcctttcgaggtaaactgtggggccagaatctatttagggcaacccgcagggcccaaaatctctggaaaagcccaacagtgggagccagtttctggatgctcctctgttgggtgatctggatctttgagtggggggaaatctggttaggaaacagcctcctcgaggggagccctccccctgggt

SEQ ID NO: 1795 - DNA, 169 bp, Homo sapiens
  misc_feature (1)..(169): n=a,t,g or c
ttcacaaaggtttattgggtccctgcctggtgctggtttgggttagtcactgtagaggatccatctgggccagcctgggaggggcaggtctggagtccnaggcagacacgaaaccgggggtgacaccaggggctttggaggctgccatgctgaggacagctctgggagg

SEQ ID NO: 1796 - DNA, 359 bp, Homo sapiens
  misc_feature (1)..(359): n=a,t,g or c
ttattaagactgggtcacatccagctagtacatttcagtgccctttctggtgctncctcccaggagcagacactgcaaatttcagaacccccatctagagaaacccctaacctgtgatctagcttccgaggctcagtgttggttcttgtggtagtgctgatgtgtgggtaccactgaggccaggccacagtcgcatgtaccctcctctgggctgactcacgaggctacaggggacagcacacctaatgagcaggtctgtcctccagacatactcattaacaagcacgttcctgggctaaaaaataaccagatctttttggccgtgcccttcaggttgggagaaagaaaacttcgagact

SEQ ID NO: 1797 - DNA, 434 bp, Homo sapiens
  misc_feature (1)..(434): n=a,t,g or c
ttttttttggctatcaatatatttattattagcatgacatattatgaaaaattattttccaaagacttagccagtaacactacaaaaatagaaagcccgttaattcctgtgaatttatctgtgtgtgtccatgtccagtaattatttcactgtctgtctgaagtactaacaatactaaatccaatgctcggcgccacgctgcaatctttggtgtaacaacgtcataaactctcggaatctgctccagtttatttgaaatgtctgaattaaaaattctactatttagtttactatattcattcaagatgtaagatgaaggagagccagagtctgtggcattttgcagatgatgttgaatgtatgtgctggcttcaaattctggatgagtaattggcagtggtatataggagagttggaaaggtatttcngccatc

SEQ ID NO: 1798 - DNA, 423 bp, Homo sapiens
ttagctggacaaagtacttttaatgcttattttacaaatatgtacctgtggtgctaatactaggcaaagaaaacaggacgattcaagagcagcctatgtaactaccaactcaagcactaacactagctagatcaccttcatgctttaaaatttaaagttatggagtagctgtgcccaccccccccccaaaaaaaagctttaataaaggcactgcagcgttaactaagttttagggtaaatttaggcaattaacaattcgaagagacttgtggtttatgtattagtaattcaaattactgttttagagatctcaggtagttaaccaattcttgctcaaagcactaatgttcagtccctcaccatttatgctgggtatgagtcccaatgcatgggtattgcaacctattgtcaggccctaacatg

SEQ ID NO: 1799 - DNA, 676 bp, Homo sapiens
  misc_feature (1)..(676): n=a,t,g or c
tttttcagttggacacaaatgtatttattttaccctagcaatagaacaaaatataatttctttagccatttttcatgagaatagttcattgtacagttgaggaaacatatgaaataaggcctgtggttgattgctagtggttaagcatgttttcaatctttgccttaatgtaaaagatttgcagtgaactgcaaactgatgcagaatatctctcctgcttttccaagtcttgtcaggaatagtaaggtacagtaaatttgtcccacaggattttaaagcctacgtcttgtatataatacaatgcaggcctacaaaaatggtgcagccatatttacaaatttagttcacagactgctgcagtaaaatggctggaaagttttgttttgcttgtttcacaatttctctaaacagcagcagaatcttaaaatacctggctggcatctcttttctttgtaacaaataattcactttagtatactctgtgtatatacaaagtttttgtatgttttataaaaattcacagaactgcaaggttcagtcacttttttacaccagagaaccacaggtcaagagcactcttcaagcagagttgagggactgcgnagccaatggtgccttattattaaacccgcatgggcctggatcctagctgagataagntgtaccacgcatgcct

SEQ ID NO: 1800 - DNA, 446 bp, Homo sapiens
aaaagggagagtgaggctttttattgtgtatgaattcacgtggtatcgacaactccacacaatattaaaacactgcgagaaagtgggtgcggcacacctggaattttaaaaaagtcagaaataaaaacaaccagacatcccaatgcagatggcatagaacctgctagaaccacaggcggcggctggaaacaggagacaggtctttacgaaggttagatgggcagcggttccgtggacagaggaggaggcgcggctggccggcatatggcttctgtgcagagggcctggcctcaggcgttgggactttttaataagtgaccccttgaggaagggcgtggtgggctccacctcccacccggaagcccccccgggtccactcacgggcggacaggtgtgtgacggccctctcctacctgccccagaacttgggcaggacgggctgttaa

SEQ ID NO: 1801 - DNA, 604 bp, Homo sapiens
  misc_feature (1)..(604): n=a,t,g or c
caaaaacagatagttaatactcctacttatcataaaactgtgttagaattcagcagctggattacataatactattataataagcctttattattgagtaactttacatacataatatttatatgcacaagtatttgagagcttataggtcaagccctgtgctaagtactttgtacccatgatctgatagaacccttataacaccttgatgagatgcagccattttctacacactacacatgatgaaaccagcacaggaaatcagataacttgcctgctcttggccaccacgcggtgcctgctgctttgtgttttatgggaaattgcacatggcaaacattcaaccataggcttcctgcctttattattaaagggcaaatatgggtaaggaggatagcatggggcttgatttgttcaatgacctaaaaataaactgatcttattcataccctgccttgttctaggaaaggattcnagtggcttctcagcagagggcagggcaaggaacaggtgctcaggaattggagcatctggcacgcaggccccactgcactctganggggcttcactctcctcagacacgagncatggaaccagagcttat

SEQ ID NO: 1802 - DNA, 404 bp, Homo sapiens
gtttggcacctaagaaacatgatggttgtggataatgccacaagtacacagggagacccagtaacaagacatgcagggtgagggcaagcggctgagctgcccaagcatttcaaaaccaggactttggcttcccatgcagttggagggtagaagggatgtgcggaactgatgacttcaccggctcctcagcagcatgtacattcaaattgaagatgcttgagagccccactataccaaatcgtgagtctggtcactcctccagcagagcttggtgcagtgacagttagaaaagctgagttccaattgagtctgttgcaccaagagtccttttgaagacgctcatcaaagtaattattttctttttgagcagatgtacagcacatccatgggaaggccatgtaaaa

SEQ ID NO: 1803 - DNA, 326 bp, Homo sapiens
atatttctcgtggtttataagtttctgaatttccaaatttgccactggtattttaacctacctacaatgttgactctacgtaaaattgatttttacatgtcaggaataagatgaggatcaacgaacaaatgcacagtctgtcttttctatagttcaatagtccatctttgaatagcacataatggaatgtcagaagtggttttttaataatgtatgtttacacttcattgatttataacaatcatggctatggttcttgggtagaggagaatgttttatactggaatgacatacatatgtaggtaaaatatgatagatctatatat

SEQ ID NO: 1804 - DNA, 258 bp, Homo sapiens
aatagggcacaaggtattttacaggtcctcatcattctgcttggtattctgttggtgtaacttttgtgtgtgataaattcttctccagagacttatcctctaagctctccaatgtgtctttttagctggagctaatgtgtaggaaggccatttttaaagcaaatcaaaacattaaaaggtttaacatctgttaatcgggtgttttatctagaggacataaaagatattcacaatcctctagcttaccgacttaacgct

SEQ ID NO: 1805 - DNA, 286 bp, Homo sapiens
  misc_feature (1)..(286): n=a,t,g or c
aaaatcagagactatttatattaaataactcttcccttaaaaatggcctgaccacagcaatgaatctgtaaacacagagtaatatttttcctacagtaaagagtcactttaatctcaaaagatacttttcactgttctaaatgacaggnttttaagcattttttcctatatataatacagcatcacttaaaattttatttaaagacagttgattcaggcctgccttggactggaaagaagtctttaacttagtgggattagtgcttcagcttggtcccaaatattt

SEQ ID NO: 1806 - DNA, 261 bp, Homo sapiens
aagatccttaaaaagtatctttaattgatgccaaatatgaacagatcgtaaagtgacagaagcaagtaaaattgcatagatgaaaactatgcgcatcaattaggttctcaattcataacattcaatgtccttgacctgacatattacacagttagagaagggagaatgcgcagtaggtgaagatgagacacgtccttaactcaaggtggaagcaactggcaaactcaagaaataaaatagcgttttttcagcttaaatggt

SEQ ID NO: 1807 - DNA, 316 bp, Homo sapiens
  misc_feature (1)..(316): n=a,t,g or c
aaacaccaataaatttnattttnctcttaagagagacagtcctgcttggcacagcagctcccctgtccttctcgccactctcagtgctctggctgtgtcatccttagacaatcgtccttgtctttatggtccaaaatggtgtctgtacatccagaccacacatccatattccatgctgcagaatggaagagaggcagtgaagggcgggggcggctcctgccttctcagagttcccagaagaaccctcacaacacatgggctctcatctccttgtccgagctaagccactgaccacagctgctatggagtaaggaaa

SEQ ID NO: 1808 - DNA, 236 bp, Homo sapiens
caaatattttattaatctgtttggccaaacaggtaatggaaactgagaataataatttgctaaaaagttcaggtcatgaatgcccctttcccccaggaaacagaagactccatggttacagaatgcaccattgggttatgacaacgtttcaaaataatgtttccatttcatatgtaacaatgtaaacttcaaaaatagtaaactctaacccctgaccctctttacagatctatcac

SEQ ID NO: 1809 - DNA, 447 bp, Homo sapiens
tttttgttttttttttttttttttttttttaaaattttaaaaatttaaatttattaggatttattaacacaattacacagaataaagttcaggatttcattaatgatggtcaccaatatgtgcttctttgtggctttttaacccataattctcatgattcaaatttattcatattatagttgaatttcatacacagcttcacaatgtggatattacaggtccaccagtaaaattaatgaaaacatatctttcatgaaaggcacataaagaatctaaactaacacatttaaggaactttgataactttgaatttctttacattacaaagaaaaaaatcctccaaatgaaacagatatgaatatagtttatggttacacacacacacacacacacacacacacacacacacacacaaatatacttcaacccagtgacaacacgtaactt

SEQ ID NO: 1810 - DNA, 517 bp, Homo sapiens
  misc_feature (1)..(517): n=a,t,g or c
tgctcaataaatgtttactgaatgaatgaacgcatgaagaatcaatgaaggaggcggtgaaggaatgaatgagtcagtggagaacctgaattggttcctcaagccagccttccactgccctgcatgccctggcatcttggacatttctnggcactaggctgctcctgccacctcactgccaggggtgatacagggctgccggcctctgcaagccggggagnctacgntngtgcanggcatgggaacagtgtgctgtactcctcctggaagcttaggtccttgaatctccgcacggccagggctgcggtcaggctccaggtgaagatggagaaaaaggagaaggcgatggcggcccgggctgcgtccgtcccttcgttcagtgggttgtccttgggcttggagacctgccactggttggccaggtagcagaatcccacgaaccagaagaaagcccagaangccgagacaccgatgtcggacaggacggctttcttgcggtccttgacgctgctgatna

SEQ ID NO: 1811 - DNA, 438 bp, Homo sapiens
  misc_feature (1)..(438): n=a,t,g or c
cacaagttagcaatggtatttaattttccttggccaatgttatgcttgagtttgattcatacaataaaaagtatggaccattataattatcttagatttcctctctgggtatctttttctggccaaatcttcatactaaagagacgttaagccacactgcattttctctaacttgcctgcaaagatttactaaaataaaacagattgatcttatccaagtaacaaaaacaaaaaagttatgaaattattttgctgcacaaatctaaaatactattattaaccataatgtcagcttacttaggtcaattcttcaattgcactattgctttgaactttcacaaactgtcattttccttccattctaaatatgacagttcagttactaaggaattggttttnagttaacaattaccttcaatttcatatgaaacaggagct

SEQ ID NO: 1812 - DNA, 418 bp, Homo sapiens
  misc_feature (1)..(418): n=a,t,g or c
tttgcatctctggtaatgctttattgatttgagggatcctgctgcacctggctccctacctctccattctcatctgaagtgcccctcaggccttccagacacttgcccccaccagagattataatacactcatgagaattgatatatgtgtgtgtctgtgcaaatgcgtgtgtgtatatatatgtatgtgtatatatatacacacatatatatgtgtgtgtatctctataaacacatatacacacacacacacacacacatatatatatagatatatntgtnncngnngtacagtatttacaggtacaaataaaatnggcttgaaaattacagtggtggttgggacccatctcagttcagtttactcagcagatagaaaaataanggcccagtgggccttttgaacggcattngaatt

SEQ ID NO: 1813 - DNA, 389 bp, Homo sapiens
  misc_feature (1)..(389): n=a,t,g or c
aaggactttttcccctttaatatgaaagtataactacagcagttcaatgtacaaatacaaaaaaagttctcatactaaaaaaaaaaaagtaccataatactgtacatacaaaaactgttcaacaagaatgatttaaatatgtctgttcttgtccagatctggaagacacaaatgtaaagttctgcaactgtattattgctaagaacatgtgcctgggaacactgtgtttccctttctctccctcagcccagccccgcctccagagtcccctgagcttggatcatgagccaacagcatccctgaagataaccagagccaaatgtttactcaatggaagtcattattcagtgagctgctgcttaccataaactnatgaaaagcacaggttt

SEQ ID NO: 1814 - DNA, 318 bp, Homo sapiens
  misc_feature (1)..(318): n=a,t,g or c
attatttatttacatatacaacacttgtgaaaagggcgctagataagtagaacaagaagcccagtttctggtacatcctgcntctcagtcacctctaggtctctggaacttgaaagctatgtctcttcttgcagggttctgttacaatccattgattttccctcacggtataaagttccctttgcttaagtttcactggactatttcccccaaggtcattctgacaaatgatgttctttgttgtttatactgttcaataagatttcattttgaagaacatgatgnaatcatgtgacgacattcnttcccgttattgaa

SEQ ID NO: 1815 - DNA, 395 bp, Homo sapiens
  misc_feature (1)..(395): n=a,t,g or c
gaattgtaataagctgtttatttacttttgccccatgaggctatgaattcctccaggacaaattggctggcactttgctgctgtttaataaatatctgacaatgcatgaatggcagtgtcctggcagaaaacagaatagtccaccttgagaggcaacaagtcctaacagctttttgtttacncagaggctgatccaccctctctcagagatcttagaggtggtgctgaagattgataaataggacacgaatgccctagggtcccttctgacatggtgattatggggcagtgactctggcagggggctgnaggggatctttgaaaagcaaccaaggcccggttgagctaatcacttgatatcagtttgggttcacagcagcttgtgttccagaaag

SEQ ID NO: 1816 - DNA, 455 bp, Homo sapiens
ttttttttttcccatacaagatggtttattttatcctacacacagaaaattgcttatgagtatcacattaccgctcttggttatcagttaacaaaggctgctaatgaacagcatcgttatcaagttgggtaagagacgccctgggagtccaggcaaatcatgacaacacagcactttgttctgaaatatagctcatctttcatcacacacaaggagggtagcccagtccgagagatttcctggaaagtggaaaggcaaagaatattccgtgatgtgatcccagaaatacagggttaatattacaagggagagaaatgctcacggggccttagcctggatggcaattgtagaatgtcatggctttccctcagcctccaccagtccatgtcttcctatgcaacagccattgtacattggtaaataataaccacaaaataatttgtataagggggaaa

SEQ ID NO: 1817 - DNA, 366 bp, Homo sapiens
  misc_feature (1)..(366): n=a,t,g or c
aatttaaaaagtttatttgtattaaacattatttcgataataagatgacaaaggacttttgtccttcaacattgtagcttctctctgctcattaagtgtctgccaaggataatccaccaaggataatcctgaagacagtgttagtcttttgatacagataagcattaacatttgccatccccaactgcattgcatttattttctttattataataattcaagcttcatgcttagatcactagaggacataaaacaaattanaaaatcaactatactgcatttacaatgaatgaggtggtgcatttctcctgctttctttctttttttcttcatctgttactgcatataatcatcatataattttaa

SEQ ID NO: 1818 - DNA, 387 bp, Homo sapiens
gctggcacccgccacaaggcccagctaatttttgtatttttagtagagacagggtttgattatgttggacaggctggtctcaaactcctgacttcaagtgatccacccgcctcggcctcccaacgtgatgggactatagacatgagccatcagtgcttggccttcttgattcttgaatacggggtttgaggtgaaagcatttcatgaaaacttaagttcatacacaagagcatcatgaatattctaaaagaggtatctgtgcttttttttgtgaccacaaaatattacttcttatgaaatgtttacactaggtgaggaaaagttcattaattacctttaaaccgttccttattttttttaagattttaaattgtattttggcttttg

SEQ ID NO: 1819 - DNA, 403 bp, Homo sapiens
gtgcagtggcgcgatcttggctcactgcaagctccgcctcctgggttcacaccattctccagcctcagcctcccaagctgctgggactacaggcgcccaccaccacgccaagctaattttttgtatttttttagtagagacagggtttcactgtgttagccaggatggtctcaatctcccaaccttgtgatccacccacctcggcctcccaaagtgctgggattacaggcgtgacacttgtgcctggactaaaacaatgctttctaaagcgcattctgcagcctgatgtgcctgtgaggtgagaggtgtgggagggacagaagctttgttcaaagaggtttgggagaggctggatacttagctcccttcttgtaagtttgccacacacattggcatattaaaa

SEQ ID NO: 1820 - DNA, 323 bp, Homo sapiens
  misc_feature (1)..(323): n=a,t,g or c
gtgacatgttttttgctttattgaaattctctcttacaaaaggtctgangtattttaggccaggcctaatttgctttggtccctgaaatgcaggcccatggtcatttccatgtcctctgaagtaggtatgtaaactagtagacttccatttttaaggttcacacactttttaacattgtttttatttgatgtaaaacaagacttatgttgtccctaatggaaagaccaagtaagagagttatgtgcgtcttcatggaagggataactggattctttgccagaaccgggttgggaatttagtttgttcaatgtggcatctttca

SEQ ID NO: 1821 - DNA, 445 bp, Homo sapiens
tttttaattgaagaaattttttaattaaaaaacatttttttgacggcttcttgttgagcagggctaccccacaggccatgtgcctagagtggccttaattgaaatttttgttacaatcattgtagattcctgtacagttataagaaataaaacagccgggcgcggtggctcatgcctgcaatcccagcaccatgggaggccgagacgggcggatgacgaggtcaggagaccgagaccatcctggccaacacggtgaagccccgcctctaccaaaaatacaaaaaaaccagacgggcgaggcggcgggcgcttgcaagtcccagctactcgggaggctgaggcaggagaacggtgtgaacccaggaggcggcttgcaagcgagccaacaccgcgccaccgcactccagcccgggcgacagagcgtctccaaaaaaaaaaaaaaaaa

SEQ ID NO: 1822 - DNA, 418 bp, Homo sapiens
tttttttttttttttttgctagtaactgtttatttcactctatacatttggaaacgtccgctacatagctatggtcactgtgaccacaaacaacagatggtgataaagcactgaacaggaagaaaaatgcattccaccctcaaaagaaatgaaccagtgtttataaagacaacagatacagccttcatccttaacaaatatatttctttcccagtatttccccaatataaacactgaagagtgtttatatatattcagtgcaaggaatagtatcattggtacaactggaccacctctggagaaagaatgaaattgaaacatctgtttctgaatacatttcagtgtggtgtaataatattacactatagtgatgtgggagaggctcctctagcacccatctgcattccacatggaaaaa

SEQ ID NO: 1823 - DNA, 293 bp, Homo sapiens
  misc_feature (1)..(293): n=a,t,g or c
ttatgaaaaatccaaagtttattgcaaattgtattttgcttcccttcgttcttcatttttacaggatttattgatatccatgattttttcacagatgtacttgttgactttggagagtctctgtgcaatttcagtttcatccacagtttcttgtgctattctgtcatacaaacactctctgacgatgcttagtttgtgaggcgagaggggtggtttagggactgcatctttctttttttttgtggcgacgctggtngacgcttctgtttttcagaacatcctgttccccaaac

SEQ ID NO: 1824 - DNA, 330 bp, Homo sapiens
agatagtaggatttattttaatttttcaatctgaaaaaaaaaaaacccaaaacaaaaaaaaacaaactatcctcatatatatatatacagtgtcaacattttcagagcacttacattaggaaacattgtttctcttcaactgtatgacaatactgtatatgccacaataaaatttacaaaaacaatcgcatcagcagtcataacaaacatcatgattttacatttcaatacacaagaaaaaaaatagacatcttcccggcacttggctcccgcctgacggcaacgtctcctccacactttgagagacctcagcttttaaaacccagcagc

SEQ ID NO: 1825 - DNA, 150 bp, Homo sapiens
  misc_feature (1)..(150): n=a,t,g or c
gagggcgggggggtcatgcgctcgcccccccgggagcagggggtccagcttgtcgagtccggggcgccacttccgagtcctgggcaccctcgggggggaatcccgggggccgcgncgtcgtctgagttcctgggcacactcggggagggg

SEQ ID NO: 1826 - DNA, 431 bp, Homo sapiens
  misc_feature (1)..(431): n=a,t,g or c
gagtggcagcagtgaggtttattggagcatcctaatacagacgctggggcttgcattggtgctcttgatgtacagagcccgcacgttttgccagtttttcttaagcaaggacaccaagaaattgacagccagatgaatgttgtagactagctcatcatcggtcatcttcacgtggccaacagcgacggccaaacacagcaccttcttcatctggaacttgattgtcgatttcacctcatccactttggccaccatgttttcattgtgtgtcagcagggaggggaacttgccagccttgtttaggcctgggcccaggatacgtgggatctgcttaatcagagactcagaggccaaaaaggcatcgtacttcttagccagcttcttgaccaacttcttgtttttgttaagcttcttgagcgcctcgatgtccn

SEQ ID NO: 1827 - DNA, 365 bp, Homo sapiens
  misc_feature (1)..(365): n=a,t,g or c
gggttaaatgatttcttatttattttaaaatatgataattatggcatgagtcccaacagtgagaggatgtatctgtaagttactccacacttttcaattaacatgaacattttttagtaggcatatatctcaatacttggataatcacttttgttttgcttgtgttnctnaggaanaaannntttnnatgnnagccagagaattaccttcagntgtntnacgngacaaggtanatnaatgngggaatgcatattcccaatacctaaagatagatngntgagctcagaatattactcagtcctaggagtaattttttcttcttttcctcccttnaacactccattggaactaactgagtaaaggca

SEQ ID NO: 1828 - DNA, 397 bp, Homo sapiens
aaggttgaaattaggaatttcttttttattggccactaaagtcctagcaagtttctgacagaagcacagacagaaaatggaaacaaataccttactgggaatgtttccttgcttgcactaaccttgactacagcaataacgcattgcttaacagtcaaagtgcaccaggtcatttccgcaaatggcagggtgagtgactgtgccgttcccaaggaagcaaaacagacacaaacaggtcccacgcgctgggtgtcctggctgagtacagaggaggctgctagaccggcagtacccttttcccaagtgaggaaagccagctgtgacactctgcttgccggcaggggttccccaccctcccctccaccatctggcccatagctgtaccaccaattacatt

SEQ ID NO: 1829 - DNA, 621 bp, Homo sapiens
  misc_feature (1)..(621): n=a,t,g or c
ccttctgttgagatggagtctcactctgtcacccaggctggagtgcagtgtcgcgaccttggctcactgcaacctccacctcccaggttcaagcaattctccccacctcagcctccaaagtagctgggattacaggcatgcgcaaccatgcccagctaatttttgtaattttagtagagatgggttttcgcttagtagagatggggtgtttgccaggctggtcccgaactcctgacctcaggtgatccgcccacctcggcctcccaaagtgctggggttacaggcttaagccaccaagcccggccgaccttcttctatttttccattctcctttccaaagccatggccatgcgctcctgtgtacaggtgcataaacacatcagtgtgccatccctcacatgcatgtcgttccccacccctccttcccagggcttctcttggctccagcgttcctctgggaccctctgcagatacagcctgtgctggacccccagccagggtgaaggctcattctgctctgtcttccccaatgcctcagtttccccaaaagctgnttcagtccttctagtaaggggctccatggggcaangatcccttangattaatcttccncttggggag

SEQ ID NO: 1830 - DNA, 440 bp, Homo sapiens
ttttctaaaaaaatttttttaatcagtttaaaagttcgaggaaaaagaaaatcaatcagaaaagcaactataccaaaacagggttatccaagtgagcttctctcacttccttagatggacttcagcttataggatgacacgagatgcgagtaagaagctatttgcgcatttcagctgcgtgacttgtgtctgcgttgctttcctttctttcttctgtggactgagaatgctagtgcctttgaatttgtctttacaggacctgagggtcttttgatggtaagagaatgaatgatcattgctgccttgagttctgtgtgatccgtcaggcctcgcctccaggatggcaattgtagcctgagatgacgtagcccaagttgcacagcagagttgctgttctggaaacactgtgccgagtgaccaccgaccttcacagtgctagt

SEQ ID NO: 1831 - DNA, 347 bp, Homo sapiens
  misc_feature (1)..(347): n=a,t,g or c
ggttctttttacatgtagcaggcttatttattgttaaattacananacaatactacnattacnacagattaactcagcaatgagaaaaggttgagtgaagatgtcaaagagttaatttaaccctttccgttgttaaaattttacactcgttctgttattcaacaaatatatatccccactccccagaaatgtcattttcttaattctctgtgtgttatatattgttttctcctattcactcaaatataatcacnaaatccaatatacaggagagaataaaggcagtaaaaagaaataatatacagagtatgataaatattttttaaaagagagaaaatatatactgg

SEQ ID NO: 1832 - DNA, 431 bp, Homo sapiens
tttttgagggaacatcatgtctttatttgattaatacattcttcaatatcggcaacttaaggcagaggccacgtgtcaaacttctttgtatgtttctagcacctttcacaatgcatggttcatggcaagtacaacaaatgattgaattcgattaaatgtaggaaaatgacaagattaccttttccaatatgtcgcctagtgttttcaattgtcgaattacgattaacatttgacaacaaacccaagcagaatctacttttgttatttgaaggatctgtgaatccatctactaacacactagtagaagatgcatgaaaagcttctccaacacgattgtttaattcatagtagactattgaacaccaatgtttaggctcttcataggcaacaggctgaacatccctgctgggatatactgggcataatccgga

SEQ ID NO: 1833 - DNA, 471 bp, Homo sapiens
  misc_feature (1)..(471): n=a,t,g or c
ttttttgtaagtaaaaccagtgagtctcttaaagacgcttttccgactgtccggtgcagagagggccccggatcggcccctcattcctcctcgtcttcctcttcttcatcatcgtcctcctcgtcggccttgtccgcggcanagttggcggcggcagagggcacggcgccctcgggagctgcggcggcagtcggaccttcgtccttatgctctttcttccacttcatgcggcggttctggaaccagatcttaatctggcgctcggtgaggcagagcgccgtgggcgatttcaatgcggcggccngtacaagggtaagcggttgaagtggaactccttctccagcttccaacgtncttgggtanccccgtgtaaggttttggcgggccccggtttcctggtcaaaggtccctnaagaacggaaatccaggggtaaaatgcggnaaaattggcttaaangggggcaatnaagg

SEQ ID NO: 1834 - DNA, 381 bp, Homo sapiens
ctgaattaaagagatgaatttattggtaaatagataaaattaacacctattttaatatatccaaaccccttccttatatatattaggtaaattaaaagaaaaaaattatcaaagcaatactacagccagctagatcgccaatttacaaatgagttaagtaagtaccataagtttgtttgaatatcaggtgcttcagagtttttctcaaacagttacaaaagagattaggttcccaatcagttcacaaaagctaatttagagaatgtagcttaactacagtactgaggttgtcacacacttaactttcggtctcttgcttatttattcatatctgaggttcactgtttctactaggatacattccgcccacacccacacctc

SEQ ID NO: 1835 - DNA, 346 bp, Homo sapiens
ctggatcttgctctagtgtgagcactcctgaacttcacatattctccttgtcccaaatgcaagggtttactctcaagagactctaggctcactgcccataaacctttgagttggaccaaatcttaacatccctgtggatttgctcatactgccctgggcagaactctttccttctttggaagtctgaattacttcatatttgacatctattttgaaattctgttttacagggtttaggatgggggtaggtaggcacaggaaagagagtagagcattctctcttttctagcaatttccattatcatgccccttctagcttttagaccagcagttctgagacagggat

SEQ ID NO: 1836 - DNA, 390 bp, Homo sapiens
tacaatggctctgaaaaaaatttattgatggatctgagaattttttcacacatgaatcatttctccttccaatggttattgatactgatagaagttccccgctgagactccctggacccatggtttgtgcctgctgggcatcccactatgctgattcctactctaaaagacacttacagcagaaagcattcacccatgaccattatgaaggaaatattctgtccctcactcaccctctggaagctaatatggagcagcagtcactctatccagagccacatgttcacagttctctagcaagcaggtcacaccccgtgggtcccctattccccgtgacccttgttgatccatcctcttcctgctcagttgctcccctgctcacctggactg

SEQ ID NO: 1837 - DNA, 370 bp, Homo sapiens
tttttttttacaggtggcactgtttattattgagtttcatattttatattgtgtattttatatttataattagtactagttacacatatgacatggacttcttcaaatcaaattcccagttatgaagctctgcagagaccgttcccacagcctgactacaaagatcaggcacctgaagacgcatgtcctgatggatacattcagtgctggctgaaaagccaacttcagtgtgtgccctaccactgtggatatttaaataaaacaacggtttttcaaaccatgagtcagctggaaggatgcccacgccacgcacactgcagcactgggagctgcactgggtggacgggaaggacgcaaactccaagcagct

SEQ ID NO: 1838 - DNA, 403 bp, Homo sapiens
attaatgcaaacatatttttattaaagaatgaatgcatttatgctaaagaatagcttacatatgttgtaaagcaacaagcatatcttcaagaagtgagtcctcctcaatatgactccatgcttattctacatgcctgaaaactgggcccacacacaggggcacacgtacacgcacacaaacgcagatacggacacacagatatgcagaccgaaatgctgacaccatcgctctctagattggattagctctcatttaaggcttcttaggtgccgcagtgcccctaatattaccaggattgaaaacagacttttaggaaggagcagcattacttcgaaaagtagtcatctgctcttgtcctccaatgtgtgtattttaacaaataccatttaattctatgttgac

SEQ ID NO: 1839 - DNA, 504 bp, Homo sapiens
tttttttttcgctacaaatcaaaaggctttattccttatataaacccacacttagaaaaaataaatagttaataaattataggcaaaccagttggtctcagccacgcctcccactgaggtccagggcagccgctgcagcagcagacgagcgggaaggtgtggccacagcttggctcaagggcgtggtctggactggggacgaagggacagaggaggaaggcaaggtctgggtgagggcagggatgggggctaaaggtgggttcctgaggcgtgcccaggctctggcccgggcagcaggggtgaggcaggggctcagctcctcctgggcctgggtgatgcggcgtgcgaacggctgcgatcccgagcaagctgctcccaggggccctggcgggcggcctggggcgcctctgcccagacagccaggaaatggacagtgaccttctcggagaagcgcacctttctggcctttaggggagtctcagggtccggatcatgagtaggggt

SEQ ID NO: 1840 - DNA, 427 bp, Homo sapiens
tttaacatttaagacagcttttattaaatacaaaagcaaaataagctctaaggagtaaggtagggctacttaagggcgttttctgtggacagcggacacagcaccattaaggttagcttagatttgaacaaaccatgagcagacagctaactacatgttatgtttctcttagtagttttagggtctgcccagtaatcaagaaattttacttctccagaatacatgaacatgggaaccaaagaaatgtaaatatttcgaaaaagcactacacaataaaatgagacgcaatccttatgcaggtcaagatgttctccacatctacaatgtgcattaacaaaattaatgcagataagaccttcactccaaccccaaagatcttacatggttaatactattttccaaaatcagcagaacaagctgcagttac

SEQ ID NO: 1841 - DNA, 362 bp, Homo sapiens
aagatctataaatatatttattataatataacaagaacttaacagtaaacatatactatgtacaataccattacagagaaccctgttttatatcattcacagaaatagccagttttgctccagtgtgatagatgaggagagaaacgaatttcaatgtcatctgtgttgagtctcgctgacaactagaacctcctttggcgtcagacgcacaccaatgctaacattagccctgccccaggcagttaggaatttgtgctccagtccttgggttcacacttgcaccctgtttgacataaatactttaaatgacatacaatgtatgtagttttgtgcttattactttttaaaataataaataatat

SEQ ID NO: 1842 - DNA, 476 bp, Homo sapiens
ttttttttttttatgatttcacattaagttgtctaatttgctttgtggtggtgggttcatcccggtactacccataaacgaatcagtaaatgagacttagtttccaaccttacttcccgactagacaactgcatgaaaaattggatagcgaattatgagtccaagttctatagctggcatagtcctcatgctttagccccagcctctgagcttagcagaagacattttgggtccttatatattgctagtaggattgtataattcttgactgtgttgcagaatcttacaggactacaaaacttaccatgatgtgtcttataaggaagacttgccaggcaaattttcgggcaagccagcaaaatagttaaagtaagagtaaagaggaacacgtgaatgatggggagttggtctaggaaaatattgtgaggaaaataaatgaaattctatggttagccaaatagacaaagatagcttct

SEQ ID NO: 1843 - DNA, 153 bp, Homo sapiens
tgggtttgaaaacatgtattattagaggcacatgtttaaaaacaagtacagtatgaaatcttccttttcagtgagccagtgaattttcattcgtttgtttgtttctatgaatatttggtttacttccttcttctgggcaagattagtatgcaa

SEQ ID NO: 1844 - DNA, 486 bp, Homo sapiens
cctaaatgtttcaatgccataaagcttacattcccttgaagcagagtacaggaaaccttagcaatatgctaccatccagtaggatataaatataaagaagctgtatcagcaagggatgctcagggaatgtgtttgcagcccgtttcacggtagccgcttgagaggggatattggaagtgagtgactttctttcatttggcaaagtttccttatctcagcacctactctttctgatggtatgtttttgaaggctgcacagtacgactctgggtaccgtgtgtacatacatatgtaaggaataacgtttatgttgctcagaataggcactttttgaaggcagtaaatctaaaagtaaagttaatagagcctatatttagtgctcatcttctcactttgctgatgtgtatgctgaacagaagatcacagatttgagtcagtctcgcaaagaggccggagtcgcaaatggctatattcagagctggggaa

SEQ ID NO: 1845 - DNA, 307 bp, Homo sapiens
attaataattctctatttattaaaaagggtcctacagctttacagccacagcaccggacacggccctggacagcgacggcgagcccggccaggggccgctttgcaacttcaatgccaagctcacgtctggctgcgaccgtggcaggctgtggcatccccgacagcggccggtggcggaggtatgggggcgggtggcaccgctcactcgagattcacagaacatggcaagcccgcctgactggcatggcagtgaatcgtcctgtacagcttcatttcaagaaaacagttaacagtaggagttcaaagt

SEQ ID NO: 1846 - DNA, 228 bp, Homo sapiens
gaccacagaagtttttattgccctcctgctccgcaaagggaccttgcttctgctggtttagcacctcaagacgtctgtgatgttggtctcagacaccactttgccgtccactatcctgtgggtgttggtcttttggatgctttacaggtatttgctgctgtccagaataccaccaagattgaagtcctccccatcttctaagcaggcggcaggtaaggtggcaatctc

SEQ ID NO: 1847 - DNA, 427 bp, Homo sapiens
aacagtgagatccacctttattgaaacatcacacggcagcatcagggctcccacacctcacagggcagcaggcagttcacaggacagcaggcagttcacagggctttgggggcctcacagggcagcaggtggttcacagggcttcggggggcctcacagggcttcggggggcctcacagggctgcagggggttcacagagcttcaggggcctcacagagcttcaggggcctcacaggactgcaggggggctcacagggccctgtatgcagggctgctggtacaaagaagaggcccagagaaccctaacacagcctggggccccggggaagtcagggcttccagcagggcaggtacagaggcccctaggacttggcaggagctcagccttggggacagtcccacggaagacgctgcatccgggctctt

SEQ ID NO: 1848 - DNA, 491 bp, Homo sapiens
attttttccgaagtgaaacacgcagctttattaagacaggggcggtagaagaaggtctccatgctgaacagattacattatggagcccgggagcctgggaaggatggggcaggagagtgaagggggctttgaggagaggtcctgccaggaacatctgtccctgttgggggtgaagggtaagggggccagggcctcagaagcggccatgccagtgatcaggggaacaccgatggttcctctctcggggatggtggccagtatggaacctcgggggtgacctgcgcctgggtccccgcccatagagctgcctctggaggttctgggaaatgggccgcagatgcatgaagttgcagaagccacctcgggtacattcccgtgcacacctgcccgttgaaccacggttactgagttcagcacggcccgctcttcaatctctccctccggaacttgacatagacgttggccacgaggtggtccccaaggttgtcgca

SEQ ID NO: 1849 - DNA, 434 bp, Homo sapiens
tttttattttcaatcaaatttctttttaatgaaaactaatttttaagggcaagataccacagcagaagaaaaacctcttgcaagaaaagacttcatggtttacaacgatcaaatgtatgggctatttgcctgattggtggcctggactcagcaagagattcctttgcagcagaggttggccacacatctgggggctgcaacaccactgaaaagacagctttctaagcattagtgtaaggcaaaaagcagagtgcctaaacttgtccatttccaccaagaaaaaaagtttcatagcaaccttccttcaccagaaaggcttactttatgatatgctaacagaacagaaaagcaggttgggacaagatacagactttgttgcatttagctatgacccttctctcccctctgtggatgtgggcagggtggggagaggc

SEQ ID NO: 1850 - DNA, 238 bp, Homo sapiens
ttttttcaaatgcattctttttatttgagaaggatgatctcaaggcagtgcccgtttgggaaagatgtctttcatcatcatgtacatcaggatcaaccattactttcagcaaagtacaaaaatacacacgtcagtgacttccgtacaataaatacataatcatgcatcccacaataaaaggcaccgaaaactggtcacttagtagtcataaaaattactagctacattaacaaaggcc

SEQ ID NO: 1851 - DNA, 434 bp, Homo sapiens
tttttgggtagggatggtatgaatttaatattttttagtattacaatatattcttataaaaaaggtgcaagtgaaaaaggacactgtagattatgtccattagcctcatttgtcatctgaggcagctggtgagaacagccttgggtcgaaggcatccctggtagaagtcgggggagatagatagtcacagttccccagttggtggaaatgggatgggagtagggagaggctggaacagacccttccccattcacctggagaattttctcctcccactgccctaaacactttatttccatcacaggggagaaatgctgctgagaaggttgtgtttgttaggttgatgacgaattttacattggccacaaaattagctagagaaacttatctaaaggtggcaggagcagtggggagggcatgaagaaagcaagacc

SEQ ID NO: 1852 - DNA, 404 bp, Homo sapiens
  misc_feature (1)..(404): n=a,t,g or c
ttactgacacacagctgtattgtttatttgctgatgtgagtattacggtactcatccttttgtgcatgtaaggactcatttctcctggatgtgtaagcaagagtggaaatgctaggccatagggtagatgcgtatttaacttgatgagaagctgttcagtttcctgccgtgggtgcaacaaagcacatttgcaccagcagcgcctgggagctgctcttctccgtatccccaccagcacttggtactggcagaccttctcctctgagctattctgatagtggggcagtgcgatttcacggtttttaatgagatgtggagcacttttcagaggctggcctggtttttgtagctgccctaggcacnctcgaggagggatgggaggggggttggtgaagaggatgttc

SEQ ID NO: 1853 - DNA, 421 bp, Homo sapiens; identical to SEQ ID NO: 46

SEQ ID NO: 1854 - DNA, 339 bp, Homo sapiens
ttttttagaaaagaagttgtttttattttaattcaagagggttggaaacataaaaacagtacattttccttgcagaaaattaccccatttaaattactatttggtacagagattatttattacactgcattttaggcaattttctaacattaagtgacaagttatacttttgattttttttttcacattggagctattatgatttgcactcataataccaaagctactgaactcaccaatttttttcttagtaattaaaaaaaagcacacagaaaatataactacaattagattaactttatcaaaagtaactctttcagaccaaacatccagcaaaac

SEQ ID NO: 1855 - DNA, 368 bp, Homo sapiens
tttaaagtttttttcagtttattatttcatgatccctagtcaaacactgataccccaaaataggattttccttccttcctctgaagattatttcaaaaaatccaagaggaataacagactttctggatgctgctctaccatgttcttctgttaaatcaagttccttttcccgcaattgaaggatgttgcagatgtgaaacgtgtggtaaagaacattgtctttgctttcaggtcccacctggccctttctggccgtagctggtactagattttgataaaagtatcctaatactcagggactatttctcaaagaccagaatcccaagagccagagactggatgagagacaccaagcacaagacagcaat

SEQ ID NO: 1856 - DNA, 337 bp, Homo sapiens
tttttttttgtagttcagaagccaacccttattttattaaaatgtgtacaagagatggggaaggaaaaggaccagactgtactgtggccatgtacacaaaggcatgcaccacatcccagctctgctgccctgggctgtcccacaggcagctctctagaacttgagagcctcaaaaggggcctcatgaagcccagatcttccctggtcaagctgatggcattcgtataactgaaagttggggaagaccaccaggtcagtggagtggagaggttttgtatatggtcttctttgaagaaacttacttcttgcaagccctggcatcttccaattggctgtc

SEQ ID NO: 1857 - DNA, 412 bp, Homo sapiens
tttaacaaaatgctttatttctatttttaaatgagaggcattcccatgaaatatcaaaaggcatttacatgtgttgttttaactcttcttttttgatcacacaaagtaggtagaaaagatctgctgaaatagagcaaatcagaaaccaagtagtgtaaggcattaggagatacatgaagagaatcgctatttgcttcttgtacagcgtgtggcaagtcatggttagtagtcatcgtagttgacgctggctccatgcctaaagccgtaggggctccggggaccaattgcagagtcttcatcatagtgacgttggtagtaatcgccatagtattcatgtccatttcgatctctgttaagccaataggtgatgtcatcttcaaatttcgcttcgtcaaagcccatgtagagaaac

SEQ ID NO: 1858 - DNA, 346 bp, Homo sapiens
tgcggccgccctccgtggaaaaccggccaaagatctcagccttcctgcccgcccggcagctctggaagtggtcggggaatcccacacagcggcgtggcatgaaggggaaggcccggaagctgttctacaaggccatcgtgcggggcgaggagaccctgcgtgtcggggactgtgccgtcttcctgtcagctgggcggcccaacctcccctacatcggccgcatcgagagcatgtgggagtcgtggggcagcaacatggtggtcaaggtcaagtggttctaccaccctgaggagaccaagctgggcaagaggcagtgcgacggcaagaatgcgctgtaccagtcctg

SEQ ID NO: 1859 - DNA, 443 bp, Homo sapiens
gacagacattcaagacaaactgtattggaaatacaataatgaattttggcctgatagccctcatgctgtcttatagcaaaacactaaaattcatgcaacagagaaattggtgacatgaggactttttctccagacttcctggggaaaaactgtgagaatatacttttttcttctgtttgctttcgaaatgcattctttcttttgctgactttcccaaactttcccagtcgtttctgatgaaaaattcttcaataggaaaagaccaggtaaacttacatgaaagacatcaagtatcttttgagctccttctctctgccagaggagcaatcaactggattacacaaaactaccttcacaactaaaacaggtagaattggaacaggaattagttgtcattaatatactcgtaataaaataaagcttgttctgaaaccacaaggggt

SEQ ID NO: 1860 - DNA, 453 bp, Homo sapiens
ttttttttttttcattgtacaatatctttattaaagaaatgcattccagcaacactgtcagcatctttattaccaaagaaatacataactttaacagataatctctgtatcttagtttttgcctttgcaaaacaaatggagatatatcaactctcatacaattctaaaagcattgtgctgtgctgcctcacaggggtacgttcccagaggtttctctctctagagcaatccctaataggacaattgttcactctgaggcttctggcttcttatctctcctctcttggggagctgctgcttctctgtaggttgcttccctgtgacgcagggaccatagtttctgctctaataacaccttttccactctgacgtagctgagccatacactacattgccttagtcctgttcaccctttggtgattctgttccatttgccacctggcctcttcctcc

SEQ ID NO: 1861 - DNA, 422 bp, Homo sapiens
tttaacaattgcaaagattttatttagcggctttctgtgcttggccttagaaacagagttccgtgcataagggcaaatttttgtacaccttttcttcatacatattttacatacccttttattgccccctttttcatattcataatattggattccccactaggcacataaatacatttatctacaacacctcaaaaccagaaactttaataatatctgtattattttacttggtattatttgcatttccacaccatttaaaaattttagcttgcaccaagcttcacttgctttcttaccattaaaagatttgaagggaaagggaaagatgaaggacaaaacccaaaacttcaaaatgcaatgtactatttgataaaaatggagatctaagggcaggtagaagggtatagaagacccatctg

SEQ ID NO: 1862 - DNA, 514 bp, Homo sapiens
agaacaaaatatatggtatttattaaacacatgtgacataggttataatatcaaagtagagcatgcatgaacagatgattcattcgtttaacaaaaacaccaattgatactgagaacactaaattattaaatttccaagacatataaaattctctttaagttaaagtgagaaagaaaaaaaaatcacaagttgaataaatacagtgatttcagctggtccaatgaaagcataaggcacaaattaaaccaagggactagcgcatcagaatgaagcttgtctggcccacacaagtctctcagtgtggctcccacgaccctgcacagatgcttgggaccaagaggaaagagcacctgcaggccgggaaccctcccttccaggttcaagtttggctgggtgcccatgcttcttgtggacaggcctctctgtatcagagaaacgctgcctctaatacttttatgggtaaacaaaaccttcatgctctatcaaacaatcctggcatgaataacatgaaac

SEQ ID NO: 1863 - DNA, 401 bp, Homo sapiens
ttttacatttggaaaatatactttattcaataatataaacaatgtagtagatatatttgattatttaataatcattttaagtttattgtacagatgcacatgtcaataattagtgtttttcagatgggatgatatacattctgcttttatttttatctctttggtaacaattattgacagaacaatgaaacaaagataaattgttttacagttgtaatacccttgtatggtaattctcagcctcttttatcttatattctactagcacttacatctaataggtctcaataaagtagaaatgtaaaagtatgtattttcagaaaaggtcatatttcataaagattctgttactatgttagtcatttatcataagtgttaagtctaagaaaagttgtaataga

SEQ ID NO: 1864 - DNA, 408 bp, Homo sapiens
ttcattttgcaaatttaatgtaactctgataccaaaatatgacagcacacagaaagcaaacaataaagcaggaacagcaaacagatttttccatcacatgacaccctcagctgattggccataactgccttgactgctgtgtggacaaagattccaaggatgtactttggctccatgggaaggactactgcaatttattagcggtatctgtaaacatggggaataaatctgaaacctcactagccatacgagaagccacaggcaccaagactggcggctccactgccaaagccagcactggtgctcggtccaccaccaaagccagcaccagtgtttggtccaccgccgaagccagctcctgtgctcggtccaccgctgaagccactggtgcttggtccactgcagaag

SEQ ID NO: 1865 - DNA, 175 bp, Homo sapiens
tttagaatgttcatagcagctttattcataatagccaaaactggaaacagcccaaatgcatagtaacagaatgagtaatttatacaattcaatactgtatacaacagtatgaatgaacgaactacaacatgcaacaatacagatgagttgtatagacatactgttgagtcaaaga

SEQ ID NO: 1866 - DNA, 478 bp, Homo sapiens
ttttcccagtttcaggtacgtctttattagcagtgtgaaaatgaactaatacagactggaagccttgtgacaggaaaactgaacatctgagacatctataggaaaaaaagatctgcttacatccagtccttggagttccagtagactgatttattcaccaacagcattgctcctccagctccattccaggagacaggcaccccagaagtagcaggactggtagacatcactagtattgtatatgtgttgtgcatgtatgtgtgttgaagaagaggatggggaaaacaatgatggtggtcaccaggtaagatgggacccaggaagggattgcaagtccaggccccatgaacacccccaaagaatgcccctcctcttggaaataaaagtggttctggatccagggagatcaacagttgcaagctgatattaagagttgtctattggatctgttctaagggatatgttatgtgaagccaat

SEQ ID NO: 1867 - DNA, 408 bp, Homo sapiens
atcttaagagtctttatttaacacatatagtacacattttcagtcatttcatcatcatccaagtacattaagatacatacccatgtatattacaaggcttattgttcactcatcatcttccctttctactttaccttctcatttcttgaagtctctattctcattaatttgttatttagttacagtcctcttttcagtttcttcagatggggatatgcagatgatagattcttggaatcctttctgcatccctttcactctggcaggtgaatgatgcttggctggaaagagacttcttggttactttccttttctcttaacaggtatagatatgattccactgtctgataccagtccaattcttttcccattgcaaataacttctttctgtctggaatcttatatatt

SEQ ID NO: 1868 - DNA, 110 bp, Homo sapiens
gatccctgaagttgccctggtctctgcaccttctaaacctagttcttaagagctttccattacatgagctgtctcaaagccctccaataaattctcagtgtaagcttctg

SEQ ID NO: 1869 - DNA, 223 bp, Homo sapiens
cagaaaactaaagcagcacctttattttatacatacaaacagtataaaatgtttattaggtaagagctgtgttttstttacaatatattatatybscttcavrcgccaatgcaaaavvgttcatacattatattccctatttcattgtgtttagaatatattatattgtttaaatgmcactaccacagtgtaatttttttttttttaatactgaatctctgga

SEQ ID NO: 1870 - DNA, 293 bp, Homo sapiens
cgttcgttaaatctttattgaygcgtggacactcctbcccctccagccccgccccccagccccagaaatactagaaagcgcaccataaaacgagggcacgagattgtbgtcccattcacgacggagctgagggggaggtgtgcaggttccagcctagatgttcaggattgagatgtgggtcgtgaaaggaaagtgggttttccgggatgtgggggcttttctvagcactgggtccactgacgctgctgytcccaaggggatgctaggacyccgytcaggcaggggtgggctcg

SEQ ID NO: 1871 - DNA, 517 bp, Homo sapiens; identical to SEQ ID NO: 104

SEQ ID NO: 1872 - DNA, 229 bp, Homo sapiens
gcataaaaaacacaatgvtttaatttctaaagcacttatattattatggcatggttttggvgacaggttattatagtccacataggtaagtatgcagtgcttctcatggaaaaaatgcttaggtattggccttttctctggaaaccatatttyyccttttttaataatcaactaagatgtatatgtaagacrgcctcatcttttgatttttaatatacaagatgctttc

SEQ ID NO: 1873 - DNA, 293 bp, Homo sapiens
gaaacttcattaaggttttattcagtgtagcaattagtgtcttcaaaaataaagtaagtggaagcagaattactttaatcaactaacaagcaataataaaatgaaacaaaatatttgttttctgtgtctcatttttttgttgtattttttatattttttatattttgagacaaacttttgctcttgttgcccagactggagtgcaatgacatgatctcacctcactgcaatctccgcctcctgggtgcaagcaattctcctccctcagcctcccgagtagctgggattacagg

SEQ ID NO: 1874 - DNA, 263 bp, Homo sapiens
  misc_feature (1)..(263): n=a,t,g or c
aagggttgacttagtttattgattacctgggacctaactcatcctcacatcgccaggtgaattccccaaaactctcatagtgctggttatagtggtagaggacccggtgtaaggtgggggaacccagatccaggagggtgttgtaggcggtctgctgctccttcccactagtgtagccattgaagagattntagatcttgtctgctatttcttgagccttgacatcatccaccacggggcatggggtcttcacgatcacgtcg

SEQ ID NO: 1875 - DNA, 289 bp, Homo sapiens
  misc_feature (1)..(289): n=a,t,g or c
ganttgnnccnnngtataaaaatgtacagtggttttattgacatgtacattccaatatgtttacagctgcaagataatgaggcacactcagtattgcacttcattaaaatttcaggctcaaacttaacctagaagtttaaatgaaattgcatttgtaatttagtaattcttatacaggacaaacattgatatgtttatatacagtgtgatacttattacatttatatgctgtcctaacacaatgtttttttttttttnaaataacagtctaggggaataaaccagaata

SEQ ID NO: 1876 - DNA, 402 bp, Homo sapiens
  misc_feature (1)..(402): n=a,t,g or c
gagatacaaggttgaataaaatacagaccctatcatcaaggataattctagtgacaattatatttcacattatttctgtcaggtcttgataatattttaatcacaggaaccaccatagcagtccagactcattttattatttatcatctctcagtaactgctccgacagtgggcaacaaagggtattgaatacttatatttcaaattttaaaatttatgataatttgggagggaggtgaaaaaaccttactagggaaagacaaacattcattattctacggtgtgtgtgaggctcatgtctcttactcttggcatccgggggnattaaggtacaggccctcngtgtaggggngttcccttnaagggaaaccacctttaatggcatttnaccccccggcacat

SEQ ID NO: 1877 - DNA, 460 bp, Homo sapiens
  misc_feature (1)..(460): n=a,t,g or c
ttaaagacagagtttcgctcttgttgcccaggctgtagtgcaatggcgcgatattggctcactgcaacccctgcctcccaggttcaagtgattctcctgcctcaccaagtagctgtgattacaggtacccgccaccatggccagctaattttttctatttttagtagagccggggtttcaccatgttggccaggctggtctcgaactcctgatctcaggtgatccacctgtcttggcctcccgtgctgggattataggcatgagccaccacgtccggccaaattttacttcttaaaagtgcttttctctcagtgatatcaaggtcttctgtctactattataaccataagcttctttaggcattaaggagggaaaatgtttaataaaatgtaattaaactgggatggaatggtcagtgtatttaaatgtaaatatacttaaatgtaattaccggggnggt

SEQ ID NO: 1878 - DNA, 383 bp, Homo sapiens
  misc_feature (1)..(383): n=a,t,g or c
catgtttatttgaataattgccccattgcacaataaataaatccgctgagtgtgtttgtttgaatgtttttacatgtacatgggatcacatagtcaaataaatgcagctgtgtttattacaatgtgtggggctccagatatacacacacttgtttgngtggatatccagggccctacagcccctgaatggcctcacacatcttggagcaaaagcatggttaacaatttttcagttcaaatacatgtaaacttattattgggcagtctcctcaaatttgtgactaagatttgcttttantaaggcttacattantagaaagntaaaaaatgacctttttaaaagttatcngattgtgaaaagtatctaatacatttatncataa

SEQ ID NO: 1879 - DNA, 616 bp, Homo sapiens
  misc_feature (1)..(616): n=a,t,g or c
aatgattgtttttttattaaataatttctccaaaatactgaaaataacaaataacattcaaaaagcattcaaagaaaacaaaaacatgtcctcattttatttggaaataaactcttgttgtaggatagaaaggaattagtgtattattggcaacctatgagattctgcactatttacatattgctggtacctctatgcaaactattgccaaacttctgaagcttctgttgtcattcaactgctgggggagggctgtatgtgaaagtaacccgctattagatggtgcctttaaggatgtaagcaccaccttcctgtctcctgtttacatactttacatactttagtggcaaggggagattgagtaaactaaacctgcgctgacagactcactgttggaatgagaagggtggtcagaatgggaggcagaggataacttcctctgtaatctcactgggtcagagcctcagcaaccttcactggcacacaggaccagtctccatctccctcttcccctaagagcaaactggttggggttctgagaccatcgctgcctggtatgaatgcntggtacaactataatcctataggtatccatcagcattctttggnccccaan

SEQ ID NO: 1880 - DNA, 461 bp, Homo sapiens
  misc_feature (1)..(461): n=a,t,g or c
aagaaanacccatttttttccttaaggacttactagccaaaatttcttaaacttcgaggactctactagccatggccgagccattcttgtcagaatatcaacaccagcctcaaactagcaactgtacaggtgctgctgctgtccaggaagagctgaaccctgagcgccccccaggcgncacggagcgggtgcccgaggaggacagtaggtggcaatcgagagcgttcccccagttgggtggccgtccggggccggacggggaagggagcctggaatcccaaccacctcccttgcagacccaggcctgtccagaatctagctgcctgagagagggcgagaagggccagaatggggacgactcgtccgctggcgcgacttcccggcncggcagaaagtggagccgacgcccgaggccgagctgcttgnccagccttgtcatgactccgagggcagtaagttgg

SEQ ID NO: 1881 - DNA, 368 bp, Homo sapiens
  misc_feature (1)..(368): n=a,t,g or c
nttgcacttggggtaataggtttattatctctatatacaagtaagcatttattgatgtttgtcaaaaataagagacaagataacaaaaactattttagcatgaaaacgagatagctgcaatagactaatactgagcttaaagactccaaaaagagcacagaacctgaaatgacagttttcaggttgtatagttatccagacaatgaagtcaactatacaaggcaagcaacacatgacaataaaacaccatcaacagtttcccactggaggatggagggaggcttgctggggcctgggnaactangtgggaaaaatatttaaaatctcataaatcctccgtatcctttttttccnatttcagggaactt

SEQ ID NO: 1882 - DNA, 454 bp, Homo sapiens
  misc_feature (1)..(454): n=a,t,g or c
gaggaactattttctttattttcccaaggatggtacatggctgtgcattnctagatgcaaacgtacaatgcaaattttccagatgcaaattgggccctaatgccgtatctgttgtgtgttaattcagggctcaatgttctgcaaaaccagttgagaggggctggttaagaggaatacatgaacataatgaggagaaaaacaaaatatatatatatatacccaaacataatttccagggggaaaaaaacccacaaaatccaaaatgaaaattcactggataggattcatagcagattaaacagcagcaaaagaaatggttatnggggatcgggtgtagtgcctcacgcctgcaatccaaacactttggggaggctgaggtgggcagacagcttgagtccaggagtttgagaccagcttaggcaacagggcaagacctcatctctacaccaagtac

SEQ ID NO: 1883 - DNA, 599 bp, Homo sapiens
  misc_feature (1)..(599): n=a,t,g or c
tgcttattgatttttttaagtctgagggaaattacccaaaatgtgtcattccttaacatttaaaaatatgttacataaaaatgagcaactgtgataacaaataaaacttggagagaaaaaagttggctatttccttattcaaggagacagagctaccagaatacatcaagatagcgcacaaattttttaaatccactgccacttctgctgaaacaaaagtcaactgataagaaaattcccattcaaaacaattttaattgtactgttaactcttcctccattttttaatttcatgaagtcataatccaatctgagttggtctgttgggcattagcagacatagtcactggagaggagtgagatgatgtcagagcatggggcacagtatttataaatgtctcctttaagaaagtgtaagtagtatcaagttcagctttcaatgggtaagaaatccccaataccagttgtgtcagcaggaaggaggagctcttgaanggatggagagatttggatgggcccgtgatccnattggattggtnaacctgcattttccccgttaacaagccggtgtggaagtccggtttccaaggctgccatnt

SEQ ID NO: 1884 - DNA, 491 bp, Homo sapiens
atacaagaagtattttaattattacaaaaacaaaggaggcaggtactagaaattctgcatttcatagaagagtaaaactttgttagagatattttcatgatcatctacctgcagacaccattcatttaaaaagtcctagtcaagaccattaagcagctgcatcttctacaacattgaaaaaaaatccctagagatttaaaaaactgaagaatttcactatctttaaaagatattatattttagtacataaagctattaaatttctctgtgtcaagagcaaaacattaccccttaccttgcttcatcattggaaggtggacacctgatccagcaatactcattaactgctaggtagatgacccatgttgatggcagtaaagccattttacaatgaacttatgaagtagtaacactagccaaacacacagagacacaaataccaaaaatgatgtgtttagtatacacaaatagctatacttggggcatgggtt

SEQ ID NO: 1885 - DNA, 417 bp, Homo sapiens
  misc_feature (1)..(417): n=a,t,g or c
caaaatgaaaaaaaatttatttcctcagtgttttatccactgtcaatactgtatttttgatgcaatatatttgccaaaagaactcagcttttattttccattttaaacaactacaatatttacaagctgttcagaataacactcagacacacacacactcanagacacacgtaagtacatatgtccttatctctggtttatactgaatgctggtaaaggccatgaatactttccagagcccatgatcagaaaaggaaaacccattttcctttcttacgttcactttcctagaatcattttcaatattcctccttccatttcctcatgcagagtcattgccagacttgtataggtttaatcagtttttacattttacttttacttaaactataagcttttaaaaagcataagcagaca

SEQ ID NO: 1886 - DNA, 444 bp, Homo sapiens
  misc_feature (1)..(444): n=a,t,g or c
gcaaanaatagcagccttctattttaatgaattttacacaaaatgatcatcctaattgctactctcttttcaactacagtgcttacagagaatcattaattttcagattaacaccatttcaatttttattcttaggcaactctattgacactttccagtgaaacagtaaagaacatagagcaaaagctttaaggtaccatacttttgtatggtaaataagtatgaataccaatctaagcctcttaacaatgtgtacaaggttagtgctcaaaccacttcactagagtaaatattaattttacgtgtgataggcaaatgtatgtggagggttagggaacaacttattaccatttatactaatggttcaccttctataaaaacagtgaagcttgttacatacgcacacttgtttgctgcaatgtttgggcaaatgatttaaagggg

SEQ ID NO: 1887 - DNA, 595 bp, Homo sapiens
  misc_feature (1)..(595): n=a,t,g or c
gacaaaaataatcttgtttttattttagattcagatttcattactgcactcaaacgactacaactgggcttggcgttattatacaatccaaactgtttccatcagaaacgctaagactcagtgtgcaatgattgttattaataattagctccttggtttcttgatagaaaaaggctatcaacaagcatttgtttatccacaacaaaaagtataattagcttatcccacttagtaaatcttgtatgcatgccaactcataccaaactgctacttttacaaaaaaaaattgcaataatacagttcatttttccagtcctttttgcacaaaatttatttacaatgtctacataaatgctccaaggtgggactatgaaaaaatacacacatgaccgatgctttgctcagaaataaagtcaacatattanaaataaatcttcagtctatgttttagagctgcttaaaacaggaagtgatgtataaggtgggtggttgtggcatgggggacaatggatgcctggatgtgacaattagggcttctaaacacacggnctttgggtttccatgcctcctnctaccagtctccttaagaccctgc

SEQ ID NO: 1888 - DNA, 341 bp, Homo sapiens
  misc_feature (1)..(341): n=a,t,g or c
taggttttcaatacactttaataaaatagtgaaaaataggtatctctaggatagtgaactatgggactacaaagggcaggacgatacattttacttggtgaaattcgcttaacgcttactcctttctcaaagcgccaaccaagaatttggctactaaataaagaaaaaagctgttagtggctctttatccngccacgatanggtgctctgaaacccggtcctgnaagacattcccttggcccacattttatagnttccttctcagtctcaaggnctgtagtctactgttcacactcgagnctctcgcaaaatacacaagctcaaaagctcatggcntttct

SEQ ID NO: 1889 - DNA, 405 bp, Homo sapiens
  misc_feature (1)..(405): n=a,t,g or c
ttttacattgacaggtttattcttaaagcttgaacaaatacatctttacacacacacaagttggtaaaaagtaagcccttactgctttgttaaaaataaaacccatacataaagctttccggtcaaattcccgaaacatgaaaacatcacatttctacaatacatctgcttttttgattcatgtgtgttttcaacacaactcaacaactcattccgatctacccaaacaaagagaaaactaacttccagaccatgaaggaaaaaaaaatacatgcctcttataactgttaaagacaagtagctatagaattctngaaaattctcaataaatagttactagtataaaaatgcttaactccatatagctcacctttaatccaagggcagtaccagttatcgccataa

SEQ ID NO: 1890 - DNA, 507 bp, Homo sapiens
  misc_feature (1)..(507): n=a,t,g or c
tttctattaatctttatttatatgatggttctctggaaagcacttcattttaaaacctgtttctgagataagtagcataaggcgcatttgaagaaatactattgttgtatcacagagaacttccatgccttgaaatcatttttttcagagtattattaataagatggtctagctatgcagagcaaaaaagaaaaaaaatcttcaaaagccaagactgtcaggcacatgaaggtatgcataaactgtcttcacatttaattttgtatgattcgggagatacctccatgtacatctaaccaggtcaggcagcataagtcctcagtaaccctggggtgtgccggcttcaagccaaagtattctgttgagtttggtttgtggagagacatttgaaatgttgcttcatagcttccattttctggagaagtggaagaaatgaagcgtnaaaaggcctaggaaatcctcgtcttctccaggctcttcttctccttctgcagnttcctcctcctc

SEQ ID NO: 1891 - DNA, 414 bp, Homo sapiens
gtcccacaaggatttcccagtttaatatggaaggcagaacacacatacatgaaaggccataggaacaaataccaagcaatacgtaacataaaaataaatgtacaatgaagcctcactgcttcaaatgctggtaatctaatctctaagataaaaaatatgttccctagttttgctaacaccattcatttacgtaagagaacaaaatatttcaaacactttagaggtattattaatatatacatatcaaaagcaatatattatttaaacaatttcaggcatacctcattttattgcacttcgctttattgtgttttgttgacattgtatgtttttcagatagatggtttgtggcaacctgtgttgagcaagtctactgggcaccatgttttcccaacagcatgtgttcacttcatg

SEQ ID NO: 1892 - DNA, 440 bp, Homo sapiens
atatgccccaaacatgatacttatttattgataattcataccctgcctatttctcaaaaatgacttgagaaaaactgcacaacatagcgacaatacacatacagaaattaaaagtgaaacaggaatacatagagatataacacacaaacatcaaactatgattagatcaggtaaatgagtgttctgaactgctttggtgtcacagaggcatttaaaaatatagtaaatactacagatccttgtcccagcaaaattccttcaagcacatacccagctttgttcgatccctaggggtctgcaactcctaaacccctacatgctaaagactcctaggcaggccatggacccccagattaagaactctaaagtaaatgaaagtcagagaaaatatgggatttgaataaaataatggaaaaaattgagttaacaaatagaactgg

SEQ ID NO: 1893 - DNA, 451 bp, Homo sapiens
  misc_feature (1)..(451): n=a,t,g or c
attattaaaaactcatataggatgctttatttatagatacacagttaactatgtacaaaataaaaaaaaggaaaaccaatctactaaaatatattaactctaagaaaatcagatcttattcctgtttctccatactaggcataattattttcaaagctatacaatacgaagtttatcagtcttatctgtttgccataacatcattatgaattttctcttttaaaaatggcaataacaagtgacttatgttctaataaaatttggatcacagctagcaaatgaaagactatgagactcaatcacttttaatcattaagtttgtgttagtctttattaaaaacaaaaaataactaaaatttcagacagcgatgtacataatatatatnagaatatacccaaaaaagtaaatttctaccacccctcgcacagccggaatttccatgggggtatt

SEQ ID NO: 1894 - DNA, 437 bp, Homo sapiens
  misc_feature (1)..(437): n=a,t,g or c
gagactgcatagggctcggcgtggtctggaaggaggtaggaaaagaatgaaatccattcccagggactttctcaggtgctgatttaagataaaatgcaaatgaggtagacacagttcctagcctcaggaaggacaaagagaaggggcaggtttggataatctatatgtcagatgacaatttattcaacgaatattttttaaagtaccaactgctagcagaaccctgcactgctcacagcaggtggagcaggtggcagatttcagagtcacttgctgtgctgtgacttggagccaagcccccgatttcccactggacagagataatgaacacctagtttcttcatccatgtggactcagcacacagtggtatttggatcacnaaattatcctggtactataggcgaggtacaaaccctgttaaggttgagaaggggca

SEQ ID NO: 1895 - DNA, 463 bp, Homo sapiens
  misc_feature (1)..(463): n=a,t,g or c
cgttgtaattatttattctgttactggctgcttagtgtgacatatttgatgttatttcaattgtaatactcttcaaattggaacactccttttctgatattcttagcaaatccctcttttatttttgccacttgttataatatctctaagaagttactccaggaccgggcagtagggattactgattcagatgggtccagtgactagaatatgagtagaaagtgtgaggtctaatttgaacctgtcagagttactgttgcctgcgctggcccaaagtgcagatttttagtcagcttgtgataggccaggtgttttgtctggaccaggagttatctttgacttgtagctagaataaggatcctgagaagtcaggtatccacttgatgtccttttatttgacttgttaccattagtactctcctgggatcaaggctgccaaccgaacctatancccagatttccc

SEQ ID NO: 1896 - DNA, 355 bp, Homo sapiens
ccatttcaatttgtatctgctatcctatttttttttttttgtatttttgtattttttactttcctttatttgcaataaatggttgtggattacttctggaaagcagtaaatcctaaaattgacccatagccatttattcctaagaacataaaaaatgcaaagatctaaaaaattaggagacaattcaaaaccaatgatataatttaaatatgttttgtgaagaacaggggtgcatgatcttgtttttcatatcctctcatttgtaggcagaatgtgtaaatcatgtacaagtgaaatgtatcttctttggtatgataaaaggcaaagtgtcagcttggttgataaagcagataga

SEQ ID NO: 1897 - DNA, 466 bp, Homo sapiens
  misc_feature (1)..(466): n=a,t,g or c
tctccattcaattcatatttaatagaccaccatctcttctgccttcatcaggaaaaaaacaaaaacataaacaaaatagtatctgcctatgattaatagtatttaattacacgcacttttgtttgagtttacttccttgctttctgaaaaaaacataggtatttagacactagttcatgatgataaaattaaaatttagttttacaaacaaaaattgaaactgtcatttgtaggaaaaaaattcaaatttaaaattgttatttttcactattcttagatagcaagagaagtaagaatttctttactngngatttatatcacaacagaattttttccttgacaaaggaccttttaaaaatcccaggaaaggaccacaaaataatcaaagactgcacattgtaaataaaacccttcagctgttattgaaacataagtataattacacacaaggaaaaggtattataag

SEQ ID NO: 1898 - DNA, 416 bp, Homo sapiens
aatgtacatcatattttttatagaagtgattatatcacaaagaaaaatcctgccaaacaactacaaatcaagaatctgtgggcaaaaagctcaattcatacaatgtaaacacattgaaaaaacaaatgcaaaataaaaaaagctgttgatacatcaccttgaaaaattaacacaactaaattaagggctatagaaaatgtgttcagcttatatatcatacacgtcatttaacttgaattttacaatttttaaactaatagaattcagatttattacttgaaataatggtatacccagctgttcttcataatggcaagcatattccatatacaatacaatttatttagcatagttttatactcttaagtaaaatatgttagtggattaaaagcataaaggaataaatatggcccagc

SEQ ID NO: 1899 - DNA, 473 bp, Homo sapiens
  misc_feature (1)..(473): n=a,t,g or c
cgctctttactttttattcactcacacccaggttctttccacaaagggttcaaggtagttacaagaattactactgtttggcgtttgctgaaagaagtacgtgagaatattatatgctttagaaaccacagagtcgaagcctgtcatcgtcctcatagaccaatgagtagccacacgtacttgtttggcattaccaagtgtccgggcaaggccgcagcctgcagctcaccagccgtgctgctcggcctgtgcacgtcaccggctcttccctagggtagcttttgcttgctttctcccacgtccatcctctctctctctggactcacagccagccaggtttctagccttgtcattcctaaaactactgcctcaagccaggcggggcgcacacaaacttaaaatgctaatctccacagcggtgtctggactaatgggtgtcccccaccgtgggaatgtatgtgagctaaagacan

SEQ ID NO: 1900 - DNA, 238 bp, Homo sapiens
caaagaacaaagaagtttatttctttcctatgcaacaactccaaggtcaacatttcaggccatgggtagctgtgatccaggaggtcatttgggaagccaggctgatagcagttctaccatcttccagatgagatctccaaggtcactctagtcttcacagttccgcaaggtccgcggcttcattcttgaagtcagtgagaccaagaacccaccaattccggacacacacctggattca

SEQ ID NO: 1901 - DNA, 159 bp, Homo sapiens
gcaataccacaaatttattataatacacagggaaaaacaaactcaaactttgacaacatccacagaatgttccagtctttaaaaagttagcagaaataaagggtaatggaaagaatataatctcgtaattttatacttaaggctgtaaatggcaaagtc

SEQ ID NO: 1902 - DNA, 183 bp, Homo sapiens
ttgtctttaaaacagttaaggtttaatagcttttctacattacaaaaataaaatacaagggcacacagtctggttttagagtaggatttttgtctttttcttcccttaagtcaaaatatcaaagggaaaaaccaaaaggaaaagataaccatggttggttaaagtggatgccacgtgctctct

SEQ ID NO: 1903 - DNA, 432 bp, Homo sapiens
  misc_feature (1)..(432): n=a,t,g or c
tttttttttactcagaaaaataaattaatgaataagatttcctctattaaagttttttcttggtttttaaaaaagtgacttgcacatatacaaccttttcattagtaaaattgcttagttcatgcaatcaaattaattatataagtatttcatggcattctccaagctctactacttgaacaggtctgactgaggcattactatgctaatgtactctgatcccaaatgattgtctacctaaaaatagaacaaatactgtattttctggaataaaccaataattcgtatggttttaggtactggtattaactgatgacccaagtcattaataaaatgttaaaattatattcaacatctaattactgttagggcaaatttgtaatacaatctaaaagtttcttaaantggttaaaaaggtttnggtgcttncgg

SEQ ID NO: 1904 - DNA, 459 bp, Homo sapiens
  misc_feature (1)..(459): n=a,t,g or c
tttttttttttaaaatgactaatatttattacacaagtacttagttacacttatctgaaaattataataggacaattggtgcatgtcacattcatattactatccatataagaacaaatacatttagtcaactatatcaggataacacacaaggtttttgtttgttttaggcttctcagttgaaagaaaacatcgagttaaggnaaaatcaatttccagtgattaagntattaacaatatnaaataattaaaaattacttctnaaatgtcttacattttggacaactttggaattatacttacatactnaatatttcccaaaaatgcatttaggttacagggggtcactggtcgggggtggaaaatattatttttggaaaggccttttttaagggtntggttntttattntggcttttaacctcctttnctttnttcctgggggccaccggggcttcgg

SEQ ID NO: 1905 - DNA, 289 bp, Homo sapiens
  misc_feature (1)..(289): n=a,t,g or c
ttaacaggagacaggggttttattattactcaaatcagcctccctgaaaatttggaggctagggttttttaaaggtagtttggcgggcaggggttggaggtagagcaatgtcatttagcttgctcacttccatctgccagtttggnagcttcttggctganagatggcgccgggcatgcttggtcaaatggtcactcctcatgaaccgccggtcacacatggggcacgcaaatttcttctcacccgtgtgggttcgcctgtgtctggacagttcancagaacgggcaaa

SEQ ID NO: 1906 - DNA, 399 bp, Homo sapiens
  misc_feature (1)..(399): n=a,t,g or c
acacgttcaggggcctttattactgcggggggtgggggggggcgggggtggttaggggaggagggagactaagttactaacagtccaggaggggaaaacgttctggttctgcggatcggcctctgacccaggatgggctcctagcaaccgattgcttagtgcattaaaaagtggagactatcttccacgaatcttgcttgcagaggttaagntctgtctttggctgttagaaaagttcctgaaggcaaaattctcatacacttcctaaaatatttntgcgaagagtaaaacgttcagcaaacacattnatttggaagttccagtagttaatgcctgggcantttttttgcaaggtgaggttttgtctaaaggccccancagggcacaattatctcccng

SEQ ID NO: 1907 - DNA, 423 bp, Homo sapiens
  misc_feature (1)..(423): n=a,t,g or c
tgaatattcaagaaaggtgaagtttaatttgcatataggcataacctacacctcacttggcaagtgttaggccacagcacaaacccctctgtccaatcacaaatgtccacaaatttgcaaagtaactggacacgaacgatatgcttctcaaactcacacacatattcgtccatcacacacacactcaaatgataaagaantacattgaaatcctctacaaaagagatctgaggacagtantcagatgacctcatgtgcggacagcctnttgcagtttacagtctaatccatttggtcctcacantagccctgtgaggataagcagcacagggattactnttcacaccgttttgcaggatgagggaaactgaggctcaggggatgtgtaaacaccagcctaaggttttccagttgggagactgg

SEQ ID NO: 1908 - DNA, 440 bp, Homo sapiens
  misc_feature (1)..(440): n=a,t,g or c
ttttacnnnnctttggattttttattaagttctgcaataaataataggtttataagttcaccctgttgttganctcatcagtggtcgccaagtaagagggtgaatcactcatcccaagagactctgctacctcttagctctggagggtaaaaagcaagggccagagcaaatacattggggagagggggagaaaaaaaaaatcaggctattttaatagccctcacatgccaagtgcttttgattcatcatgtttagttttcataagcttgtgaggtagataatattatccccattttatagatgagggaatttaggctccaatggggntaaataacttgtacaagnacacatactggaatgactgccatgagggagggaatgtgaattttgggtcacggggccaacaccctacactcttcctacccntgccacactgggca

SEQ ID NO: 1909 - DNA, 211 bp, Homo sapiens
  misc_feature (1)..(211): n=a,t,g or c
tttgtcaagagccaagacacaggtaatgcacgacattgattgctgcattttaccttcaaaatatttgtccttattgactgggtctccttaattaatgtacacatgtcattagaatgcagacggaggggactcaccatgaatatctggggttgattcccagatgtgtgttgcttctctattgcaagcagattcccttgtccggatttacttc

SEQ ID NO: 1910 - DNA, 510 bp, Homo sapiens
  misc_feature (1)..(510): n=a,t,g or c
tttttttgtgtggtaccttttatttagtcagtcttcatttaaatgtgtgcttttgaaatcactaaatatgaccttttcagaattcaattctcacagtatttacagtgaactttgtgcaaacaaatccccctttgtgcaaagggggagcttcctgctcccnttggcacattaataacttacaaattcagatcacaacaaaaccccagactctagttttctgtttgaaaggtactgagctgggataatgggttgctaggaaagagctaatgcaagcccaaaggaaataaaatgttttctttatcagaaaagaataataacaaggcctcactctccaaaggaaaacagacgtcccaagatgttgtggaacagtaattaagtaaccaaatacaattccaatggnttatttcaccttcatttnttatacttacnctcatctcttttaattaaataagcgaaaccaggaaagtgcanttcgaagggactctgaactgtcaggggaacgttntaaaa

SEQ ID NO: 1911 - DNA, 402 bp, Homo sapiens
  misc_feature (1)..(402): n=a,t,g or c
tttttttttcctgcatgattgtttattcacatccacttagcaggctggtgagcagcgtgcgnaggaggcggcagaaccagaacctggacgcagganaaggacggggggcacgagatgggcacaggacgcctcccaatcaaggctgctctgtgggtttcagaaacgggacacccatcccttcaggcatccatagcgtgtgaactgtaggactacagggtgcaggtcaccccagagctcagcatccaaaccagtggggcacagcttcggcctcccacctgcccaggctcaccagagacactggctntgggcagagatgacctggagccaggatccaggaactgttgcgcacgggggtaagaggccgggcccancggcattgccatcgttggttgangcttttgc

SEQ ID NO: 1912 - DNA, 396 bp, Homo sapiens
  misc_feature (1)..(396): n=a,t,g or c
gggcggagtcagatcggctttaatagagggagcctgaggaggctcgngcgtgcgggcncggccagccccctcctacttggctgcggctggcggtggggcctgggcgacgctggtgcggcctggatggacaggactccctcgggggacagcgcggacgtcacggcagccggatccacgccaggcggcaggcggtacgacggtggaactcgcgcgcgacgaatccgtgctcatccgggcgctcctcgtggcgcgcgtgcacctccacgtgttcgcccaccaccttgacagcaatttcctccggcgagaagtgcttcacgtctaagcagcaccgaaaagtngccggggtccgtcggnacctggggcgacgggcaagcgcacgctgggttgcncgcaggt

SEQ ID NO: 1913 - DNA, 525 bp, Homo sapiens
  misc_feature (1)..(525): n=a,t,g or c
ggtttagcaaaattgttataatttcttttaaataacccacagacacccatcgacacttccaaatttacagagcaaaaaagtgatttgcagctggttcctccagggaattggccccgaagctggctcagttcacctccaggacctcagtctccgggaggccgaacttggtcttgtgcttgtcgaagagcttcaccagggcctccatgtacatggtgtggtacaggtcgatgtcttgctgggttgggtgctccagcttggggatggtgatgggctctcccacaacagtgggtgatgggcttggagtagggcaccagcccccaaggtgtcggaggaagaagaggcctcgaccatggaagatgcatggggcgaaaccaatgtatttctnggaacttcttctgggacccatcggccccaggagccctcctcgaagatcacctgctttgtacactttcattctctcccaaagggggtagatgggaaccaggtcagctcccatgacgcagggcccagttttnaaaaaaagcc

SEQ ID NO: 1914 - DNA, 418 bp, Homo sapiens
  misc_feature (1)..(418): n=a,t,g or c
tcatttgtcttcacctttattgaaatacaaaatgttaagcattcaatctgtactagtaaaggtgtttcttgaagttgataaaggagggctgggctgcttgtggtttcctccaatatcacactttcatttatttcatacaccaccaacaactctcaatgcttaaccattttcagttgccaggaaagaggtagaaatatcttgtcatggacactcgttctatggtgggcatttggactgttgcctccggactttcaaatgcttgctgaaccttccaaaatacttcctctaggtggcagcgcaggaatatctctggaagcatgcgatgagttgtgtgatgaagatgggaagccccttggtgcccgtctctccctgggacacgttatcctgggntgtcaagattccccttctacaatccaca

SEQ ID NO: 1915 - DNA, 455 bp, Homo sapiens
  misc_feature (1)..(455): n=a,t,g or c
tttttttngggctccagacaccccagagtctctttattgaggttcttagaaggcgagtgcaatctcagcctagggtagctgaaggaggtccagttcgtgtcaagtctgtgttcaggaagtaggtgcagagctgccctttgcctttcaccttgatgacaccccggctgtagcaggtgtagcccagggactgtagggcccatgctgtctcctcagtcacttggattttgccaaggactcctgtactctccatgcggctggccacgttcactgtgttgccccaaatgtcatattgcggcttctgggccccaataactccagctactacgggtccatggttcaaccccacttcgcaggcggaagttgttgaatgaatgcttgttgatgacgtccagcttagaccccagggccacggcaaattccaccaatagtgccaaaggtggctgcagctccgttca

SEQ ID NO: 1916 - DNA, 586 bp, Homo sapiens
  misc_feature (1)..(586): n=a,t,g or c
gtttttttttaagattccacttctcagtttatttctgggactaaatttgggtcagagctgcagagaagggatgggccctgagcttgaggatgaaagtgccccagggagattgagacgcaacccccgccctggacagttttggaaattgttcccagggttcaactagagagacacggtcagcccaatgtgggggaagcagaccctgagtccaggagacatggggtcaggggctggagagatgaacattctcaacatctctgggaaggaatgagggtctgaaaggagtgtcagggctgtccctgcagcaggtggggatgccggtgtgctgagtcctgggatgactcaggagttggcctggatggtttcctggatccacttggtgaacttgcagaggttcgtgtagacacccggtctgttgggccgggcacaagggtaatctccccaggacacgagtccctgcagggagccattgcagaccacaggccccccagaatcaccctggcaagagtctctactgctttgtcaccggcgcagaacatggtgtcactatctgtctcnggtaanatcctcgcacttttctgactta

SEQ ID NO: 1917 - DNA, 470 bp, Homo sapiens
  misc_feature (1)..(470): n=a,t,g or c
tagttatctttactttttcacacatttatgttacctggcttgcatcgtgggcctttgaagttccatatcccctgacagtaagggagatctgctctgagtgttgcctaagacatctacaaacaaacctggtgttttattccagttgaaaaaatgataattctgtgaagcatctggtcttctttttactagcagctctagtgtttgagcctatcgtttggaactgtggaaaattatttctctaagtagctctttaaaatggatccctgtctacatagagacttaagctatggctctttcctcagtggccttagctctaaatatgaagttctttctggactgaaactaagagaaaagtaaaggtcagactggtaaccccnttaagaatgttgancggttccttaccaatacccnaattaataaacngaaacctggaatgnagaatgcnggtatacagaggggaataaaagata

SEQ ID NO: 1918 - DNA, 431 bp, Homo sapiens
atagtaagaacccaattttatttagaaaccagcaagcagcgtatgcagttaagaacccaattttattacaatttgtacataaatgcccaggaaaagttggaaggtgctacattaaggtgttaagagtcgccatgggggtggctgatgtgagaatttaaggtgttttctctttaggataaaatatcctaccgcccccaggagtgaccacgtgaggctgcataatggccgtctctgtgtctgcagtgatgtctgcagtgacgaacgcccggggtggtgagctctaatggccttctctgtgtctgcagtgatgtctgcagtgacgaacgcccggggtggtgagctctaatggccgtctctgtgtctgcagtgatgtctgcagtgacgaacgcccggggtggtgagctctcgactttagagagagaattgcatcc

SEQ ID NO: 1919 - DNA, 363 bp, Homo sapiens
  misc_feature (1)..(363): n=a,t,g or c
tttgtcatttcatttagtttattagacaaaaatatatgatttagacaagttcgctgacgcgctatttacaatctgaaaccactctatatacagaaaaggggggaaagagacacaagcacgtgggggcatttaccgaacccgataatcgcagccactggagccgccggagaggctgggccacctggacgcgagctcgggaccgaagaagcccctttctgcagaaagcgacggatgcgagtccttgacgtcgttgtcatatttgtcctttacaccagtntgaaatatttgntcttaaantcccctcgnggccgaattctttgggctccgaggggcnaaaatttnccccatagtggagttcggtat

SEQ ID NO: 1920 - DNA, 418 bp, Homo sapiens
  misc_feature (1)..(418): n=a,t,g or c
tgcaagacagaagcaagtgtctaattatagcaatttgagttgagggtttcttttttaaaggtcaacagaagccaaccttggtcacacaggtagtgagggaaggatatgttgtgggcggcccacaggcaacnattgttttcctgacagaaaaaaaaaaaaaagcgccatcagtaccgcctgtagggggcatggtgggggacagacacggcagaacgctggactcttgcttcagatnggcgcaccacaagcacacggcactctgcacaggtgccagtccaccaccagggccagcctttgagcacaccctgggtgcctcagactccggcagaaccacatttccatcgcacacccacccattaggggccaccagtcgagaagcaagctgggcaccaggcagctgctttgacatccagagaaa

SEQ ID NO: 1921 - DNA, 355 bp, Homo sapiens
cttattggttaaaggcaatttattttgaaatgttgctttggttgtttgctttctggaaacatattggaacacttgtttttcataagctgtcctgacagtggcacaatcccatccatcttcaggccttttaataaggtcattatgaaatctgaatttctattaatactctggtgcattcatttcatctgcaaaagcaactggcacaaccactccttgccggtgcagctctcggagaacatctaatattgagtctagttctgtgcggaacttctccagctcacgattctttaactgtgccagtcttttccatttttcaacttctttgttttgctcagtttctactacttggtgtgtt

SEQ ID NO: 1922 - DNA, 434 bp, Homo sapiens
  misc_feature (1)..(434): n=a,t,g or c
gcttggctcaaggtagaaaagttaaaattcccttttcttagataaactgattatttaaaactgaaaattaacgttttgacaactcaagagtgtctgacatcgctgggatcctggagtgctgagtgtggcctcgatggtggcttcactcctccacatctgggaggcacttcagtctcangnaatcaccccctttttttaaaagagaatggaggcagctactggaggccaagcacctccaggcactcaaggccctggggacagcgctactgactccactgcctcagggaggcacggtgctgctctaccacttcctctgggctttgtacctttaattgtgtctactctgcctaagtgcttaaataaagcattccattaagcaaaatacacatggagcggattacacactggactgcagaactcagatgtatgggatg

SEQ ID NO: 1923 - DNA, 429 bp, Homo sapiens
  misc_feature (1)..(429): n=a,t,g or c
tttcttgtaacaaggcatttatttgggatgaggaaaggaaattgagcagaaggaaaactgtagtgtgacttttcagttaccttttcaaagattcaactaaatatctgctatttttaacttgagttccttttattacttctttttaaaaagtggccctgttgacacttgtgacctcaataaaagagatattttaatgttaaaatgtcttaaattaatgttgaaaataaaagtattttttctcatcccacctaaagaaggagggattttctttagcttcttcttgatcttgacagcattgctgctgcatccgtgactctggattcagtgtcagtgatacagtaggtgaccggtggacttgagctggggggctaggttatagcatggccaatggtaaataggttaatttggtccccgtgggttggacnacct

SEQ ID NO: 1924 - DNA, 233 bp, Homo sapiens
taaacacagttcatttttagtttgtcgtggcaatacatggaaaaaaatcaggccactactaagcatctatagagtgtatctttggcaaaaatgtggacctgcaacaattcagatggttttctttcaattaggttcaaaaatcatggctctgtaaatttccaaaacttttaaagtcttctcatgtcttcttataatcgggcattcagaggtacgtgttggttctaatagctttg

SEQ ID NO: 1925 - DNA, 403 bp, Homo sapiens
aatattaaaccaatacttaagttcctttactcattgttgagacagactattagtgtaggtgtactttcatttatatgttgtaccaatagaggttaaaagtatgaccctatcggtaatctttttaagcaaataaaactgtttggatgctttcccaggacgattggattgccctccaggcgtatctcttcaatgcggtcccggatgtaactggtgtcattagccttgcagaatgtgtcatctgtaattgaagctatgttgttgaactgaagatgaattacacgtagactttctggtaaattaagaggcacggattccagggcattatgggtccaagtacgaggaaggtgaggttattcagttttttgaatgcatttgctttgattcccctactcttgattttgtt

SEQ ID NO: 1926 - DNA, 382 bp, Homo sapiens
  misc_feature (1)..(382): n=a,t,g or c
aaaacaaacgcatatgacattttacttaacagactggcaaaaatgaaaaaagaaacataatatcctgagctggcaggagcacaaggaaatgggtctcgtgctgatgatgaatgtgaattgataacagtttttttgtgatttgcgatacacnaaaattgaaaacagcacaaatgtacgttactctgggctcgctaaataggcactaaataaaacgagtcagtttcttctcccgagcaagtaaactagagggtagatccacgcgacccggagtctaggacacatcctcgggagtgaacagccacaattcacagacgatgtgtgcagccggggcatngaaaggcccaaggcaaacacaccacgaggtaaacgccgggactctgag

SEQ ID NO: 1927 - DNA, 410 bp, Homo sapiens
aaaaaaaaaacaatatttagtctttctgggatatcagcttctgcctaaattgtgagaggtggtgtttcaaaagacacacgcaccagtggccccggggagagctgcattccaggttcctgtcctacgtaggcccctacgggtagctggggacaccagtctcctccactcacttggcaggagtcaggactgtccacctcttcaactggcacaaggcccaagcagcatgggggccctgagtgaaatggagggtcccacactgcttccaggacaggactgtcgggggctctcctcacccctgactggcccacagcagcaggctgctcctggcgtttggcagcagtcgtgatggggctgcagcagctggtgagtggagtcgtcgggcagtgtgtataagaaagagccctcgtccg

SEQ ID NO: 1928 - DNA, 315 bp, Homo sapiens
  misc_feature (1)..(315): n=a,t,g or c
ttttttttttgaccccaagcacagctttattgacaccccagccaacaccaacactctttccaaccagcggtgaggggcccatgggngttngcctngaaggtggattgagggcctcggttttttgttgagtgatgacagctccatgttccttccagttggccctgcagcccctctatcccccagctttagccgctactcccagtggggcaggaggagcttccatttgccatctggagaccctggcagggacttgcccatccgatccanacaccagcaggggacctcgggcgctgcccctggggatganggggcant

SEQ ID NO: 1929 - DNA, 434 bp, Homo sapiens
  misc_feature (1)..(434): n=a,t,g or c
gctcttgtgtacattttattatcattattagtaataaaccaataaaaactgaataacaaaggaaaaagctcaagataaataatttcttccttgtgaattcaaacacatgcacacacacacatcctcctctgtgtgtgttacttcctcctcacattctgtcctacggtacaaatagttacacaaaagtctacaaaacgcgagtagcagaccccagctgtgttaagctcaggctgattctcagtctagatcaccagcttctccacgctaagtgtacttgtggtttcatcctcttcatttgacccaaaatatcctgggaggtccagcatcctctgctcagcctcagtgaggccaaacgacgtattgtcatagaaggcaaactcagggtgagtggggaagcttgacacttgtcttttctacacnggttggtctctttg

SEQ ID NO: 1930 - DNA, 413 bp, Homo sapiens
  misc_feature (1)..(413): n=a,t,g or c
gancattttaggaaaccttttattgcaaatgccattctgcatattgatttttgacagaaagtatcagaaatgcttctttcctgggaaaaggaatataaatgacagcaagacacattttagttgctactaaagaacagcattattttcaatcattttaagtcgctcatttaaanangcaagggtntaaaaacgggtttaaaggtgggagcctgcaaaagggtaattaattaaaaaagtgtttcctccccgggaaacagcactgtttggtctgnatcaaatgccgaagctgggaatctgattctggggtgccgtctcttcgctactgggagttgctgaccagcaggctgcccattcacgaaaagaggttggcaaggccaggcccccaggtngcgctggggatttctgggctgggc

SEQ ID NO: 1931 - DNA, 274 bp, Homo sapiens
tttttttttttttttttttttttgcactagaataagtaatttattagtaagcacaatgacatcttttaggagaggtaggacaggtccccaaataagcagttctgtcttttcagtgttggagccatcagactcattgggactaggtttaaactggacattttgagaatgatgaaaatcctccaggtctgccaggaaaaacatttcactacttcatagtagatgatacctgacaccacctgctaaagagctaagatgacattccctaagtgcctag

SEQ ID NO: 1932 - DNA, 501 bp, Homo sapiens
  misc_feature (1)..(501): n=a,t,g or c
tttctctctctttggtacagaatatagaatcctgacctcccaagaaagttaatttactcagtcagtaaatctggagatctctgcatgtagcatttttattttacatatttatttattaggccccttctggttccaaacaggatttggcacactgtnnttgattttccgcttccttccaactctgcaggaaacaacaaaagccccactaagacctcaaaaggagaaatcctcttgacccagtttcacgaatttttcgacactgtcgtttattgaaggccatcttgtggcaaccccagtgtccatgggggaggagcatacccagagaagagtgtaaaaacaactccatctgttacaggacaggggtcccaatccagactccaagagagggttcttggatctcgcgcaagaaaagaattcaggacaaatctgcagtgcaaagtgaaagccagtttctaagaaagtaaaggantggagaacagctctccatgacagggcggcccg

SEQ ID NO: 1933 - DNA, 289 bp, Homo sapiens
  misc_feature (1)..(289): n=a,t,g or c
ntttttaaggagctttctgcatccactttatttagccagagagggaaggggttgacataaacgaaaaagtggatcaaatagtcaagaacatgatgggcgcggcaatgaactgaaccacttttgctaagtgacagaaaaatattctaatattaaggattattttacaactcnatggaagtaatgcngtgatgcatcttgcatctgttttgtcttgatgacaaaacgcactcttagagtcacaagatcctgccttgtgttagttataaacaaaaatatatttatatatata

SEQ ID NO: 1934 - DNA, 512 bp, Homo sapiens
  misc_feature (1)..(512): n=a,t,g or c
tttaaaagtatcaaataattttattatgaaagataagccatttattgaccattcacttttctaaaaaaacacaaatgtgagaataaaataaacatacctaagactnactggcccctccaggacaggaagcagccctggacangagagcctgcaaacggagttnccttatgnnnaatgtctgaacttctcatacattctaggatttcatgtttcgttacaaaggaaaggaaactggctagaagattcatgtacaagaaggtcacaactttaaagctatctgacgctaatgacttgtacaatctggtttgcaaactctgagagacagtatcaaataagcactgttcaaagactactcccagctaatcctttactgtcattttctctttgaaattgtctttgggactggntatgtnctcactgtagcttccgtttatcccacagccccaaanccctanagtcccatggtgcagtctccatgttcaaggtataaaagtctgttttcaggacaangg

SEQ ID NO: 1935 - DNA, 463 bp, Homo sapiens
  misc_feature (1)..(463): n=a,t,g or c
aaagtataaagtgttttggaaaaaaaggaaaaaaatctatataaaaatctcttcacatataaaatcctgaagaaggtgcaaggtgagacccagtgcgaggggcgtgctcagatatgcagtgtgtgtgtgtgtgtgtgtgtgtgtgtatccgtgtgtacatgtgtgcacgtgtgtcgtatgtgtctgtgtgtctgtgtgtgtgtgtgtgtgtgtgtgtgtgtgtgtggtgggtgcaagtgcacgtgtggcccacagagggtggggagaaagcttggctttttacttccatccaggagggaaggagggcggctggtcctccagccttggagggtctgcagctgggcgggacctctactcagccaggctgttgcgcatcgactccttctcctggagggcggccatggcaagacgcaggtgctccttcagctgctcgatctcccgctcagaccgtgtctngatgtga

SEQ ID NO: 1936 - DNA, 437 bp, Homo sapiens
  misc_feature (1)..(437): n=a,t,g or c
ttttttttttttttttttttacaatctggaatatataattttnattagttctcagcagtgcagtaaatgaacaacacttattaataattaatttgggagagaatagcaggaggaaaaatataaacagtagctttttgtgaccatttttaagtagctgacatctcagtatgtttctggaatgaacaaattaagggtgtattgtatatagtgatttaaataatcagctttcttatagtcttatcaactgagattataaaattgtaaacacaatttttccatgtttacatctactagctttcatttggacacattaaaccatacttttccattatgtagttaattcatttcttgagtgcctgcctgccattagatgccaggtgcttatctaattttccagttagttactgttcagcttaagtcactctacttggttggtn

SEQ ID NO: 1937 - DNA, 434 bp, Homo sapiens
atatagaaataactttaattaaaaaacttacatagaagattataatatcagacgtgacaaagatttgagtttatttgcctggacaacttgggtttgtctggcttttgttttctttttctttaaaaataaatgtacagtaaaactacaagcaaaagtttgtcagtattgaattgaattttttaccccttaaaaggactagtataatttccaatctctaacaaaaacttagtgtcaaatctcacagataaggccaaatggcagatattttcagttatgtgggtagtacaacttgagtaaccttttttacatgacaaaaagtgagttatataaattgtcctcaactttcacataggaaaaaaatggtttaatagcttcaaaaggaattttctttcatgtatactcttcagtatccaatattgaagctttgttctttg

SEQ ID NO: 1938 - DNA, 350 bp, Homo sapiens
cagtccagtttgtttgaagtcaatcttttcatcagaggcagcttaaagatgctttcagttagttttgtcttactttcagatttctctacataaatctagatactcattaagtagccttatgacaaacagtatgagatacttatgacaaactcgctctgtcacccaggctggagtgcagtagcatgatcgacagagtgagtttgtcaaaagtatctcatacttataaacagtatgagataggaggattaaaatattattttaaagaaaccactgtttccccctaaaatgtcataagagcactgaagaacttgaaatatttttttcagagtttctcacacactttaaaagtc

SEQ ID NO: 1939 - DNA, 442 bp, Homo sapiens
ttttttttttttttttttttttttttttttgcactgggctgattgtatttgcataaacccaaggaggggaaacggcagggccagcggtaggctgagctcactggcagtagaaatcccatttgtctgtcttcacatcgactttgccaggtttcagggtctggtcctctcggacaatgctactggggaaatagcccaggcgagcagccagatctccatagtaatctccctgaacgctgcctccccagaagagccgcccacggccgttcagcttggagaagacatacaccacttggccccggtgaatggtcaggaatcggcagtcgggggccatgtagtcctgaagggccacagcatgtgagatagggtggctgcactcctggtccgcacacagcttccggtcagccagcttgggcataggaccacccctgacaccaggtccgga

SEQ ID NO: 1940 - DNA, 350 bp, Homo sapiens
  misc_feature (1)..(350): n=a,t,g or c
gccgagcccaccccgccctctcccgcccgggtccgcgcaccgttccgctgcagaaagcgcaggccatcccggtatccctgcttgcacatctctcgcagcaccaggggctccggcgggaagagggccttggagaggcggtagaggttgcgcaggttgaactggatgctggtgttggtgacccgcagctcgtggatgttggtggagctgtcctgcggacnagatgtcactctcgcccgagaagggggacactgtgatggtgttcttaagctcatagagtggcaggttgtctgaaatgccaccatccacgtagcgcttccacgggacacacagacaggaccgtatgtgagggc

SEQ ID NO: 1941 - DNA, 425 bp, Homo sapiens
ataaagatttcctccaagccacatgaggactctggcacccacccacaaagcaagacctgtatttataagccgagggtcagggagctaactgcgggacccgtcagccccgtgtacccatccccgtccccacccccccctccaccgctgggcccatcagtgtgtgttggggggatgcttgcagctgggggtgaggagacaacaaacctcgggaactggagccagagctgcggcctgactgacgccttttgatgctcacgggaaatttctgcccaggatctcagccccaggctggttgtttctacaaatctctctcaaatgtattattttggtgacaaaaatgaaggagctttgtaaatttttttaaaattatgaatcatatcaagtagttgtttacatttcttgaaaaaataggaactcgggcagca

SEQ ID NO: 1942 - DNA, 239 bp, Homo sapiens
  misc_feature (1)..(239): n=a,t,g or c
ctaaatgctttaattttttgtcacaaatatttctgcatctctcagtcccttcttgttggaaaaaggagggctagtgatacatttgttaatggcacttttaaaangtgctttggtatatagaggnaacaatgtacttcnnaggnatgttaataataaattaaggttataatggttgccatatcngagngaatgnataagattagtctcagcaaaaacaaaaattagtttggaagtagata

SEQ ID NO: 1943 - DNA, 407 bp, Homo sapiens
  misc_feature (1)..(407): n=a,t,g or c
ttgtgcaaaggaatgcatgggtagcactatcttatgacctgggctgtctgacggctggctggcaaagtcaagtatctcctggcagaagtgcttgcgctcctcttcagtgaggtggtggtcactggctaagaggctgctggtctgcaggtagttttnaatttgtccaaggtgcttttaacattcggccagctgcttccttgtgtgtgtnatggggagtgcccagccctcagccaggtagtttttcagtgctccttgaagatagatttctgccttttgtggagcctttttcctcatgtaaaactctgccagatcttttccaacaaacttagcagatcgaatcctcccaatgcttgtatacatttcaatggtggcatgggacaaatctaagtagtgtttttcaaaagctt

SEQ ID NO: 1944 - DNA, 384 bp, Homo sapiens
ttttttttttgtactctttaaatgtacttttaatgtattttaaagaaattttaaatgagatatttaataatacaagtatttgagagcaataaaaaaagaaagtccatacaaggaagatgaacttagagagagctaccagagcaggtaaatttccagcattcttccatcattgttgagagatgggtatcaaagccagtggtgttctgttctccttggcaggtagatccccaaggtggggtagctcaatgcaattagctggtaagatcaccggactcactcttccagggatgactccgtgcacattaggaaacctgacattggtttgccttccaatgtcgctctttgctgtgggggcaatgccctgggcacacatattatcagaac

SEQ ID NO: 1945 - DNA, 223 bp, Homo sapiens
atggctcaatgttaattttttaatatacttgcaaatacattataataaaataatacaaccaaatcaaaaagcagccacttaaaaactgaaattcacaaaatgagctgttcttggctacatacagaaggccaacatttaaactgaatgataattaaacgtttactaccataggtaatatttacgcacttctgggtccaatagaaggtgttgaatcaatgtgatc

SEQ ID NO: 1946 - DNA, 541 bp, Homo sapiens
  misc_feature (1)..(541): n=a,t,g or c
tttagccgctcaaagaaaatttattggcactcggtaaagacaatgccacaaaatgccattgaaacagatatctgaaagcacaaggtgctgatgtagccactagatgaatctgttcggtagcagttgagcccggtgaattaaggagtttacagctgttatttatgtggctcatgatgcttattgagcaatctgcaaaaatagatttcctgtctcacacaggacagggtagatttccagcaagcataatcaaaatctccaagtcttttggtcaaattagagctgccaccatgcacgaggttttacttaaaggtgtttactgatgaataaactcacacttctgtgaactggttcttgcttcttgtgcagctaactctttccacctctctttgttctgctgaatgatgtccaccaggttgttcttgaaactcttcaggtccactgctgcaagggagtagtctggggaataggnaccatcactcatggaggcctttgtatttgatcgtctaagtgcatcagccatgtggtaccccacaatgtgggt

SEQ ID NO: 1947 - DNA, 414 bp, Homo sapiens; identical to SEQ ID NO: 374

SEQ ID NO: 1948 - DNA, 445 bp, Homo sapiens
tttcaatgcatgaatatttgattttatttcaaaagacaattatttataacactgaccctctatcaaaaagaatatgcttttctgatggggaagtgacaaaaaaaaaaaactacacagaacaagagtaataaagttctcaagtaaggattgcactccaataggaattgagtgattctctcagagagcactcattacatcttagacaacgtcactcttctttcctcttggccatatgttcaggtctcatagtctttctgaacacagaatggcagtggccagcattgtccattatctatgttccgcttgtttactaattaaaaagctttggtcttcagtgttgtaaacgcaatttctgccttcgatatcaaaaggtgagtgaatgagacaagattagttgaaggaagtacttgatattttactccagatagctgaatgaaaatgggta

SEQ ID NO: 1949 - DNA, 263 bp, Homo sapiens
aatttttaaaagttgtcataatgcaaattttattttgattagtttttgtgactcctttatcttaaacccagcgatgcttgccacttcccaaggtgtaaaaatgtgaagattaaggtaaactgaatgtcgaggagtgtaaagagatggcaaaacacagataaaaacatccaaaaagcctcttggggcaggtcaagcttatgattcaacagttagaaaaccaaaattacttggacatccccttctacttaaagtgatatactgga

SEQ ID NO: 1950 - DNA, 305 bp, Homo sapiens
ttttttttttttaagtcatattcataaattttattcatttttaggaaaggacatatctaaaattactaatcagagaattcaccctatagtcctcatacaaaagctggattttgtcaaggagaaaaagactctttcttgaaaaagattacagaattctttgtcctaaaaatgtagcacctcatacatagaatgtatagcataaaataatgtggctttcaacacatgatcattcataatttgtgaagtgtcttccctatgcatacatgaaaagtccatattttgagtattagttaaataaaaacttg

SEQ ID NO: 1951 - DNA, 361 bp, Homo sapiens
tttggggtagtatattaactttattttgaattattatataacatggaatatgtcatcaaagaatgaattaatgaaaaacgtttgtagttcagttaagcagatgatttgcataggaattgctagttttaagtcttaggatgcggacgtaactgaattgtcaattagattaacatagaataatcatttacatgtgtgcaaactaaaatgcaattttgaaaataacacacctttccgtacagtctttggtaggtgatgattcattttccctgctatgggtaatctcatctagatcaaatgtgatccttctaagctagacacctcttccctacagtaagaaggcctccatattgttcaagctact

SEQ ID NO: 1952 - DNA, 501 bp, Homo sapiens
tcatcctcagtgcaaactcgctggcacagagatgttcaatgatggcctcagatttcaactcgttgtcacagggaggacacaccgttgtgccttggggcttggaggcttcggtggcattgggcggcgtcatggcgatgcagacgtccccctcgggagacttgtcacacttaagcatctcgggccagtagaagccgaagaactgcatgaccggctcgcacgagtcgcgcacggcctcgcagaccagcgacacgggtagatgggccggtccaggcagacgggcgcgaagagcgagcagaggaagacctgggtgccggcgtggcagttcttgttgagcaggggcacccagctgctggcctgctgcttcacctccgccatggtctcgtgctccagcaggttgggcagcaccatcttcttgtagcccacgttgtggcacagccgcaggtccgcggggatgttcacgcactgaggtggcttggtgtagaagcgcccgctctggtacgg

SEQ ID NO: 1953 - DNA, 242 bp, Homo sapiens
tttttttaacttttagcagtgtttatttttgttaaaagaaaccaattgaattgaaggtcaagacaccttctgattgcacagattaaacaagaaagtattacttatttcaactttacaaagcatcttattgatttaaaaagatccatactattgataaagttcaccatgaacatatatgtaataaggagactaaaatattcatgttacatatctacaacatgtatttcatatttctaatcaac

SEQ ID NO: 1954 - DNA, 472 bp, Homo sapiens
tttttttttttgaaggacttaaaatacccagactttaattcctctaagattatagtcattaatcatgcttttatatcatattatctcttaacattatatcatattatctcttaacatttaatttctaaatataatgttcatgaggaaaagagaaaatagcttggcttctctcttcactgaatggttcttcttagtatcttctagatgttccagaactgatgtcagatttggctcgtcagagtccacaaaacatattggtgagaaagatgaagaggattcctgccgccttgactgtacaatgagcccttccagaacacagcagcgccggccaggccccggggagagggatcgctcaaacagcaccagaggctgcattccaacttttcctccgtcaacgaggccgttttcattgttagtttctccttaaacacaaacttaaaaacaactggcttaaatctactatcgcatcttg

SEQ ID NO: 1955 - DNA, 566 bp, Homo sapiens; identical to SEQ ID NO: 604

SEQ ID NO: 1956 - DNA, 320 bp, Homo sapiens
tttgttgatcaacaaaatttgttgaaaagtgtagcatcatactcaaatacagcagtacatactagggaagtttctgtaatgttggtcctccttgttctccccctaccttcccccctaaaacaaccttagtaataaaaaaaaaataacacctagcacagttgcaaatacattcctgttttttaaaaagccagaatatacgtgtgtgtgtgttatatatatagttttaaaatgtgccctataaattttttagtttttcccttggtcttttgcaaaagaaaacaaatcctcaaatatacttagagctacatcataaaaatgat

SEQ ID NO: 1957 - DNA, 318 bp, Homo sapiens
ttttttctgaaatcattcttttattttgcacacacatagctgctatttactgaacactggaaattcatgaatgcgttacatatttaaactttcatagaaggctcagatcaacaaagcaaaacttctacagataataagtagttgtgtatgcttgtcactcttgggcccatcagcacctgttccctatcatattgctgaactctgcaaactccagaaaggaaggtttcttttccaaacttcagagaagctgcagatcaagaatttgggccgttgcatctgattagaaactctcttcttccagtgtgagaacgttggatt

SEQ ID NO: 1958 - DNA, 451 bp, Homo sapiens
tgaatgatgtgcaacatttaatagtcacaaagcatttgctttcagtacagataatgaaatacagtagtgtgaggtttggttgttttttaacaatgaattgtgctgggcatttatgtatagagggcttattattttcttctgtatttctcatattcacagttgttaataagttttctgaggtgtcccaaagatgcaaaagcagaaatttttgaacacgtattttgagaatttctgaaactcacataggtacattccacagggaatatacagaaattttgcttgattgagtatagagttggtaaaaatttctaccacaattaggtttacacaggaaaatgtaaaaaattactattttaaaaggtaacacagtattaatgaagatgtataactatagattgtttctagcttcagaagaggtcctttcaatctgtattaaaatgttgtgttttct

SEQ ID NO: 1959 - DNA, 405 bp, Homo sapiens
tttttttaaaaaaagtgttttcccctttattacagaactgatacatatacattattgaacattaaaaaatacaaagaagacattttaagaatgcaattaccaaacattttcccatccaaagataatcacttagttttttggtgtatccttctccccgccacccaactcttagtttgcaaaatttcaaacccacagcaaagccacattgatagtacaatgaacatctgtcgaccagtcacctagagtcaccaagtgttgtcattttactacatttgacttgtctctttctttctttatattcatatgttttatatttttccacttagtcactggaaattcagtggcagacactgtggtaattaatatctaaaaacttcagtatgtttgctaagaacagaatgttct

SEQ ID NO: 1960 - DNA, 182 bp, Homo sapiens
ttttttttttttttttttttcattgtatagtgactttatttgtctcatagtttttgtatcaaaatcaatactccttctctttttcctggtttccattggcatggaataactctttccaactctttactttcagcctatgtgtgtctttatagtttaagtgtgtttcttgtaggcaacagatc

SEQ ID NO: 1961 - DNA, 481 bp, Homo sapiens
tttgcttttctccttcctgtgcatttaatcaatgaaaacagaggttcagaatgatatgctaatagtgggaggaaccacagcaatggaatcaaacaatcagttcaaatcttggctctgccctagtagctgttctctgtaaattggagttaataaatccctatgagaagtggctggtatataacgggtgctcaataaatgttagtactcttcctcatgagcatctcagaggataagaggtggacaactgcagcctagattgaaaacctgagttatggagaaagagttaaaatgacttaatactgtttatatagggccataaaaacaccatctgctagctctagctagttaagttattacaaagctgacatgcactaatgctgcactgataggaaaggaatggccaaggttttgctgtttctatcattattcgacgagctgccatgtcgggaccagtcgccagtttaacccatcacataacctg

SEQ ID NO: 1962 - DNA, 335 bp, Homo sapiens
tttaggagtacacaatataaatgctttattgctagcacagaggtttctttttaagtaaattaaaagaaataaatcttcattttcacattttttgttgcagtccaaaggtaactagttggttagtggctatgtccacttggacacatgctacaggagggcagcattcacatggaagcactcagaaatacggcatctgtcagggctcacggcactgggctgctgaatgcactgtcgtttgtaaataacagcaagtggagactttaaaacatcatggatagataagagttataaatagaaaactggtacggttaagaagcagaagatcgttaaataca

SEQ ID NO: 1963 - DNA, 406 bp, Homo sapiens
aatctgaagcccctgattttatttttccagcatcactctaaggaagagtgtggattagtgccattattcagggctggtattaataaaagttagcttttatctgcagggctaggttaaggctggcattcttacttttacattaaaaaaactggctacaggctgcgcactggaggtacttcagtcatgtgccttctctaaaggattcttagatccttaaaatatatagtatgttttaagtttgtatctaaatagcacttactgtaatgtattatacctaaatgtttattaaaagttagaagaaatgagtaccaacaggccggaatggaagtgaggagaggggctaagacattgctgatctgagggacagacctctatgcaatagaagagggctgggagaaggggtgat

SEQ ID NO: 1964 - DNA, 265 bp, Homo sapiens
tttgtagagagaaaaatttattgcaaggcagccaagcaaggacacaggagtctggcccaaatctgtctctccaagttggaggctggggcagattttatatacagagggtagtgaggcatgatatgattggatcttgtaatgaggggattcaggaggcttgatctgactggatcacgccagggctcaatctgattggatcaaggatcatgccacgtggtgtccacttcttaactcagtccctgttcctcagtctgagcacttaggt

SEQ ID NO: 1965 - DNA, 400 bp, Homo sapiens
tttgtcttttaaaaaataatttaatgaacatatagtttaagatatagtttcatttctacaaagatgcatttaaaattacaattttagagccaagacagttctattaaatcaattgtcaatattaacataattgattgtttcatccaataatgttatattccaggtttttcttttaaaaaagactacttttaagagcagttttaggttcacagcaaaactgacaggaaggtaggaagattttccatatatcccctccccccacaagtgcatagcctccctcttcatcaacatccctcatcagagtagtgcatttgttacaattgatgaagatacattgacacatcataatcacccaaagttcatagtttacattaaggttcactcttgatgttgtacattc

SEQ ID NO: 1966 - DNA, 425 bp, Homo sapiens
tgaagagcacagatttattgaaacaaaagtacatcccacagagtggcagcaagattgagcaacctgctggagaccaccggttacagaattttctggggtttaaataccctctagaggtttcccattggttactcggtttacgccctatgtaaatgaagtagtgatccgtgaccagtctggctggtcgtgggaggggaccagtcataggtacttttcatttttcatctgccaggcagaaaaggggcaggttgcaaagggagtataacctctgattcttttgttacttgggcgaggaaagttgagattttcctttagatttagttataggaagtcagtgtgaattggctttaggcagtgtgaactgcctctggaacttattctcctgcctcacaagcatttatgaaatctggccctagacaagatgt

SEQ ID NO: 1967 - DNA, 530 bp, Homo sapiens
ttttttttttttataagcagtttttaatccataaatacaacaggcatttggtattttggccatcagaaaacaaaagttgtagtatcagtaaaggtctgagatggttcacttttgtagattcaattcagtgtatttaaggttaacaaaggctgacattgaaatgtttaaagataggcaaaaattcacattaaaaaaaaccctatatttctatttagagtaacagtaggcagtatgattccaaaagttaaaaattatttcacaacctgtagcttcagcttggcaaacagcttagattccaaaactgattcatctctattaaaatgtaagcacttaaaaaaagagcatgtctgtgtatatagacatatattttaaaggaatcagataatctttgaagcagccttagtgtttcctttaaatttgtctggaaatgaccattgtattagcttcacagaaaggactagccagcttcttcgtctaaggctaacatggtgatcatttgtctaaggctagaaaggtaccaacaagatgta

SEQ ID NO: 1968 - DNA, 116 bp, Homo sapiens
tgaggccacacatgtttattaggccggtcctgacacctgcctgcggggaaggaccaccgagaccagatcctgggtgccatggggtgcagggacagaccggtgcatggcagcggctg

SEQ ID NO: 1969 - DNA, 485 bp, Homo sapiens
tttttttttaataatcaactaagatgtatatgtaagaaagcctcatcttttgatttttaatatacaagatgctttctttaagagagcaagattcaaaattgttttgtgtttcaaaatttaaaaataaatttatctcctaaattttctaaagacatgtttcatatatttgaccatcccttattttggcaaaggattttaagagtctaactcaaacatatgtaagctctggtgtacctggttatatataccaaaaaaaacatttgatctatatacacatagacatgaatatatttctgtgtgtgtttgtgcatatataacctcaaacactattattaaatgcaatcctatattcttaggtatagaagttgatgatatacctttctacttgccatggcattaacaaagcaaggctgagactcagcaaccacttgtgttcattgcattgcaggctagtagtaagtttggttgctggtaggaaaagggtc

SEQ ID NO: 1970 - DNA, 488 bp, Homo sapiens
acatggctatttcatttatttagtagttttgaaatgttagcaaatataaggtatttgtaaagcatctttcattataaagagattagtaatattcaccaatcatgccaatgagattatacactctgccaaagactactagaaaaatttgatcattattaaattcaatgttatttgacagtgtgaactctatgtaacagcacaaattctggactttgaatctggctgctgtcctcacctgaaccattaaaatgaccttgttaacaaggaaggaatcaatggggatatatcacaaccagagattggctgtgtgtccaagggtgctttgtcttgttgccaggatcagactgtgaaatcacagaggcaagctgatgtcatcagaggtgactctgcctatttcaagtcctataatcaccccatgggattcaacagcagtaggaaaacatcacattctcttaatggacaccccatatttgtagaaacagttatga

SEQ ID NO: 1971 - DNA, 354 bp, Homo sapiens
tttttttttgcctcttttgttaaacagcaacagagctctgccactttggccaaccaccctcctttgtcctcttccttttccctcctgccaagtgtcctattctcaaaaggtctaaatcactgccttccagcttggtgggcaacctgctgggggccccaagtgaggtggggaggggctccctagctatttcccagtgacctctatcacatcatcgtctttatcctcatcatcattggagctgaacccaacctcggcaacctcatgagagtcaaatggaggcacctgggaccgtaggaggccaccagctgggtagcctgcatgtggggacatgtagcctggatagatagacatgcc

SEQ ID NO: 1972 - DNA, 407 bp, Homo sapiens
tttatgtaattgcctgtttatttagtggcaccagttttccaaactagaaattatttctacttttcatctaacatacaatctgcaaccattcgcaggctgaatgcaatttttcaatgaacttgaaaacaaacagtacattcttaaagttagaactgaattcacatattttctttggaccaggaaataatacataatacaaaatatacatttatggaatttctttaaaagtgtggatcacataaactgcaaagtgggtgagttgctacggagaattttgttacacattgtatttaagaaaaatatttctgcaattatattattcttaacatttatagagtttaaaaaatgaatatataatgcaacatgcttttaacatgtacatgtctctccactcataacatttatac

SEQ ID NO: 1973 - DNA, 189 bp, Homo sapiens
tttatattcataattttattcgtttgttgggaaatttaaggcatatagaagttaaaaccacagccaagcctcaggagatgcacatgttcaaagatttcagagtgcagagagtcatttcattttttacgaagcacgtgctctgcttccggacggcgctaagtcggctgtgtgcccgggcgcccgcagttg

SEQ ID NO: 1974 - DNA, 513 bp, Homo sapiens
ttttttacattttattagaatctttttatttttttctgcagaaaacatttgagatgctcatttgatataaacatctaattccaagagagaccagtgctcaaatatagttttttcagctaccatttgatacggccataaatttggatggtccatgttacaatccttccacaattctccacttaaagacatcatttttctatgtttttaatgactattgccatctaacaattctacaattcgcctctttgcctgtaaaaaggccaactctacgtccacctgtgtctcatattgctatcttttatttatctctgcttaagattgcaaaagtttttgattttattattcacctgaacaatgtattgcaattccaatacacccccatctcttgctgttatctacagcttgtgacaaaatgaacaccttgtagaaatatcctactggttgggtttcccaagtctatgacaccaagagagaagcattgctgatggattgacgaggagaccaccagatcat

SEQ ID NO: 1975 - DNA, 441 bp, Homo sapiens
ttttacatttcttctgtctttattgtattgcttcaattggcaaatcatgcttgtattcattcatggggtacaatgtggaatgaggaaatcccactacttagcatctccactacctcagagagaccaattccacgtgaggtcccagaagtgttgatctaaacaagttgaccccatagaagtagcaagtagatcgatggtgaccaggggtcagagagtggcagaattacggaatgggaggggggttgtcagttaaaggaccaaagtctcaaggaggaggaagaggttttgacatgtagtgcacagcagagtgaccagagtcaatgagaatgtgttgcattttgcaaaacacctgagagagtccatgtcaaatgtctctctgcatttagattggagaggacgaaggccctgaggtccaagaacattgaaacctgacagtggatg

SEQ ID NO: 1976 - DNA, 398 bp, Homo sapiens
aattaagaaatcagatttaatcataaacttgtgaaaggaacaaattcaatttttaataacttttatatcaatggaagaagcattttcaattggcaaaactagaggtttctccctaattttctgtctgaatttttataaataaaatgcattatttagctgaaattttaaaaatatttttttcactagacgttagagcaatcttagattttaaataaattgttaagtatcatgaacatgttatttaagatttaaaataaagctaagatttgctttacattgtggcaaatatatacattttagaaaacaaactttgtatttagtcaacataatttttaaaataactaggttgtggatacacataattttctgcagtaattgacgacagatgaaactacatt

SEQ ID NO: 1977 - DNA, 389 bp, Homo sapiens
  misc_feature (1)..(389): n=a,t,g or c
aaaactgagggaactcatgctttaatagacactgaaaatcacaaaggrggaaggccaagtgccttagcaatctcaataaaaatatgavgttctttttacatggtaaatttcataatataamangtttaatgtctggvaatggtgtaatttacaaaamaagtccacgtaggccaaagatggctaannctgcatataaggvacgtgaatsccagtggaaaggtgtctgaggaggggcagggccacaggtgtcctgacagggaacatctttgaaggatctggmacaaacaagggcccagttcacaaaccacaggtacactcattttagataggmcagcagaataggtgatgaaattatacagtttycacttgttgcctacttactgaagcaa

SEQ ID NO: 1978 - DNA, 231 bp, Homo sapiens
  misc_feature (1)..(231): n=a,t,g or c
taattttccacaaagagctccagaaggcaaatagtttatcacttccccactctgaaatagcacgcaagacagatgatgcaggggaatgggtgtccactcttncttgtnctcagagctcctgcagcaggcctgantgacccgcaagcggggcccatgcagcgtgtcctctgcaaagtgcaggtnttcagtccacacacagcaccaccagcactgctgatgtcacggttgtct

SEQ ID NO: 1979 - DNA, 518 bp, Homo sapiens
  misc_feature (1)..(518): n=a,t,g or c
ttttttttttttntttttttcacccagtnttctctgtttattcttctcaactacaccatgntgctttgcagnttggtttnacaaacatttccccacaattaggatgcatgatgaccaagggaggaaagaaaattttcacagggtatttaaaaagtctcagggaacaaacagntcagtgncaaatcagtaaggctaacacctgaaaatgactctgcacaggtgaggaagtggagcagaagagggaggggctggttcagggaacaggatttaatatgtcagtgaagaccctgcctctctctgtaacaagatgcctaaagaagantagtggtgcttccagcccagctccctcttnttttgggaacaacagtcatttctcagaaacctcacttncaaaggcagcccttncaaaaacatgagagntttagtttggagaaattttttaagctcacttttgctggagaggaatgantttaaactngggcacacagngagcancaaanagttttnaagagccacct

SEQ ID NO: 1980 - DNA, 427 bp, Homo sapiens
  misc_feature (1)..(427): n=a,t,g or c
ttttttttttttaaaaataaagcctctttattggntacctgtaagctcaggtacaaggtgttcccacaaggcacacaggctggcaaggcctacctgggncaaggggcaggcccagagcctngnntttcttgggcacagacacagagagnaaatggaataaattatagttctgacactcagggacaatgtagaaattatgatgcaaaattaaacattaggcaaacaaagggtataaaaaccctcaggagccacccctcgccaactggcctcagggcatgggcaggtnggccacgatgaagtgcagtgcccagaaagccctgagataatagtctggggcatggttcncgccccgaggtaggccctttgccctctctgggcttcctgtttcctccttccccctnctacatccctgggcctagaataaagg

SEQ ID NO: 1981 - DNA, 442 bp, Homo sapiens
  misc_feature (1)..(442): n=a,t,g or c
ctttaattaaaggctaatgcttagcacttcattagnaggtggagagattaaaaactaacttccttgccgaatagcctgggtttggaaaagcatgtttttgaaatatgtgggatctccactctggggccctctgcagtcctgtctgggtcttcacacctaagtcaaagcaagagctatttttgcgttagaatttccttagccaagactacaagaggccaaatgccagggttcatctcagcttcctgtgcattcacatggaaggtcgtctttgaatctgcacgtccagctcgccatacacatgtctcagggagtcactgctcatgctgggctatcagcttccgatgcccagagacccaggggccggcacacttcttcccacttgcacggtgggagttggggccnggattttcacgggaacatcttctttcatttgggnctttgt

SEQ ID NO: 1982 - DNA, 328 bp, Homo sapiens
  misc_feature (1)..(328): n=a,t,g or c
nagnttcttggaacaagtatttatttaactttttattatggaatatttcaaatacacataaaagtagaaagantagcataataaacccccatgaacccatcatccagcttcaacaactaacatttttcccgatttaatttcaactattcatcacccccccatcttttgcttgagtattttaaagcaaattcagacatcatatcatttcacttatgtatatctnagtaaatgtctctaccagatgaggttttgctttgtaattnaatcacatgtcaaacctaacaaanttaattctaatcatttaatatggattnaacatctaggtctt

SEQ ID NO: 1983 - DNA, 295 bp, Homo sapiens
  misc_feature (1)..(295): n=a,t,g or c
acagctaggcatgggggagacagaattggactgagcaccaatcattgttctaccttcagtgagctgtgcagccataggannctcccagcttctgctgtgcacctgtcttgagctggaaacaggtggcgggaagcattctcaaaggccccttctagcactaactttgtatgttcagtaaatatcagttccctggaccagctccttttattctggtacagaattattcttagcctatggggtgggggtggggggacagtagtgtctatnatttgtgaattttggaaccagtgtcatt

SEQ ID NO: 1984 - DNA, 592 bp, Homo sapiens
  misc_feature (1)..(592): n=a,t,g or c
ctttcaagatgagctgtatttattactggaacggaagttgtcatatccgtgatcattagctttgaactttaagcacgactgcttttcctccaaggactgtttttcttcaaatgactggcaccagcagcataagcatgacttaaagcagtttttgaatcttttgctcaccaaatacagagcaattgggttaatgcaggaattcagtgaagccatgttgataccaatatagtccaataccaacagaaagctcaaaagttcacatctattgggatcattctgattataaagagtgagcttcagaatcctgctgaggtgaaggggaagccagcagagggcaaagaccaggaccaggcaaaagaccggnttttgggccacttnccggctctggctttagggtggtccatttaaagcaatctgcatgccacttttccttctcaacatttcacaggtcnttagtgtataaaaaatgcngtgatggccatgnaaagccggaattgnactggacagccaccatcttttgccggcctggnaactggctgnaagctgtcttctgaacnggatgagccagccagttccccgatacttccnttgt

SEQ ID NO: 1985 - DNA, 446 bp, Homo sapiens
gacaggttctttctctgtcactcaggctggagtgtagtggcacagtcacagctcactgcagccttaccttctgggctcaagtgatccttccacctcagcctcctgagtagctgggactacaggtatgtgtcactacaactgactaatttttaatttttttatagagacacaggatctcactatattacccaggctggtcttgaactcctgagctcaagcggcccacccacctcagcctccctaagtgttgggattacaggcatgagccacggtgcctggctatcacgcaattcttaagtgcttattccagtagcagaagagattagaaaggctggctttttccaacagtgggagcttgaatctggaaagtcttaaagttgttgtaatttcacactactaagaagcactttgctcatgcaactgaaaaaaaaattaagtgcctaccg

SEQ ID NO: 1986 - DNA, 447 bp, Homo sapiens
gctttccaaagacaacaattttcaccattactcaaaattctgtaccaaatgcaactgattaaaactggatattcctgaagcctaccacctgttcactaatgtccacaggcagccccaatccacctcagtcaaacgtcacacccaaacattcagcttttctcagaccaaattaaatgtttacagaaaaaaaaaagacccaaacgctaaagatatttttaaaatatttaaacaacacaataaagtaaaaacaacctcagacccctcagactagacattcccactgaaaattctttgtggtccctgaatttgattttctatgcaaaggcattgatttccaaagaagtgtgataaaaatgtggtttgggcattctcaaaaactcccagaaagttccctcttctggctggcgactttcactgaaatggaaaatccttcatggagaacgaatt

SEQ ID NO: 1987 - DNA, 267 bp, Homo sapiens
tttttttttttttttttaaaagtccatcaaagttttatttctaagaaataaacttgcatataacccaaacgtaacaactctggtattacatcaatacagctataacattaatgcagcaattatataacacaaaagtgctataatgacatgggaaatgttcatgaactgtgaggtgaaaagatacagaaaatgactatgcctactgatactacctttgaaaaaggatccataaaaaatacattgaatataagttggctaaagaaaata

SEQ ID NO: 1988 - DNA, 416 bp, Homo sapiens
caacttataagtaatttattatgatattatagacaaatgcaaaattactgatatatagggaggttcattgcacagaaatttggtgctaacataaatatctatgagtgagaaatgcttaaaacatttaattatattttatctacaaaacattcatgtcgtcattcaacaaatgacacagatgtgtatgtactactgaaaaagaaaaaggccattgaataagggctgttaaatgaaagaggtaatttgcagaaaaatgtgttacaatatggccacacacgtggatccttccccataatggcttgtgtgtttgtgtgcatctatccactaaaagaatgcatgtagttcacttaatagaggaaaactatagggacagaattggaagagaggagggcatttaatttatatattatttaaat

SEQ ID NO: 1989 - DNA, 228 bp, Homo sapiens
  misc_feature (1)..(228): n=a,t,g or c
ccatttgcatctgaaccttcactaggtcagttggattggctaaaaactggccaataacaccagccatcatccctccaatgactgatttccaaaggggataatgctcatcttcacttttgccaaacacaacctctcggagatgttcatatcgtgaccattcgacctccagaatacactgggtaaaaaagatcattaaaaaggtaactttggctatatgtatcnatatgc

SEQ ID NO: 1990 - DNA, 466 bp, Homo sapiens
taaaagccaaaataataattttatataacataaatacagactaaagcaagcgtaaatgttatgtgttttaaagtctatgaaaacatacatatttttaaagcagtcaactcattgaaagatactaatatttaaagtagaaagttgtgttgtctgctgaacatgagactctgaggtatttgtgagagagaaattgtcaggaaagcagtagaacatttcctgcccatgggtgcagtcttgagtatttgtaatagccatgacgaatccaaaaaccatcaccacagcaccaatgggaagcatgacacaagacataatcttatcggagtgtgtccttggttcttcagacagtttcagataacaggctgatggaatgataaaaatgaggggagttgcacagagcacaccattgagttctagaactatcccgaggcaatcaatcagcaatgacaccagcgtgggctacagtgat

SEQ ID NO: 1991 - DNA, 431 bp, Homo sapiens
cagcagccggagcagatttgtatttagtgtttctgagccgagcagacctcctgtgaatttcctgcttactctgttacacaaacaaattaaagaacaaaaagagaaagaagtaaaaagtgcataaaggttgcagtacaatcatcttacaaggatcccagagtatgtactttataagagcatttaacaattaagattgcccttttgcttttcaagagaagtaattacagcaactaggctaagtaaaaccggaagttcagcacccggaatctcggagctcgctggacaggcgtctccagagcctccaaaaggtgtgagctgcttgtaatagggcaggaggcgggagtaggagtcagtcttgaccaagacaaacactattcatttggttgtgtctacaatagagaaaaacacttaacaactttactccctaaggc

SEQ ID NO: 1992 - DNA, 492 bp, Homo sapiens
  misc_feature (1)..(492): n=a,t,g or c
ttaaacaagtaaagttgttagtatccaggcactgaattataccttcatggtatcaatcaaagctatgatcagaattttatgtaactgcttaatcacttctttaacaagtgtaccgctacaggtaacattaaacgtctctagcaatgatctttatcgggttctcttgccttgactgaaatattattaatacttcttatatccattaacataaaataactttttgttgagcaaaaatagtgtgaaaacattaagatgaatgtgcgctttggaaatgtttaaatagatatgaaatgattaaataaaatcacagtcttgtgcaacatccatagcttacagttatttggcaactatgaaaccacagttactaatgggaatttaagactttttaaaaaattgccaaatngtacttatttggtatatgaaagagggtattcagctattaactcagtanttaataaaccattgatatgnaatttttacctggaaatgggc

SEQ ID NO: 1993 - DNA, 471 bp, Homo sapiens
  misc_feature (1)..(471): n=a,t,g or c
aactactacatttaatagccttcttctctaacacagtaatttttatttaaaaaggagactaaacagaagtcaggggtaggtggttctccatgactgcaaataataataataatgatgattttttttaatgtacagctctcacacaaatttcattttgtgaacacactggtaagtacacgatgctggggcttccaaaatgtggcgtatcccactgatggctccaacttgcgagtgggctcagttatgaaaaactcgggagaggacgggttgtcgctgctcgagccgttttctcggaagccgctgctcaccaacttctcgtatttctccttggtacgcgtccctctccgcgcaccagcctggagatctcctgcttgaggtggtcgacttngctgcagcagctgggttcttctccgactccaggacgtgtctctggctgcaccctcttgaagcggcaggactgggnatagccgn

SEQ ID NO: 1994 - DNA, 318 bp, Homo sapiens
  misc_feature (1)..(318): n=a,t,g or c
acgtaaacccagacatgcttctgctctttttaattagacagataaaattagcaaggagattaaggtaaaaggagaaatttaaaataattaaatgttaggtggaatttacaaaagtgaattgaacaatgaggtacaacaaggaatgtaaagagaaacacagacacatttgaaacattcctcggatgccacacggcttaagccagtccataggtaaagcaagaattctcccttgtcacttcttgaattgcagattccagtgatgtgaaagaacattctccagaaacactttccttctccttttcttgagatgctancaag

SEQ ID NO: 1995 - DNA, 295 bp, Homo sapiens
  misc_feature (1)..(295): n=a,t,g or c
ttcgtaaaacnataaaacaatggtttctagcaagtaaacaaccaactgatcatctctttttacctttcgtagatgttttcttcttaaaacatatagttatatgtttagcttacatatttatgtatattatatatcaacacttaaagaataataattagattcacagagtacggtgggaaatacaatatattaccggtacactattcaggcaagcttatgggaatgacaaaaaaggantgaatcacttttcatgactaggtatcttaattatcctctggtttttttctgactaagg

SEQ ID NO: 1996 - DNA, 188 bp, Homo sapiens
  misc_feature (1)..(188): n=a,t,g or c
ttcaattaaatgtaatttattgtattcttccagatcaaacataaatgaacatcttgggaattgataccacaacacaatgttatacaccattttcacaaccagggttgcattgaatncttttttaaagaacatagnaattttaaaaaanccaaatatttacatattaataaaacatatntacagaagat

SEQ ID NO: 1997 - DNA, 316 bp, Homo sapiens
  misc_feature (1)..(316): n=a,t,g or c
gttttattcatgacaatctgcaaaaaaacaggtggatgggtcagaaagtcactgcaagcctacattcaggggctccacccgcagccaaagcccgccctcggccgnnatgatcagttccagcttcctgcggggctcagtgtggtctggcaggaaccggaagtgcagcagcatcaacgccagggaccactttcatctccgccatggggaacgctngccccgatgcagttcctggggccctgcggagaaggggaataaaagccagagggtgacctccccttgctgttctctgggggtcaaagcgggaggggggtcgtag

SEQ ID NO: 1998 - DNA, 324 bp, Homo sapiens
  misc_feature (1)..(324): n=a,t,g or c
taaatgtacatttactataaaagctgttgcattttagaaaacttgttgtttttattttttactgtttctcagaggcattttagaataaatactttaaatgaaagttagtataaccgatatagaacactggcccacccagagcagtaacatcttttggacggactcacatatgaggtgggatcatttcagtttgttaaatcttacactgcgtataggataactataatatgtattgcattaatcacactacatgggaagggnaatgtcaggggaggttcgcctaggtggaaaaaaccaaaaggttaccccatttatttttattaa

SEQ ID NO: 1999 - DNA, 377 bp, Homo sapiens
  misc_feature (1)..(377): n=a,t,g or c
tcaagatggcatctttaatcacattggccaaggccntaggttccctctgttcaggcccacttagccacacacccaccctggccatatccagaacacttctaccaggtgggccctgcctgttggccactgatgtgggaacctgaggtcacatcagtctgtggactcctgggttaggtgacccttntgccttgaggtctgctggacacctggggcatgggatccagtagtcctgagctcactcttttggccatctccagctgntcctagggggacatggctcaggcccgntcctgggggcagggggttggcggtggcatgaggtggggttgggggaggaggacgtntctccacatttgcagctggctttcctcctgggg

SEQ ID NO: 2000 - DNA, 330 bp, Homo sapiens
  misc_feature (1)..(330): n=a,t,g or c
ttttttttttacggtagcaaaggaaganctttattcaggaggcgggggctctgggctggcantngggnatgcagggagaccctggncagtaggcacccagcaggatggcattgatgtgctccagggtcaggttgctgaagaccatgttgagatgctgtatcccgtgcagggcagcaggtgcacaggctgtggctggcggccctgccacangccacagagctcggtgctgcgggtcgccaccgtgtcatcaccatcctcatagagcacacccacagggtccgtgtaggggaagccgtggtcgtagatgtaggtncggggcgtgggcaggcc

SEQ ID NO: 2001 - DNA, 383 bp, Homo sapiens
  misc_feature (1)..(383): n=a,t,g or c
ttttttttttggcaggcatggttcaggctttactgggcatcacacggagctggggtagggacccagcaaagggagcagggcatacagatggtctttgaggacagtgctagggagctcagagatcagtctggcttctcaaagaagagaaaagcactgacaggaaaagcagtcaggttggcgttagtgcagggaaagggaagacgttaggagggggactttgatgggagggacagtgggggagctgaagcttttaaagagcctcgatgccgggggagggatgatnttagaaggaaagggaagcccaatgaggcctttggggaagagaagagantagaaagaagggaaaaaggaagaaggccagtcccagggattcaggcttttcc

SEQ ID NO: 2002 - DNA, 429 bp, Homo sapiens
ttttttttttttctgatttcatcttttattaaaagctgagagttaaagaactgtagggataactaagtccacctcaaagtccagacagaaactgccctcccaaagaaacaatgtttctttaaaacaaataccacaccttcccagatattatgggtaggtaagtgactaggttttgcagattaatctatagctgcccatgtgcatgtagtccagaaaacatgccaagaaggaagagctctgaaccagacacagaaaggcagtgtggcttcctcgctcaaggggaatgcaaagggctaagagcctgggctttcaagcagctgttatgctagatgaggaaaatgcaaacagattcaatctctggggatattgctgccaacatgctaagcccttcaccagttgccttgatttcgaaggcagtttcccctatgt

SEQ ID NO: 2003 - DNA, 377 bp, Homo sapiens
  misc_feature (1)..(377): n=a,t,g or c
gatttaaaatacatctttcatacattgtttaaaaggaaaaaggaatcatgtcaaaatgtttcaggaaatgatttaagttagatataaagancatagttctgattttgaagtgttagtggaactcaaacagaaatgattagngctctcttaagancatgacatgattcttaaagtgggctatttcagagcctagaaataacactgtattactgactaatgtctacagagtactgcaaaagatgctggaataggaaaaggcagggtgggtgtgaaanttttaatttttaaataggcaaagcccctgtctgggggtattgtcaggtaactttcnggaaatccnaggaggaaaatgatggttaggggnccacnccaggggg

SEQ ID NO: 2004 - DNA, 259 bp, Homo sapiens
ttttccaggtaacacatttttattgtaaaatatccacttgagttgaaaaagttgtcaattacaagtttaaggatacgttatatatttggcttagttgtgaaaataatgtacatttagaatttaacatcacttaaatccattccattgtaccaatattatttatgcatccttatacttaagaatagcatctactaagacaattatgcagaaaagatcccagggataatgcaacacctaaatataatggtgggggagataa

SEQ ID NO: 2005 - DNA, 260 bp, Homo sapiens
  misc_feature (1)..(260): n=a,t,g or c
acttttcataaatttatttatgaaattaaatgtggtttctggcttggagaaggaatagtgcaagagtgactgtccatgctgctgaatcctgtgggctccacgccagctcgccaggccctggntctgctcctggngccccttggcaggacagggcgccatntncacacacccgctgcctgggntgtgggtcantcctgtntgctgagccacagaattcggtctntctcttatggcttctcacgttcacgagcgtaaggcaa

SEQ ID NO: 2006 - DNA, 375 bp, Homo sapiens
  misc_feature (1)..(375): n=a,t,g or c
agcattgtcttatttattaacataattgaaacattttgcataaaactcttgcccatgactattctagcaacaaaattgtactcaaaatatttcactgtgaaatggtattgcaacttgaatatcattttttattaatgaattgatttccataaagcaaatcttactcttaaaatggcagattatgtgatcaaaaagcgattcaaaaaagcttccccctcctcatgccaaccctcaagaccatgtggatccagctgaatcctcagccctgggnctagactanggttgaggggaagagccgttaactcattcctaaccagacaggctaatngggcactccaactcacacttcaaggggccncatggacagtcgggtgt

SEQ ID NO: 2007 - DNA, 232 bp, Homo sapiens
  misc_feature (1)..(232): n=a,t,g or c
ccncaaggatgagtttatttcacatgtcacccagcatgcaactgaacacatcacagaaaccaaatacttactaaattagtgtgcattgctttacaaggaaaagtcaataaaatggcatagtgaatatatcattggncttgaagncagtgttcatctgaaaatgggnacaataatcatgncaataccnttcagntaatcatattctgaaaattaaatacattgtattacaatg

SEQ ID NO: 2008 - DNA, 277 bp, Homo sapiens
  misc_feature (1)..(277): n=a,t,g or c
ttttttctcagtttctcctttattgctcccgtacgaacccctcccctcccccctgtaaacacagtgctgcgagatcgntggcagagaaggcttcctccagcggctgggtggtgaaggaccctggctcttctctcggggcgacccctcagtgctcggcagtcatactggggtgcgagagaggtgggcagcagntcagcctccccccgntgggatgcgaaagtttnttggtntcagcttcatttccgtgaagggcaccnngaactcgaagcccttccag

SEQ ID NO: 2009 - DNA, 405 bp, Homo sapiens
  misc_feature (1)..(405): n=a,t,g or c
cagagncnagtttattgcactgactcaaagcacaactaaaaattaaaaccagaaagaaaactgtacaaagcacgaagctacaactttaaaagcatcacctagacgcgggtttaattgcactacagnccatgggtgaggagagctttncatccgtgagcgccgggcaaggacaacagacacagagagatgcagcccgcctgggntcatctgctgcaccaacttttacaaaaggttctagaaaagggaagtntnaagtcagatctgggatttcggcatcttgacctcatttggacatggaaaacctccacctatgtggctggctgggtcctgtcagagaacatattttatcaccctccacctgcggcctgggggntccctgacaccaaggactnggcctgggcaggg

SEQ ID NO: 2010 - DNA, 471 bp, Homo sapiens
  misc_feature (1)..(471): n=a,t,g or c
tttttcgtttccatacagttttatttgcaatttgttggaaccatggagaacaatcggcagatacacatgttgcttctgggaacagcattcaactccagatgctttttctgctaaggagcagggccacaggtnncaancnacccagtgctgtgctgcgcggagggctgtactgaaggttctgaaggcctggngagtccccctcacggccagaaggagagacccggcttcggcttcatggccggcctcccgcagtntctgcccagctcctctgcatcccagcgcccttgctgggaggctagccaagaggtgggtcaacaatacgtgggatagaaggggagtgggagacacantttcaccagcagcttggcatccaggggagcagggaaagaagttntttgggtcacaatttgggaatcatttcacctttcaagaaattaaggacagggcacagcgttaaggggggtnttttnc

SEQ ID NO: 2011 - DNA, 424 bp, Homo sapiens
  misc_feature (1)..(424): n=a,t,g or c
agagctctagcacatttattcgggagagtaagcctgggaaagactaagggagtggtggcagggagaaaggctgtggggaatcagagcgggtgctcagttgggtcttgaagganannnnnnngnnggtgggaggtgggttnccgaggatatcttggttgaagacttgggggtcaagacaaagggacttagggggatggggtctggttagagttggggagggggcctaggacatccgtgcagagtctggggaggttggggtgggagagtctgtacaagtttggtgttgggtgttctagttggcctggtgtccaagagttggggcagtccgaaaaagggttccagagtctggtgtggctggctggggtttcacggcanaaaatgggctggaaggggcagttgtaaactgtctggttgcaaggnaaag

SEQ ID NO: 2012 - DNA, 574 bp, Homo sapiens
  misc_feature (1)..(574): n=a,t,g or c
ttaaaaagtagactatatatatatatatcttcatatatgcctatttacatataaatagatatatatacatatacacgcatctataaattacattctatggagagttctctttcttcctcctatctttggccagggcctctgnttctcctgagaggtggctggtggtggctcctgtgagggaggaaaggcagctgggtgccccctcccccagcccttcccactgatatctgctgcgagttttacattctactttcgttgccatggtttctgtatcctaggagagaggcgatgcgganctccgccagccctgcgagggagggaagcagccccatggcaggttttctgtctgtcctaagagctttctgcatttactgggtgagagagagggcagctgtgcagcgttcggcctccaattccattttaattttgtttctttgtttgtctttcctcaaatatacagtccatcaccttggctccagtgcatgtcaccaaaaattctccagggatttcatagtttggacctcggtggtgtggctngccaggatatccatgcaggangctgcactctganagc

SEQ ID NO: 2013 - DNA, 429 bp, Homo sapiens
  misc_feature (1)..(429): n=a,t,g or c
ttgacgttggcagtgacatttatttttctnnggggaggggagttatatacagcagtgacccggagcccctcacccccaccaggcttaggtggggacaggaggcgttggcagaaggcacacagtggcagtagccagaagaggccaggaagtaagggtgggtatgtgatgtgtcctgggagacccagatgaggaaattgaggctcagtgagggcctcaggtcacacagtaaggtgcgaaggagctagtcccgagagcttgtggtggttgcttctctcttgcctgggctacaggaggacgcaggggcagcccccgcccttcttcctgggggcactgggagggctcggtgggagctcttgttcctggtatttccggacagcccgcaccagctgcttcaaaagcctcgtccacgttgagacgcattttggccga

SEQ ID NO: 2014 - DNA, 467 bp, Homo sapiens
  misc_feature (1)..(467): n=a,t,g or c
ggtacaaaaggtgtctttattgaggtctgggttaaaattaggcacttggccagagcagcagcttaaatatgaggcaagcagtcaggggttagccatgcctgggnntgggttggggtcatgaggctacaggcacagactgtccccaggtggacagaagttnggagcaggannnnnngnnngnnngggccgcanancagcctgggtcagaggcctggtgggcnagcccagtgggactaggcaggaagctctggtggcaggtccagcagngaggggaccaggatctcttgctccacgtgccccttagacccaggcctgagcctctggnagngggcagccgcacttggcagggcggtcttcccaagcctcacttncttcaccttngcatcgtaggtgccttgcattcttgtaggcgctcacgtagccactgtcgtccaggatgtcctgccgtcccgcaatgcccttgccct

SEQ ID NO: 2015 - DNA, 852 bp, Homo sapiens
cttgcagctgcccacctcaccctcagctctggcctcttactcaccctctaccacagacatggctcagtcactggctctgagcctccttatcctggttctggcctttggcatccccaggacccaaggcagtgatggaggggctcaggactgttgcctcaagtacagccaaaggaagattcccgccaaggttgtccgcagctaccggaagcaggaaccaagcttaggctgctccatcccagctatcctgttcttgccccgcaagcgctctcaggcagagctatgtgcagacccaaaggagctctgggtgcagcagctgatgcagcatctggacaagacaccatccccacagaaaccagcccagggctgcaggaaggacaggggggcctccaagactggcaagaaaggaaagggctccaaaggctgcaagaggactgagcggtcacagacccctaaagggccatagcccagtgagcagcctggagccctggagaccccaccagcctcaccaacgcttgaagcctgaacccaagatgcaagaaggaggctatgctcaggggccctggagcagccaccccatgctggccttgccacactctttctcctgctttaaccaccccatctgcattcccagctctaccctgcatggctgagctgcccacagcaggccaggtccagagagaccgaggagggagagtctcccagggagcatgagaggaggcagcaggactgtccccttgaaggagaatcatcaggaccctggacctgatacggctccccagtacaccccacctcttccttgtaaatatgatttatacctaactgaataaaaagctgttctgtcttcccacccgc

SEQ ID NO: 2016 - DNA, 1364 bp, Homo sapiens
aggggactggggccaagagccgggagcgcgggcgcaaaggcaccagggcccgcccagggcgccgcgcagcacggccttgggggttctgcgggccttcgggtgcgcgtctcgcctctagccatggggtccgcagcgttggagatcctgggcctggtgctgtgcctggtgggctgggggggtctgatcctggcgtgcgggctgcccatgtggcaggtgaccgccttcctggaccacaacatcgtgacggcgcagaccacctggaagggcctgtggatgtcgtgcgtggtgcagagcaccgggcacatgcagtgcaaagtgtacgactcggtgctggctctgagcaccgaggtgcaggcggcgcgggcgctcaccgtgagcgccgtgctgctggcgttcgttgcgctcttcgtgaccctggcgggcgcgcagtgcaccacctgcgtggccccgggcccggccaaggcgcgtgtggccctcacgggaggcgtgctctacctgttttgcgggctgctggcgctcgtgccactctgctggttcgccaacattgtcgtccgcgagttttacgacccgtctgtgcccgtgtcgcagaagtacgagctgggcgcagcgctgtacatcggctgggcggccaccgcgctgctcatggtaggcggctgcctcttgtgctgcggcgcctgggtctgcaccggccgtcccgacctcagcttccccgtgaagtactcagcgccgcggcggcccacggccaccggcgactacgacaagaagaactacgtctgagggcgctgggcacggccgggcccctcctgccagccacgcctgcgaggcgttggataagcctggggagccccgcatggaccgcggcttccgccgggtagcgcggcgcgcaggctcctcggaacgtccggctctgcgccccgacgcggctcctggatccgctcctgcctgcgcccgcagctgaccttctcctgccactagcccggccctgcccttaacagacggaatgaagtttccttttctgtgcgcggcgctgtttccataggcagagcgggtgtcagactgaggatttcgcttcccctccaagacgctgggggtcttggctgctgccttacttcccagaggctcctgctgacttcggaggggcggatgcagagcccggggcccccaccggaagatgtgtacagctggtctttactccatcggcaggcccgagcccagggaccagtgacttggcctggacctcccggtctcactccagcatctccccaggcaaggcttgtgggcaccggagcttgagagagggcgggagtgggaaggctaagaatctgcttagtaaatggtttgaactctcaaaaaaaaaaaaaaaa

SEQ ID NO: 2017 - DNA, 1301 bp, Homo sapiens
gggcacgcgcaccaccgcccgcagcgcagcccgcgcccgcgcaggccccgcagccggcccagcccgccgccaccggccgcggctgcctccagaggacctggtccagacaagatgtgaaatggagaagtatctgacacctcagcttcctccagttcctataattccagagcataaaaagtatagacgagacagtgcctcagtcgtagaccagttcttcactgacactgaagggttaccttacagtatcaacatgaacgtcttcctccctgacatcactcacctgagaactggcctctacaaatcccagagaccgtgcgtaacacacatcaagacagaacctgttgccattttcagccaccagagtgaaacgactgcccctctccggccccgacccaggccctccctgagttcaccagtatattcagctcacaccagaccgcagctccagaggtgaacaatattttcatcaaacaagaacttcctacaccagatcttcatctttctgtccctacccagcagggccacctgtaccagctactgaatacaccggatctagatatgcccagttctacaaatcagacagcagcaatggacactcttaatgtttctatgtcagctgccatggcaggccttaacacacacacctctgctgttccgcagactgcagtgaaacaattccagggcatgcccccttgcacatacacaatgccaagtcagtttcttccacaacaggccacttactttcccccgtcaccaccaagctcagagcctggaagtccagatagacaagcagagatgctccagaatttaaccccacctccatcctatgctgctacaattgcttctaaactggcaattcacaatccaaatttacccaccaccctgccagttaactcacaaaacatccaacctgtcagatacaatagaaggagtaaccccgatttggagaaacgacgcatccactactgcgattaccctggttgcacaaaagtttataccaagtcttctcatttaaaagctcacctgaggactcacactggtgaaaagccatacaagtgtacctgggaaggctgcgactggaggttcgcgcgatcggatgagctgacccgccactaccggaagcacacaggcgccaagcccttccagtgcggggtgtgcaaccgcagcttctcgcgctctgaccacctggccctgcatatgaagaggcaccagaactgagcactgcccgtgtgacccgttccaggtcccctgggctccctcaaatgacagacctaactattcctgtgtaaaaacaacaaccc

SEQ ID NO: 2018 - DNA, 6611 bp, Homo sapiens
tgactgcatcacctggtctgtgaattttccattagaagcttggtgtgctgttaggtgaaagacttgctcagctatgcgtcattgggttttatcaacatataggcgaaaaaaatcctggtctctgagtgtacagctgagatgaaaatttcttttattggaggaagtattgagtgtgtgctctcaaatgcggcctcagttgagtagtgcattcctgagttttggaagcaaatttgcaaacaattgagagtcgtacagtgggtgttctaactggattcaggttttttctaatgtaattttttcacacgtaaattaaaaagtttagaaatgtcacacataacttcataacactttatggagaaatggttgtacttttaatttttttctttttatttatactccaactgactgagcagaggttgtacttctaaataactttgtggaagtttttagtaccataatttttataattttcattccagtcctttgatatttatgacagtacttctgaagcgcttactgagtgccggacactgttgtaagtgctttacggaacttgacttttttttttttttgagacggactctcgctctgtcgcccaggctggagtgcagtggtgcagtggctcgatctcggctcactgccacctctccctcatggtttcaaacacttctcctgcctcagcctcccaggtagccaggattatagccgcccgccaccactcccgactaattttattttgtatgttcttttttagtagagacggaggagtttcaccatgttggccaggctggtatcgacctcctgacctcaagtgatgtgtccatctcggcctcccaaggtgctggaattacaggtgtgagccactgtgctcggcctaccttttttttttgttttttgtttttttgaaaaggagtttcgctcttgtccaggctggagtataatggtgcgatctcagctcaccgcaatctccgcctcccagattcaagcgattctcctgcctcagcctcctcaggagctgggattacaggcgcccaccgccatgcccggctaatttttgtatttttagtagagacggggtttcactatattggccaggctggtctcgaactgctgacctcaagtaatccgcctgcctcagcctcccaaagtgctgggattacagacgtgatccaccaggatcacaccaggccgcgcctggcctgctttcattttaaaagtcaaatttgtcatccgcctcagtgcttgtaatcttttctgagtgagatactgaaatttgcagtttcgttttgcttgcacttgttcactggaccagtagtcactgttaaatgtaaaagtatctacttcctctgaaagttttttattcctttatttcctgcctgggcttgtcctccaccctacatgtatgcgtagtagatttagtgtttgttatcctaacctttaggtttagggattgactgggtttctgactttttatttggccaatgaggacgatacagaaaatgaagcattggtcattatcacattttaacgctgaaaaagtaagaaggacaaccccggaataaaatgatatcagtatcaagataaaagtttggaatgggagaaaaattctcaaagcctgaaagaaaatctgtagttacttttggtgacgctgtccagttcccacaatgtatcattccttatctgaaactagacatcctctgcagccagaagaacaagaagtaggcattgaccccttgtccagttactctaacaagtctggaggagattcaaataaaaatggaagaagaacaagttctactttagactctgaagggacttttaattcctataggaaagaatgggaagaactatttgtaaacaacaattacttggcaacaataaggcagaaggggattaatgggcagctgagaagcagcaggttccgcagcatttgctggaagctatttctttgtgttcttcctcaagacaaaagtcaatggataagtagaattgaagaattaagagcatggtatagcaacattaaagaaatacatattaccaacccgaggaaggttgttggccaacaagatttgatgatcaataatcctctttcacaggatgaagggagtctttggaacaaattcttccaagataaagaacttcgatcaatgattgaacaagatgtcaaaagaacgtttcctgaaatgcagtttttccagcaagaaaatgtgagaaaaattcttacagatgttcttttctgttatgccagagaaaacgagcagttgctttataaacagggcatgcacgaactgttagcacctatagtctttgtccttcactgtgaccaccaagcttttctacatgccagtgagtctgcacagcccagtgaggaaatgaaaactgtcttgaaccctgagtatctggaacatgatgcctatgcagtgttctcacaacttatggaaactgctgaaccttggttttcaacttttgagcatgatggtcagaaggggaaagaaacactgatgactcccattccctttgctagaccacaagatttagggccaacaattgctattgttactaaagtcaaccagatccaggatcatctactgaagaagcatgatattgagctttacatgcacttgaacagactagaaattgcaccacagatatatgggttaaggtgggtgcggctgctatttggacgagagttccccctgcaggaccttctggtggtctgggatgccttgtttgcagacggcctcagcctgggtttagtagattatatcttcgtagccatgttactttacatccgagatgctttgatctctagtaactaccagacctgtctcggccttctgatgcattacccattcatcggggatgtacactcactgattcttaaggctctgttccttagagatccaaagagaaatccaagaccagtgacttatcaattccatccaaatttagattattacaaagcacgaggagcagacctcatgaataaaagccggaccaatgccaaaggtgctcccctgaatataaataaggtctctaatagcctgattaattttggaagaaagttgatttccccagcaatggctccaggcagtgcaggtggccctgtacctggaggcaacagcagtagctcctcctctgttgtaattcctaccaggacctcagcagaggccccaagccatcacttgcaacagcaacagcagcagcagaggctgatgaaatcagaaagcatgcctgtgcaattgaacaaagggctaagttctaaaaacatcagttcatctccaagcgttgagagtttgcctggaggaagagaattcactggctctccaccttcatctgctactaaaaaagattccttttttagcaacatctcacgttctcgctcacacagcaaaactatgggcagaaaagaatctgaagaagaattagaagcccaaatttccttccttcaagggcagttgaatgacctggatgccatgtgcaaatactgtgcaaaggtgatggacactcatcttgtaaatattcaagatgtgatattacaagaaaatttggaaaaagaagatcaaattctggtttccctggcaggattaaaacagatcaaagacattctaaaaggttccctgcgttttaaccagagccagctagaggccgaagagaacgaacagatcaccattgcggacaaccactactgctccagcggccagggccagggccgaggccaaggccagagcgttcaaatgtcaggggccattaaacaggcctcttcagaaacgccagggtgcactgatagagggaattccgatgacttcatcctgatttccaaagatgatgatgggagcagtgccaggggctccttctccggccaggcccagcctcttcgcaccctcagaagcacctctgggaaaagccaggccccagtctgctccccactggtgttctcagatccactgatgggcccagcctcagcttcctccagcaaccccagctccagtcctgatgacgacagcagcaaggactctggcttcaccattgtgagtcccctggacatctgaccacagtgcccagtcctgccccacagggatctagccacccttcagtggccccaaggccagactgaggctcatccagtggagaaccttcttaaaccactgcttccttcccggcatgcatttggcattggtccagccctttgaaaccccttagagagaagcatatatggccacaaagcacagaggcttaggtttgccacatgcagacagggctttctgggcccttacctaatccccacccgactcttgctctgagttagagctgagttacgtacccagtatcacactcacagttagaaaagaccgaatcacaatttagaatcacttttcctctgtccccttctccccagctaagaatgtgtggcacctccatcagttatacttagaaggagcagaaatagttattttcgtatcttctatccctcaaagcatcagacatgggaaaattggtttataccaagaaagcttcctctgtggaaatctgtctcagcctactttattcctgcattgggaagccatatcgcagagctaaatgcaatagaatgaaccagaactagtggattccagggctgggggaaaaaaaaaaaagaaaaaacctcattactgacctctcaaagttataaggatctctgcaaacaggatctaagcttaggaataatatttaggtgtgatatagtgttagatttttttgatgtattaaagaatgcatctccaatccttaggccatatcaactttggccatcaatatctctccttaaacaattatatttcaccttttagaatctttcatagccagaaaacaagattactgtaagccagttttagctgcactgatttcaaaagatataagaatattactatccttcaaatggaaaatgcgaccttgactttatgggataaacatctttcagacagtcagttttctagtcaggtttctctggtttcagagctgtatatacctgtcaactgaggaataaagggaaaaacccaagttcattcccacccaaagtcagaatccctcattggccttaaggtagcagtcataagacagagaattggacctagagtcccttctgtggggaataaggatacctagagaacattccacatgccaagaggatgcaggatttctacacaaccccttcccttcttggaagtcaagtgtaggtactgcagggcctgtgctcagctgtgaaccccgtatcctgggccccactgccgggaccgggtctgacatgccagtgccttcctgggctgagcacagattagagactctcccccttgtcagtcagcaccttaggaaaccatgatgggcacagagcatcacatgagctgtttctctccttaaagaagatccctggaaaggatgcttttcctctcctttgcctgcgcaggaattctaacaggagtgggtgaggatggcagagggacacagtgcctgtctcgcctccatcagggagagcagccatgccagggatgactagctctttgagcctgtcctcagaggatggcgaggcagccgggcagtggaggccttcatggtaacaaatgaaagctcagtatagaggaacagacactgtttacgtccctcccactgctaaccttatatatctctatagacaaatgtgataatgacatgatttcccacctgccctccaagaaaatggtgactcactctcaagtcagctactgtagagagggttctaattggttctgcaatttgctcttaaactctagcagggaactctcctcttaccacatcagcatgtaaggtgaataataactctggttttgccagacagcaggttgtctgaccttcaaccactgggcaattgcctggcagatgcacacagtagctccctggcttctggctctgagtgttcctctcagcacctctgagtaagctgctgccaagcacatatccctatgacaacactttgtaaaagccgcggggcccccatacagcgagtgaccttgcaactgtgcagggttgccattggtcactttctcaccttgggaaggtgtcagtgttttcagttctaaggtaagaggtgtagagctgttcccaccagggctctgggacagactggaaaggaccacagacctggccatccctgggcagcagggccagtgtcacctgctgacctctagtatttcctttgccctagagctagagtcatgatagctgagggtcactcgccctgcaagagtcactaggcacccaccatgccaataaggctctccgctggctccctgcagttggctgggtgtttaatagtcactgaaaactcccagccctgctgcacactagaggcaggtcctctcggtcctctccatcctgtgcttctgtggcccccagcaagctcaccgcctccttggaggagagagacatacaaggacagtgggtcatgggtagtaccagcctcaaattcccacaggctcatactcagacaattgtattactgccttatgttttttaagtgtttttttaaattcttcatagttgagtattatttgcaattttattagttacagtgctattaaagaatatgtgctcctttt

SEQ ID NO: 2019 - DNA, 1056 bp, Homo sapiens
ttctttttatcattacatcaaattgttttcccaggcttgcgtaatggaatgtgaaggtaaactgccttctctgaaaatttgggaaacctgcaaggagctcctgcagctgtccaaaccagagcttcctcaagatggcaccagcaccctcagagaaaatagcaaaccggaagaaagccatttgctagccaaaaggtatgggggcttcatgaaaaggtatggaggcttcatgaagaaaatggatgagctttatcccatggagccagaagaagaggccaatggaagtgagatcctcgccaagcggtatgggggcttcatgaagaaggatgcagaggaggacgactcgctggccaattcctcagacctgctaaaagagcttctggaaacaggggacaaccgagagcgtagccaccaccaggatggcagtgataatgaggaagaagtgagcaagagatatgggggcttcatgagaggcttaaagagaagcccccaactggaagatgaagccaaagagctgcagaagcgatatgggggcttcatgagaagagtaggtcgcccagagtggtggatggactaccagaaacggtatggaggtttcctgaagcgctttgccgaggctctgccctccgacgaagaaggcgaaagttactccaaagaagttcctgaaatggaaaaaagatacggaggatttatgagattttaatatcttttcccactagtggcccccaggccccagcaagcctccctccatcctccagtgggaaactgttgatggtgttttattgtcatgtgttgcttgccttgtatagttgacttcattgtctggataactatacaacctgaaaactgtcatttcaggttctgtgctctttttggagtctttaagctcagtattagtctattgcagctatctcgtttttcatgctaaaaatagttttttgttatcttgtctcttattttttgacaaacatccaataaatgcttacttgtatatagagataataaacctattaccccaagtgcataatatccttgtaagtctctttttctccaaggctc

SEQ ID NO: 2020 - DNA, 1050 bp, Homo sapiens
ttctttttatcattacatcaaattgttttcccaggcttgcgtaatggaatgtgaaggtaaactgccttctctgaaaatttgggaaacctgcaaggagctcctgcagctgtccaaaccagagcttcctcaagatggcaccagcaccctcagagaaaatagcaaaccggaagaaagccatttgctagccaaaaggtatgggggcttcatgaaaaggtatggaggcttcatgaagaaaatggatgagctttatcccatggagccagaagaagaggccaatggaagtgagatcctcgccaagcggtatgggggcttcatgaagaaggatgcagaggaggacgactcgctggccaattcctcagacctgctaaaagagcttctggaaacaggggacaaccgagagcgtagccaccaccaggatggcagtgataatgaggaagaagtgagcaagagatatgggggcttcatgagaggcttaaagagaagcccccaactggaagatgaagccaaagagctgcagaagcgatatgggggcttcatgagaagagtaggtcgcccagagtggtggatggactaccagaaacggtatggaggtttcctgaagcgctttgccgaggctctgccctccgacgaagaaggcgaaagttactccaaagaagttcctgaaatggaaaaaagatacggaggatttatgagattttaatatcttttcccactagtggccccaggccccagcaagcctccctccatcctccagtgggaaactgttgatggtgttttattgtcatgtgttgcttgccttgtatagttgacttcattgtctggataactatacaacctgaaaactgtcatttcaggttctgtgctctttttggagtctttaagctcagtattagtctattgcagctatctcgttttcatgctaaaatagtttttgttatcttgtctcttatttttgacaaacatcaataaatgcttacttgtatatagagataataaacctattaccccaagtgcataatatccttgtaagtctctttttctccaaggctc

SEQ ID NO: 2021 - DNA, 1230 bp, Homo sapiens
gaatcaattcctccaaaccgcaagaacagtaacatttattattcaaaaaaacaaaaaccagattataggatatgacatttggtataacaataatgttattgaaaaatggaaaaatgatccattaatggcttgggctaaaaattcgggggacagcctaggggcctggatctattgcctacttagagagaggccaactcagacacagccgtgtatgctcccagcagcaacggaggttcacgtccgcctgcagggacagaaagacatggtctggaaatggatgccacttctgctgcttctggtctgtgtagccaccatgtgcagtgcccaggacaggactgatctcctcaatgtctgtatggatgccaagcaccacaagacaaagccaggtcctgaggacaagctgcatgaccaatgcagtccctggaagaagaatgcctgctgcacagccagcaccagccaggagctgcacaaggacacctcccgcctgtacaactttaactgggaccactgcggcaagatggagcccgcctgcaagcgccacttcatccaggacacctgtctctatgagtgctcacccaacctggggccctggatccagcaggtgaatcagacgtggcgaaaagaacgcttcctggatgtgcccttatgcaaagaggactgtcagcgctggtgggaggattgtcacacctcccacacgtgcaagagcaactggcacagaggatgggactggacctcaggagttaacaagtgcccagctggggctctctgccgcacctttgagtcctacttccccactccagctgccctttgtgaaggcctctggagtcactcatacaaggtcagcaactacagccgagggagcggccgctgcatccagatgtggtttgattcagcccagggcaaccccaacgaggaagtggcgaggttctatgctgcagccatgcatgtgaatgctggtgagatgcttcatgggactgggggtctcctgctcagtctggccctgatgctgcaactctggctccttggctgagttcagtcctcccagactacctgccctcagcttggataaccaggctgggctcagctcagctcccacaaatgacagccccttaagcatgcttctattagtcacctaaccctctgtcacccagtctgttgctgctccatggtggggccaagagtcacttctaataaacagactgttttctaataaaaaaaaaaaaaaaaaaa

SEQ ID NO: 2022 - DNA, 2269 bp, Homo sapiens
ccgtttcctcccctcccctccactcggccgtccctccttcctcctccctcctccctcctcctcccgctcctgaagagcgcgccgcgtgggggacggcccggttacttcctccagagactgacgagtgcggtgtcgctccagctcagagctcccggagccgcccggccagcgtccggcctccctgatcgtctctggccggcgccctcgccctcgcccggcgcgcaccgagcagccgcgggcgccgagcagccaccgtcccgaccaagcgccggccctgcccgcagcggcaggatgaatgatttcggaatcaagaatatggaccaggtagcccctgtggctaacagttacagagggacactcaagcgccagccagcctttgacacctttgatgggtccctgtttgctgtttttccttctctaaatgaagagcaaacactgcaagaagtgccaacaggcttggattccatttctcatgactccgccaactgtgaattgcctttgttaaccccgtgcagcaaggctgtgatgagtcaagccttaaaagctaccttcagtggcttcaaaaaggaacagcggcgcctgggcattccaaagaacccctggctgtggagtgagcaacaggtatgccagtggcttctctgggccaccaatgagttcagtctggtgaacgtgaatctgcagaggttcggcatgaatggccagatgctgtgtaaccttggcaaggaacgctttctggagctggcacctgactttgtgggtgacattctctgggaacatctggagcaaatgatcaaagaaaaccaagaaaagacagaagatcaatatgaagaaaattcacacctcacctccgttcctcattggattaacagcaatacattaggttttggcacagagcaggcgccctatggaatgcagacacagaattaccccaaaggcggcctcctggacagcatgtgtccggcctccacacccagcgtactcagctctgagcaggagtttcagatgttccccaagtctcggctcagctccgtcagcgtcacctactgctctgtcagtcaggacttcccaggcagcaacttgaatttgctcaccaacaattctgggactcccaaagaccacgactcccctgagaacggtgcggacagcttcgagagctcagactccctcctccagtcctggaacagccagtcgtccttgctggatgtgcaacgggttccttccttcgagagcttcgaagatgactgcagccagtctctctgcctcaataagccaaccatgtctttcaaggattacatccaagagaggagtgacccagtggagcaaggcaaaccagttatacctgcagctgtgctggccggcttcacaggaagtggacctattcagctgtggcagtttctcctggagctgctatcagacaaatcctgccagtcattcatcagctggactggagacggatgggagtttaagctcgccgaccccgatgaggtggcccgccggtggggaaagaggaaaaataagcccaagatgaactacgagaagctgagccggggcttacgctactattacgacaagaacatcatccacaagacgtcggggaagcgctacgtgtaccgcttcgtgtgcgacctccagaacttgctggggttcacgcccgaggaactgcacgccatcctgggcgtccagcccgacacggaggactgaggtcgccgggaccaccctgagccggccccaggctcgtggactgagtgggaagcccatcctgaccagctgcctccgaggacccaggaaaggcaggattgaaaatgtccaggaaagtggccaagaagcagtggccttattgcatcccaaaccacgcctcttgaccaggctgcctcccttgtggcagcaacggcacagctaattctactcacagtgcttttaagtgaaaatggtcgagaaagaggcaccgggaagccgtcctggcgcctggcagtccgtgggacgggatggttctggctgtttgagattctcaaaggagcgagcatgtcgtggacacacacagactatttttagattttcttttgccttttgcaaccaggaacagcaaatgcaaaaactctttgagagggtaggagggtgggaaggaaacaaccatgtcatttcagaagttagtttgtatatattataataatcttataattgttctcagaatcccttaacagttgtatttaacagaaattgtatattgtaatttaaaataattatataactgtatttgaaataagaattc

SEQ ID NO: 2023 - DNA, 640 bp, Homo sapiens
cgcgcgcccgaacgaagccgcggcccgggcacagccatggcccggcgggcggggggcgctcggatgttcggcagcctcctgctcttcgccctgctcgctgccggcgtcgccccgctcagctgggatctcccggagccccgcagccgagccagcaagatccgagtgcactcgcgaggcaacctctgggccaccggtcacttcatgggcaagaagagtctggagccttccagcccatcccattggggacagctccccacacctcccctgagggaccagcgactgcagctgagtcatgatctgctcggaatcctcctgctaaagaaggctctgggcgtgagcctcagccgccccgcaccccaaatccagtacaggaggctgctggtacaaatactgcagaaatgacaccaataataggggcagacacaacagcgtggcttagattgtgcccacccagggaaggtgctgaatgggaccctgttgatggccccatctggatgtaaatcctgagctcaaatctctgttactccattactgtgatttctggctgggtcaccagaaatatcgctgatgcagacacagattatgttcctgctgtatttcctgcttccctgttgaattggtgaataaaaccttgctcttt

SEQ ID NO: 2024 - DNA, 1011 bp, Homo sapiens
ggtttattttccagatgcaatcaatgccccagtcacctgctgttataacttcaccaataggaagatctcagtgcagaggctcgcgagctatagaagaatcaccagcagcaagtgtcccaaacaagctgtgatgtgagttcagcacaccaaccttccctggcctgaagttcttccttgtggagcaagggacaagcctcataaacctagagtcagagagtgcactatttaacttaatgtacaaaggttcccaatgggaaaactgaggcaccaagggaaaaagtgaaccccaacatcactctccacctgggtgcctattcagaacacccaatttctttagcttgaagtcaggatggctccacctggacacctataggagcagtttgccctgggttccctccttccacctgcgttcctcctctagctcccatggcagccctttggtgcagaatgggctgcacttctagaccaaaactgcaaaggaacttcatctaactctgtcctccctccccacagcttacagaccattgtggcaaggagatctgtgctgaccccaagcagaagtgggttcaggattccatggaccacctggacaagcaaacccaaactccgaagacttgaacactcactccacaacccaagaatctgcagctaacttatttttccctagctttccccagacaccttgtttattttattataatgaattttgtttgttgatgtgaaacattatgccttaagtaatgttaattcttatttaagttattgatgttttaagtttatctttcatggtactagtgttttttagatacagagacttggggaaattgcttttcctcttgaaccacagttctacccctgggatgttttgagggtctttgcaagaatcattaatacaaagaattttttttaacattccaatgcattgctaaaatattattgtggaaatgaatattttgtaactattacaccaaataaatatatttttgtacaaaaaaaaaaaaaaaaaaaaaa

SEQ ID NO: 2025 - DNA, 1031 bp, Homo sapiens
gtctgcccctgcccttgcagatggccaagctgcggagcctcctctccagtgctgagaacgagcccccagtgcctcttgtgagcaactggcgacctccacagcctatcaataacagggtggtgagagcttccttcaaatgaggctgctggatcttgccctcttcaggaaaggaaacctaccattggagagcttggttccttgcctccttctggtgctcttactccaagtctatttcatttttccacactgagcaatgaatgtgagagatgtggtcaccaagatctaagttacttgttgaaagaaagttactttcgacaagatctaatatgaaagcatagatttcacatttgatctctgtaataatcatctttcctataaaagtagcatttttggtaaagtttcaaagaagaagaaacagagatggaagagtaaagatatttttaaaatggctagctattgggcaccagtttttctgttatctaaaatttcacacaacttcatgtttttatttttatattatgagttgtccatcttaaagaaatatgagtaattctacatgtagtagaggtgtatgaagatcatataacaattaaacataagccagaaattaaaatgactatagacagcaagaattgagctaataatatgttttaactcttaacaccagcaagaagtcagtcatttattgaagttttagctactaagattacttggttttgattaccagtgaaaagaaaacacaatacaatcaggagttttcaaatttttgattcagtatttgaatttcttcttcataaatgtagttggaatttatcctagtatttttctttacctgaaggagggccatttatttttaatttcactacatttttctttgcatgattattaaaataaaaactgcctctgttgtgtttctcactggaggctggaatgaatgatcactagaacacaaaagagtgaatgatgacacttgaagtcaaagcagttgtactgatcaccagaaccaataaagacataaatggaaaacgttg

SEQ ID NO: 2026 - DNA, 2689 bp, Homo sapiens
ggctggggcctgaggcctggggctcacccacgcccccgccgacgcctgccgcgccgccgccacccccgccacccggagccccgggtggctcgcaggacacctgtacgtcgtgcggcggcttccggcggccagaggagctcggccgagtggacggcgacttcctggaggcggtgaagcggcacatcttgagccgcctgcagatgcggggccggcccaacatcacgcacgccgtgcctaaggccgccatggtcacggccctgcgcaagctgcacgcgggcaaggtgcgcgaggacggccgcgtggagatcccgcacctcgacggccacgccagcccgggcgccgacggccaggagcgcgtttccgaaatcatcagcttcgccgagacagatggcctcgcctcctcccgggtccgcctatacttcttcatctccaacgaaggcaaccagaacctgtttgtggtccaggccagcctgtggctttacctgaaactcctgccctacgtcctggagaagggcagccggcggaaggtgcgggtcaaagtgtacttccaggagcagggccacggtgacaggtggaacatggtggagaagagggtggacctcaagcgcagcggctggcataccttcccactcacggaggccatccaggccttgtttgagcggggcgagcggcgactcaacctagacgtgcagtgtgacagctgccaggagctggccgtggtgccggtgttcgtggacccaggcgaagagtcgcaccgaccctttgtggtggtgcaggctcggctgggcgacagcaggcaccgcattcgcaagcgaggcctggagtgcgatggccggaccaacctctgttgcaggcaacagttcttcattgacttccgcctcatcggctggaacgactggatcatagcacccaccggctactacggcaactactgtgagggcagctgcccagcctacctggcaggggtccccggctctgcctcctccttccacacggctgtggtgaaccagtaccgcatgcggggtctgaaccccggcacggtgaactcctgctgcattcccaccaagctgagcaccatgtccatgctgtacttcgatgatgagtacaacatcgtcaagcgggacgtgcccaacatgattgtggaggagtgcggctgcgcctgacagtgcaaggcaggggcacggtggtggggcacggagggcagtcccgggtgggcttcttccagccccccgcgggaacggggtacacggtgggctgagtacagtcattctgttgggctgtggagatagtgccagggtgcggcctgagatatttttctacagcttcatagagcaaccagtcaaaaccagagcgagaaccctcaactgacatgaaatactttaaaatgcacacgtagccacgcacagccagacgcatcctgccacccacacagcagcctccaggataccagcaaatggatgcggtgacaaatggcagcttagctacaaatgcctgtcagtcggagagaatggggtgagcagccaccattccaccagctggcccggccacgtctcgaagttgcgccttcccgagcacacataaaagcacaaagacagagacgcagagagagagagagagccacggagaggaaaagcagatgcaggggtggggagcgcagctcggcggaggctgcgtgtgccccgtggcttttaccaggcctgctctgcctggctcgatgtctgcttcttcccagcctgggatccttcgtgcttcaaggcctggggagcctgtccttccatgcccttgtcgagggaaagagacccagaaaggacacaacccgtcagagacctgggagcaggggcaatgaccgtttgactgtttgtggcttgggcctctgacatgacttatgtgtgtgtgtgtttttggggtggggagggagggagagaagagggggctaaatttgatgctttaactgatctccaacagttgacaggtcatccttgccagttgtataactgaaaaaggacttttctaccaggtatgaccttttaagtgaaaatctgaattgttctaaatggaaagaaaaaaagttgcaatctgtgcccttcattggggacattcctctaggactggtttggggacgggtgggaatgacccctaggcaaggggatgagaccgcaggaggaaatggcggggaggtggcattcttgaactgctgaggatggggggtgtcccctcagcggaggccaagggaggggagcagcctagttggtcttggagagatggggaaggctttcagctgatttgcagaagttgcccatgtgggcccaaccatcagggctggccgtggacgtggcccctgcccactcacctgcccgcctgcccgcccgcccgcatagcacttgcagacctgcctgaacgcacatgacatagcacttgccgatctgcgtgtgcccagaagtggcccttggccgagcgccgaactcgctcgccctctagatgtccaagtgccacgtgaactatgcaatttaaagggttgacccacactagacgaaactggactcgtacgactctttttatattttttatacttgaaatgaaatcctttgcttcttttttaagcgaatgattgcttttaatgtttgcactgatttagttgcatgattagtcagaaactgccatttgaaaaaaaagttatttttatagcagc

SEQ ID NO: 2027 - DNA, 2875 bp, Homo sapiens
gaattctccggagctgaaaaaggatcctgactgaaagctagaggcattgaggagcctgaagattctcaggttttaaagacgctagagtgccaaagaagactttgaagtgtgaaaacatttcctgtaattgaaaccaaaatgtcatttatagatccttaccagcacattatagtggagcaccagtattcccacaagtttacggtagtggtgttacgtgccaccaaagtgacaaagggggcctttggtgacatgcttgatactccagatccctatgtggaactttttatctctacaacccctgacagcaggaagagaacaagacatttcaataatgacataaaccctgtgtggaatgagacctttgaatttattttggatcctaatcaggaaaatgttttggagattacgttaatggatgccaattatgtcatggatgaaactctagggacagcaacatttactgtatcttctatgaaggtgggagaaaagaaagaagttccttttattttcaaccaagtcactgaaatggttctagaaatgtctcttgaagtttgctcatgcccagacctacgatttagtatggctctgtgtgatcaggagaagactttcagacaacagagaaaagaacacataagggagagcatgaagaaactcttgggtccaaagaatagtgaaggattgcattctgcacgtgatgtgcctgtggtagccatattgggttcaggtgggggtttccgagccatggtgggattctctggtgtgatgaaggcattatacgaatcaggaattctggattgtgctacctacgttgctggtctttctggctccacctggtatatgtcaaccttgtattctcaccctgattttccagagaaagggccagaggagattaatgaagaactaatgaaaaatgttagccacaatccccttttacttctcacaccacagaaagttaaaagatatgttgagtctttatggaagaagaaaagctctggacaacctgtcacctttactgacatctttgggatgttaataggagaaacactaattcataatagaatgaatactactctgagcagtttgaaggaaaaagttaatactgcacaatgccctttacctcttttcacctgtcttcatgtcaaacctgacgtttcagagctgatgtttgcagattgggttgaatttagtccatacgaaattggcatggctaaatatggtacttttatggctcccgacttatttggaagcaaattttttatgggaacagtcgttaagaagtatgaagaaaaccccttgcatttcttaatgggtgtctggggcagtgccttttccatattgttcaacagagttttgggcgtttctggttcacaaagcagaggctccacaatggaggaagaattagaaaatattaccacaaagcatattgtgagtaatgatagctcggacagtgatgatgaatcacacgaacccaaaggcactgaaaatgaagatgctggaagtgactatcaaagtgataatcaagcaagttggattcatcgtatgataatggccttggtgagtgattcagctttattcaataccagagaaggacgtgctgggaaggtacacaacttcatgctgggcttgaatctcaatacatcttatccactgtctcctttgagtgactttgccacacaggactcctttgatgatgatgaactggatgcagctgtagcagatcctgatgaatttgagcgaatatatgagcctctggatgtcaaaagtaaaaagattcatgtagtggacagtgggctcacatttaacctgccgtatcccttgatactgagacctcagagaggggttgatctcataatctcctttgacttttctgcaaggccaagtgactctagtcctccgttcaaggaacttctacttgcagaaaagtgggctaaaatgaacaagctcccctttccaaagattgatccttatgtgtttgatcgggaagggctgaaggagtgctatgtctttaaacccaagaatcctgatatggagaaagattgcccaaccatcatccactttgttctggccaacatcaacttcagaaagtacaaggctccaggtgttccaagggaaactgaggaagagaaagaaatcgctgactttgatatttttgatgacccagaatcaccattttcaaccttcaattttcaatatccaaatcaagcattcaaaagactacatgatcttatgcacttcaatactctgaacaacattgatgtgataaaagaagccatggttgaaagcattgaatatagaagacagaatccatctcgttgctctgtttcccttagtaatgttgaggcaagaagatttttcaacaaggagtttctaagtaaacccaaagcatagttcatgtactggaaatggcagcagtttctgatgctgaggcagtttgcaatcccatgacaactggatttaaaagtacagtacagatagtcgtactgatcatgagagactggctgatactcaaagttgcagttacttagctgcatgagaataatactattataagttaggtgacaaatgatgttgattatgtaaggatatacttagctacattttcagtcagtatgaacttcctgatacaaatgtagggatatatactgtatttttaaacatttctcaccaactttcttatgtgtgttctttttaaaaattttttttcttttaaaatatttaacagttcaatctcaataagacctcgcattatgtatgaatgttattcactgactagatttattcataccatgagacaacactatttttatttatatatgcatatatatacatacatgaaataaatacatcaatataaaaataaaaaaaaacggaattc

SEQ ID NO: 2028 - DNA, 2542 bp, Homo sapiens
actccaggtggtagtgctcgctctggcgcagattagaggtccaccgggagagcggggccccccgggtcccccgggaccgccgggagtgcctggatccgacggcatcgacggtgacaatgggccccctggaaaagctggccctccgggacccaagggcgagcctggcaaagctgggccagatgggccagacgggaagcccgggattgatggtttaactggagccaagggggagcctggccccatggggatccctggagtcaagggccagcccgggcttcctggtcctcctggccttccgggccctggttttgctggacctcctgggcctcctggacctgttggcctccctggtgagattggaatccgaggccccaagggggaccctggaccagatggaccatcggggcccccaggaccccctgggaaacctggtcgcccgggaaccatccagggtctggaaggcagtgcggatttcctgtgtccaaccaactgtccacccggaatgaaaggtcccccagggctgcagggagtgaaggggcatgcgggcaaacgcgggattctgggtgatcctggccaccaggggaagccgggtcccaagggagatgtgggtgcctctggagagcaaggcatccctggaccaccgggtccccagggcatcaggggctacccaggcatggcagggcccaagggagagacgggccctcatggatataaaggcatggtgggcgctatcggtgccactgggccaccgggtgaggaaggtcctaggggaccgccaggccgagctggggagaagggtgacgagggcagcccaggtattcgtggaccccaggggatcacaggcccgaaaggagcaacgggccccccaggcatcaacggcaaggatgggaccccaggcacgcctggcatgaagggcagtgcaggacaggcgggacagcccggaagtccaggccaccagggcctagcgggtgtgccaggccagcctgggacaaaaggaggccctggagaccagggtgagccgggcccgcagggccttcctggattctctggtccccctgggaaagagggagagccagggcctcgaggagaaattggtccccagggcatcatgggacagaagggtgaccaaggcgagaggggtccagtggggcaaccaggccctcagggaaggcagggccctaagggggagcagggcccccccggaattccagggccccaaggcttgccaggcgtcaaaggagacaagggctccccagggaagaccgggccccgcggcaaagtgggtgacccaggggtggccggcctccccggagagaaaggcgagaagggcgagtccggcgagccggggcccaagggacagcaaggagtacgtggagaacccggctaccctgggcccagcggggatgcgggcgccccaggggttcagggctaccctggtccccccggccctcgaggactggccgggaaccgaggcgtgccaggacagcccgggagacagggcgtggagggccgggatgccactgaccagcacatcgtggatgtggcgctgaagatgctgcaagagcaactggcagaggtcgccgtgagtgccaagcgggaagccctgggtgcggtgggcatgatgggtcctccaggacctcctgggccccctgggtacccaggcaagcagggcccccatgggcaccctggccctcggggcgttcctggcatcgtgggagccgtgggtcagatcggcaacacggggcccaagggaaaacgtggagagaagggtgatccaggagaagtgggacgggggcaccccgggatgcctgggcccccagggatcccaggacttcctggccggcctggccaggcaatcaacggcaaggatggagatcgagggtccccaggggctccaggagaggcaggtcgacctggcctgccaggccccgtggggctgccgggcttctgtgaacctgccgcctgccttggagcttcggcctatgcctctgcccgccttacagagcctggatccatcaaggggccttgagcatcaggcccagacagagcctggcaggcatcctggcgggaaggaccaggtcccctctggtggacatgcacccatccccagtccaggaaaccatctcccccaggaccttctgtctgggactcaggagtcctaaggaaaaggaattctaaaacatgggggaaggggaggtagagcactgatgggtgaaaaagtgaggccaacacacagggcaagtggtgtcgatggagtcgaagcgctgaaggaatagggcggctttccttccagcgagcatcattcggctgttaccaaaacaaacatcttaatctgcaccttcctccactggccatcttgtccttgggtcagtgggacatgggcacctcgggaggcccgggccctgcccagctacagttccacccctcagcttgaggaccaatactgaggtctatgccagttcctgatcccatctcactctctggacctactaggtgactgctgctggggtgactcccctgaggcggctatacccttaagcca

SEQ ID NO: 2029 - DNA, 450 bp, Homo sapiens
gtgactgtgaggactgtggataacctgctggaggtgtctgcccggcacccccagcgcctggaccgccacggcttcgtgtcccgagagttctgccgcacctatgtcctgcctgctgatgtcgacccctggcgagtccgagctgctctctcccatgatggcatcttaaacctggaagcacctcggggtggccgacatttggacacagaggtcaatgaggtctacatctccctgctccctgcgcctcctgatccagaggaagaggaggaggcagccatagttgagccctgattgccacagacccagcacccagcaaatccctctctacctcccaaggtgatatggccagctgcccaccactccagaggtagcagcatccttgggggaagggaaaggtgcatggtccacaatgtatggtttggtcccatgggacatgtcatagccttggtttag

SEQ ID NO: 2030 - DNA, 1435 bp, Homo sapiens
ttgtaacagaaaattaaaatatactccactcaagggaattctgtactttgcccttttggtaaagtctcatttacatttctaaacctttcttaagaaaatcgaatttcctttgatctctcttctgaattgcagaaatcagataaaaactacttggtgaaatgacttcttgtcacattgctgaagaacatatacaaaaggttgctatctttggaggaacccatgggaatgagctaaccggagtatttctggttaagcattggctagagaatggcgctgagattcagagaacagggctggaggtaaaaccatttattactaaccccagagcagtgaagaagtgtaccagatatattgactgtgacctgaatcgcatttttgaccttgaaaatcttggcaaaaaaatgtcagaagatttgccatatgaagtgagaagggctcaagaaataaatcatttatttggtccaaaagacagtgaagattcctatgacattatttttgaccttcacaacaccacctctaacatggggtgcactcttattcttgaggattccaggaataactttttaattcagatgtttcattacattaagacttctctggctccactaccctgctacgtttatctgattgagcatccttccctcaaatatgcgaccactcgttccatagccaagtatcctgtgggtatagaagttggtcctcagcctcaaggggttctgagagctgatatcttggatcaaatgagaaaaatgattaaacatgctcttgattttatacatcatttcaatgaaggaaaagaatttcctccctgcgccattgaggtctataaaattatagagaaagttgattacccccgggatgaaaatggagaaattgctgctatcatccatcctaatctgcaggatcaagactggaaaccactgcatcctggggatcccatgtttttaactcttgatgggaagacgatcccactgggcggagactgtaccgtgtaccccgtgtttgtgaatgaggccgcatattacgaaaagaaagaagcttttgcaaagacaactaaactaacgctcaatgcaaaaagtattcgctgctgtttacattagaaatcacttccagcttacatcttacacggtgtcttacaaattctgctagtctgtaagctccttaagagtagggttgtgccttattcaactgcatacatagctcctagcacagtgccttattcggtaggcatctaagcaaatttcttaaattaattaatatatctttaaagatatcatattttatgtatgtagcttattcaaagaagtgtttcctatttctatatagtttattatacatgatacttgggtagctcaacattcttaataaacagcctttgtattcagaatataaaattgaaatagatatatataaagttaaaaaaaaaaaaaaaaaa

SEQ ID NO: 2031 - DNA, 2330 bp, Homo sapiens
aaaggaccgaggcgtgcagcggacagcagatggatcccgcggccagcagctgcatgaggagcctccagcccccagcccctgtctggggctgccttcgaaacccccactcggaaggcaatggggcctcagggctaccccactacccgcccaccccgttctccttccaccagaaaccagacttcctggcgacagcgacggcagcgtaccctgacttctcagcctcctgcctggcagccaccccacacagcctgccccaggaggagcacatcttcactgagcagcaccccgctttcccacagtcccccaactggcacttccctgtctcagacgcccggcgcaggcccaactcaggcccggcagggggttccaaggaaatggggaccagcagcctgggcctggtggacaccacaggaggcccaggcgatgactacggggtgcttgggagcactgccaatgagacagagaagaaatcatccaggcggagaaaggagagttcagacaaccaggagaacagagggaagccggagggcagcagcaaagcccgcaaggagaggacggccttcaccaaggagcagctgcgagagctggaggcagagtttgcccatcataactacctgactcggctccgcagatatgagattgcggtaaacctggacctctctgagcgccaggtcaaagtgtggttccagaaccgaaggatgaagtggaagcgtgtgaagggaggtcagcccatctcccccaatgggcaggaccctgaggatggggactccacagcctctccaagttcagagtgagattctgcatggaggaaaaatgactaaggactgagccccctacccaactacccccaccccaatcccaccttcaccctcttccttccccagccagggcagcctctccacatctttccctgactcttggatatgaaactgcccagcattcctgggagtcttaggattttctaggaagttctgtccagcctcttagcagcctcttccctagggcctttgctcccacactctcatggaatcagacagagatcctaccgggccggatgaatctggaaacagcttcagagatactgcttctcagcgtctcttggctgccacccatgcctcctcctaccgctgttctcctaggtcagccaggcctcctcctggtctggacaccacctggcctggtgggagaggagctttggaaccagctggcgactcggaaagtaaatgcttcaaaaggaaggaaatgacagagacacacgcccttgcccaccttcctctgtaggctgcacatctgaggctttggggccccttagttgtcccgaaaccccaagaaaaatcagaatgaggagagtcaaggacagcaactcagctgctgcaagccagaaacacatccctgtctccaaatttgttggctaagtggagacacttctgagaactgactagagaagacaagaaaatagcccgatgtaggtttcggtgtccccatataggccccgtccacacaggcttgactgggtggacaagaatgaacccatgacagcacctgctgcttcaaaatcaaaatcaatttagggatacagcaggggctgttgggctgtgctccagagaaaaggagcagctactccttttaaatccacgatttctggattgaaaacctgtccagatgctgagttgttgggctgaacaactaggagctgaaaacaacgtagaggctggaaagtgtcccctgcattctggaggggaggggagataataaggagggctgctgggtgagggcctggagatgtggaaccctggagtggaaggtttctccagtgacagtgtcctgtgacwgcaaaagggrasaagaaaatccctcttcctccatgggatggatttaagctcttgctgtgtgttctacaaatgctgttattgtgggaggaaatgctaggtttttgtgtgtggactgcccagacctcagccaggtcttctggagatgacatttgaggactgatggccaaagagcatgggggactgaagccctggctgcctcagcgctctgtctcccaacaccagctggtgttgcagagggaggtcaacgtgagtttggatctcttgtacgcagatgtaatcattcacatgtaaaaataaccccacctccccaccccaaaaagggcaagagctgtggaaaatgattgccaaatgagatggctggttagagcatgattttttctaaagcatacttcatatattttcttaagattacatcaagctaattgtgcgagctcaattcactttgtaagaaaactctcggagaaataaaatcaataaaaagccaaaaaaaaaaataag

SEQ ID NO: 2032 - DNA, 1358 bp, Homo sapiens
cctgccctggaagcggatcgaagtgatggccctgcccaaaccgggcggggcccacagcctagccctggtgacagtgcccagcatgggctatgctcctgttcctccccccacctcactgcagcccctgctgccccagcagcctgtgttcgtagtgcaagagactgatggctccgtgactctggacaatggcatcatccgagtgaagctggacccaactggtcgcctgacgtccttggtcctggtggcctctggcagggaggccattgctgagggcgccgtggggaaccagtttgtgctatttgatgatgtccccttgtactgggatgcatgggacgtcatggactaccacctggagacacggaagcctgtgctgggccaggcagggaccctggcagtgggcaccgagggcggcctgcggggcagcgcctggttcttgctacagatcagccccaacagtcggcttagccaggaggttgtgctggacgttggctgcccctatgtccgcttccacaccgaggtacactggcatgaggcccacaagttcctgaaggtggagttccctgctcgcgtgcggagttcccaggccacctatgagatccagtttgggcacctgcagcgacctacccactacaatacctcttgggactgggctcgatttgaggtgtgggcccatcgctggatggatctgtcagaacacggctttgggctggccctgctcaacgactgcaagtatggcgcgtcagtgcgaggcagcatcctcagcctctcgctcttgcgggcgcctaaagccccggacgctactgctgacacggggcgccacgagttcacctatgcactgatgccgcacaagggctctttccaggatgctggcgttatccaagctgcctacagcctaaacttccccctgttggctctgccagcccccagcccagcgcccgccacctcctggagtgcgttttccgtgtcttcacccgcggtcgtattggagaccgtcaagcaggcggagagcagcccccagcgccgctcgctggtcctgaggctgtatgaggcccacggcagccacgtggactgctggctgcacttgtcgctgccggttcaggaggccatcctctgcgatctcttggagcgaccagaccctgctggccacttgacttcgggacaaccgcctgaagctcaccttttctcccttccaagtgctgtccctgttgctcgtgcttcagcctccgccacactgagtccctggggctggggttttgtttgtagaaggctctggggactcctaatttctgcttccccagcctaaagcagggatcagtcttttcttgtggaataaatccttggatcgggaaaaaaaaaaa

SEQ ID NO: 2033 - DNA, 1303 bp, Homo sapiens
ctgccaatgagctccgccgagtagcaccggggcagggctagcgcttaaaggagccgcgacccctttgcagaccagagggtgacccggatgatggcggccggcgcggccctagccctggccttgtggctactaatgccaccagtggaggtgggaggggcggggcccccgccaatccaggacggtgagttcacgttcctgttgccggcggggaggaagcagtgtttctaccagtccgcgccggccaacgcaagcctcgagaccgaataccaggtgatcggaggtgctggactggacgtggacttcacgctggagagccctcagggcgtgctgttggtcagcgagtcccgcaaggctgatggggtacacacggtggagccaacggaggccggggactacaagctgtgctttgacaactccttcagcaccatctccgagaagctggtgttctttgaactgatctttgacagcctccaggatgacgaggaggtcgaaggatgggcagaggctgtggagcccgaggagatgctggatgttaaaatggaggacatcaaggagtccattgagaccatgcggacccggctggagcgcagcatccagatgctcacgctactgcgggccttcgaggcacgtgaccgcaacctgcaagagggcaacttggagcgggtcaacttctggtcagctgtcaacgtggcggtgctgctgctggtggctgtgctgcaggtctgcacgctcaagcgcttcttccaggacaagcgcccggtgcccacgtagcccctgccatggaaggaagaacgggacaaaggaggggcagcagggtgtgtgcatatgagacttgggggtccctccccaattttagtttcctgccaaaacgggagtgtgcagtcagggcctgcggtctggccccatgagtctccttccgtcctcagcgggcagggaacacctctggcttgtagaagggacggctcagtggctgcaccgacggtcctggaaatctcacatggtgggcactgcagcgttggaacgtgagcctcggatttcctggcccctctactgtaaatgtgccttagcctaagcctcccatcctgtgttagcgttgcctggtgcggggcagggcctaacaaggaaacctgggccctccaagccaggttgaggtctggtaacagaatgccaggaagggggcctggaagaccacctgccccggcccctctcctgcaggggccccacacaggcatgagggatggcccggccaaagtctaggcagaagcctcctataacaaagggtggtgtggcctgggcattggag

SEQ ID NO: 2034 - DNA, 1539 bp, Homo sapiens
gtgaagggagccgggatcagccaggggccagcatgagccggagggagggaagtctggaagacccccagactgattcctcagtctcacttcttccccacttggaggccaagatccgtcagacacacagccttgcgcacctcctcaccaaatacgctgagcagctgctccaggaatatgtgcagctccagggagaccccttcgggctgcccagcttctcgccgccgcggctgccggtggccggcctgagcgccccggctccgagccacgcggggctgccagtgcacgagcggctgcggctggacgcggcggcgctggccgcgctgcccccgctgctggacgcagtgtgtcgccgccaggccgagctgaacccgcgcgcgccgcgcctgctgcgccgcctggaggacgcggcgcgccaggcccgggccctgggcgccgccgtggaggccttgctggccgcgctgggcgccgccaaccgcgggccccgggccgagccccccgccgccaccgcctcagccgcctccgccaccggggtcttccccgccaaggtgctggggctccgcgtttgcggcctctaccgcgagtggctgagccgcaccgagggcgacctgggccagctgctgcccgggggctcggcctgagcgccgcggggcagctcgccccgcctcctcccgctgggttccgtctctccttccgcttctttgtctttctctgccgctgtcggtgtctgtctgtctgctcttagctgtctccattgcctcggccttctttgctttttgtgggggagaggggaggggacgggcagggtctctgtcgcccaggctggggtgcagtggcgcgatcccagcactgcagcctcaacctcctgggctcaagccatccttccgcctcagcttccccagcagctgggactacaggcacgcgccaccacagccggctaattttttatttaattttttgtagagacgaggtttcgccatgttgcccaggctggtcttgaactccggggctcaagcgatcctcccgcttcagcctccctaagtgctgggattgcaggcgtgagccactttcccagcctctctttgctttgcctgccccgttctcttaactcttggaccctcctcgtctgcatggtaactccgtctgagtctaccattttcttgctctccctccttccttgggcctgcctcagttccctttggcctccccctttacccagctcttggggtgtctctgttttttccatccccacttcctgccttctcgtggccctgtgtgagcacatgtgtacatctcagccttatctcaaggaggtgacaccttctctccttgtccccatctggccgtctctctgtgcttccctggccaggggcgtgcctgctggtcctatggggggaaggctactccgcatctcagccaccttcctcaggctcactccacctacatccccagtctgccacaccccatccctttgggcctcagccctgtccctttgatgtcctcctttccttcagcccctctgccctgtccctgcacacctcc

SEQ ID NO: 2035 - DNA, 1443 bp, Homo sapiens
ctgcggtcagcgcacgtgcccgcgagacctgcaaacttgtgccaccggctctgcccgtccccggggagcccgaacgccccgcagccctcacccctcccgccagtctccagccatgggctgctttgaatgctgcatcaagtgtctgggaggagtcccctacgcctccctggtggccaccatcctctgcttctccggggtggccttattctgcggctgtgggcatgtggctctcgcaggcaccgtggcgattcttgagcaacacttctccaccaacgccagtgaccatgccttgctgagcgaggtgatacaactgatgcagtatgtcatctatggaattgcgtcctttttcttcttgtatgggatcattctgttggcagaaggcttttacaccacaagtgcagtgaaagaactgcacggtgagtttaaaacaaccgcttgtggccgatgcatcagtggaatgttcgttttcctcacctatgtgcttggagtggcctggctgggtgtgtttggtttctcagcggtgcccgtgtttatgttctacaacatatggtcaacttgtgaagtcatcaagtcaccgcagaccaacgggaccacgggtgtggagcagatctgtgtggatatccgacaatacggtatcattccttggaatgctttccccggaaaaatatgtggctctgccctggagaacatctgcaacacaaacgagttctacatgtcctatcacctgttcattgtggcctgtgcaggagctggtgccaccgtcattgccctgctgatctacatgatggctactacatataactatgcggttttgaagtttaagagtcgggaagattgctgcactaaattctaaattgcataaggagttttagagagctatgctctgtagcatgaaatatcactgacactccagactaaagcagagtctaggtttctgcaattttgttacagtaatttgtaaatagctttagtaaactcaccttgcatggtagattaataagatgacttactgtacatgaattacacaataatgagatctggtggctatttccacattttgaaaaggattcagttatttactgacagtggtgagcatcctttttaaaataatgttctgatacttaaacattagagagcagtatctttaaatgaattattaacactttggaatacttacattttctgttatttttgattgcctgataaccagtttcaatgatgaaaatgaaaacaagtgctgaagatgaaatggaagagaaccgttttaatctggattttgttttgtcacacctggaaaatactttgcaaatatgttctaaattgaaaacaatttttttatgatcacatggttcactaccaaatgaccctcaaataagccagatgaaaatttgaagaaaaaggtcacccagttctctggaaaaaaaaaaaaaaaaaaaaaaaaaa

SEQ ID NO: 2036 - DNA, 1551 bp, Homo sapiens
  misc_feature (1)..(1551): n=a,t,g or c
ctctttcagccttctgcaatctagttctacttagtcacacacttctctaagaccactcatacgtaaacactacgtagaggcccctttttgcctcattttacattgtttagttatcattttgaaacttttcttcacatatgtaacagtgccggagtttttctgcttctctgtgtttgttcagtaactcttctttaggatacacctaaagatgagaagcttcatacccagtactcctcttcattcactcatatgtttttgggatcagtcccttctgctggctgtgcattggtctaatggaacagaatagagtccagaaataacccaacatgtatgtggacaactggtttttgacagaggtgcaaaggtcttgaaaaaatgatgctggaataattgggcatcagatgcaaaattaaaaacaaattggtccatatcttaacactggcaaagattaaagtccaaatggattatagttccccaaaactgtataatttctagaagacaacaaggaaaacgtgttcagccttgggttaggaaaagatttcttaaatccaacaccaaaagcacaatccatgaaggaaaaatcgataaattgtacttnatcaaaattgagaacttctctttgaaaggtaccataaggagaacaaaaagacaagctgtagagtggcagaaaaatatttgnaaaacatttctgataaatgagtcgcatctagattacataaagaagtctcaaaactgaacaaagtaaaacccattgttgacttaatgcgctgtttcctcctgagcttgctgcctctgcccctgctctctctccttttccatttgttttcaacattgaatccagaatgttcttcttgagatccaagtcagatcacaccaaccctcagaactctccaatagacgaccatggcactcaaaagtccacaatagccttcaatgctgggcaaaacatgaagcaccccttttctcccttctctgaccccatcacctctgtgttcaccctgctcctgccgtcctccctgcctccaaaacaggtcaggccttcgtgcctttgcacttactatttgcaataccccaaatgttcttcaggctctttagcctcttcatttcttttcctgaagtgtcatctcactgaggcttatctaaagctgcagctactggggcattcctgtctcatctccctgctgtattttgtactcccggctctcttttgtacttttaaacatacctatatggtttacctttgttgtttatatttgcatgttgtttcccacttgaatgtaagctccaaagattttatttttttaaactgaattattactgtattcccagaacaattccctggcaaatatttggtactcaatagtaatgctaagttagtaaataaatgatgaatttagaatcaaaataacgtgtctatggccaaaataaaacctgaaatccctgtcctatttcccagaggtaactgctgttaatagtttagttgtgtgcttccagacataccttcacagaatcatttatcacaataaaggtgtcatactatgcaaaaaaaaa

SEQ ID NO: 2037 - DNA, 853 bp, Homo sapiens
agtggcaccgctgactgccgagaggaagctcgcctctgcccggctgccctcttgtagtccgccggcgaggggcagttctcggtgaggaggaagagagcagcggacggcacagcacccgcgcgggccctcccacaacagctccagctggcagcatcacttcccgccaatttatccaacttctgccaaggctctgaaatgccaacaacgtcgaggcctgcacttgatgtcaagggtggcacctcacctgcgaaggaggatgccaaccaagagatgagctccgtggcctactccaaccttgcggtgaaagatcgcaaagcagtggccattctgcactaccctggggtagcctcaaatggaaccaaggccagtggggctcccactagttcctcgggatctccaataggctctcctacaaccacccctcccactaaacccccatccttcaacctgcaccccgcccctcacttgctggctagtatgcagctgcagaaacttaatagccagtatcaggggatggctgctgccactccaggccaacccggggaggcaggacccctgcaaaactgggactttggggcccaggcgggaggggcagaatcactctctccttctgctggtgcccagagccctgctatcatcgattcggacccagtggatgaggaagtgctgatgtcgctggtggtggaactggggttggaccgagccaatgagcttccggagctgtggctggggcagaatgagtttgacttcactgcggactttccatctagctgctaatgccaagtgtccctaaagatggaggaataaagccaccaattctgttgtaaataaaaataaagttacttacaaagag

SEQ ID NO: 2038 - DNA, 4240 bp, Homo sapiens
cagcagagctggattggggtgttgagtccaggctgagtagggggcagcccactgctcttggtccctgtgcctgctgggggtgccctgccctgaactccaggcagcggggacagggcgaggtgccaccttagtctggctggggaggcggacgatgaggagtgatggggcaggcatgcggccactccatcctctgcaggagccagcagtacccggcagcgcgaccggctgagccgcggggccagcaggtcttcctcaagccggacgagccgccgccgccgccgcagccatgcgccgacagcctgcaggacgccttgctgagtctgggctctgtcatcgacatttcaggcctgcaacgtgctgtcaaggaggccctgtcagctgtgctcccccgagtggaaactgtctacacctacctactggatggtgagtcccagctggtgtgtgaggaccccccacatgagctgccccaggaggggaaagtccgggaggctatcatctcccagaagcggctgggctgcaatgggctgggcttctcagacctgccagggaagcccttggccaggctggtggctccactggctcctgatacccaagtgctggtcatgccgctagcggacaaggaggctggggccgtggcagctgtcatcttggtgcactgtggccagctgagtgataatgaggaatggagcctgcaggcggtggagaagcataccctggtcgccctgcggagggtgcaggtcctgcagcagcgcgggcccagggaggctccccgagccgtccagaaccccccggaggggacggcggaagaccagaagggcggggcggcgtacaccgaccgcgaccgcaagatcctccaactgtgcggggaactctacgacctggatgcctcttccctgcagctcaaagtgctccaatacctgcagcaggagacccgggcatcccgctgctgcctcctgctggtgtcggaggacaatctccagctttcttgcaaggtcatcggagacaaagtgctcggggaagaggtcagctttcccttgacaggatgcctgggccaggtggtggaagacaagaagtccatccagctgaaggacctcacctccgaggatgtacaacagctgcagagcatgttgggctgtgagctgcaggccatgctctgtgtccctgtcatcagccgggccactgaccaggtggtggccttggcctgcgccttcaacaagctagaaggagacttgttcaccgacgaggacgagcatgtgatccagcactgcttccactacaccagcaccgtgctcaccagcaccctggccttccagaaggaacagaaactcaagtgtgagtgccaggctcttctccaagtggcaaagaacctcttcacccacctggatgacgtctctgtcctgctccaggagatcatcacggaggccagaaacctcagcaacgcagagatctgctctgtgttcctgctggatcagaatgagctggtggccaaggtgttcgacgggggcgtggtggatgatgagagctatgagatccgcatcccggccgatcagggcatcgcgggacacgtggcgaccacgggccagatcctgaacatccctgacgcatatgcccatccgcttttctaccgcggcgtggacgacagcaccggcttccgcacgcgcaacatcctctgcttccccatcaagaacgagaaccaggaggtcatcggtgtggccgagctggtgaacaagatcaatgggccatggttcagcaagttcgacgaggacctggcgacggccttctccatctactgcggcatcagcatcgcccattctctcctatacaaaaaagtgaatgaggctcagtatcgcagccacctggccaatgagatgatgatgtaccacatgaaggtctccgacgatgagtataccaaacttctccatgatgggatccagcctgtggctgccattgactccaattttgcaagtttcacctatacccctcgttccctgcccgaggatgacacgtccatggccatcctgagcatgctgcaggacatgaatttcatcaacaactacaaaattgactgcccgaccctggcccggttctgtttgatggtgaagaagggctaccgggatcccccctaccacaactggatgcacgccttttctgtctcccacttctgctacctgctctacaagaacctggagctcaccaactacctcgaggacatcgagatctttgccttgtttatttcctgcatgtgtcatgacctggaccacagaggcacaaacaactctttccaggtggcctcgaaatctgtgctggctgcgctctacagctctgagggctccgtcatggagaggcaccactttgctcaggccatcgccatcctcaacacccacggctgcaacatctttgatcatttctcccggaaggactatcagcgcatgctggatctgatgcgggacatcatcttggccacagacctggcccaccatctccgcatcttcaaggacctccagaagatggctgaggtgggctacgaccgaaacaacaagcagcaccacagacttctcctctgcctcctcatgacctcctgtgacctctctgaccagaccaagggctggaagactacgagaaagatcgcggagctgatctacaaagaattcttctcccagggagacctggagaaggccatgggcaacaggccgatggagatgatggaccgggagaaggcctatatccctgagctgcaaatcagcttcatggagcacattgcaatgcccatctacaagctgttgcaggacctgttccccaaagcggcagagctgtacgagcgcgtggcctccaaccgtgagcactggaccaaggtgtcccacaagttcaccatccgcggcctcccaagtaacaactcgctggacttcctggatgaggagtacgaggtgcctgatctggatggcactagggcccccatcaatggctgctgcagccttgatgctgagtgatcccctccaggacacttccctgcccaggccacctcccacagccctccactggtctggccagatgcactgggaacagagccacgggtcctgggtcctagaccaggacttcctgtgtgaccctggacaagtactaccttcctgggcctcagctttctcgtctgtataatggaagcaagacttccaacctcacggagactttgtaatttgcttctctgagagcacaggggtgaccaatgagcagtgggccctactctgcacctctgaccacaccttggcaagtctttcccaagccattctttgtctgagcagcttgatggtttctccttgccccatttctgccccaccagatctttgctcctttccctttgaggactcccaccctttgggtctccaggatcctcatggaaggggaaggtgagacatctgagtgagcagagtgtggcatcttggaaacagtccttagttctgtgggaggactagaaacagccgcggcgaaggccccctgaggaccactactatactgatggtgggattgggacctgggggatacaggggccccaggaagaagctggccagaggggcagctcagtgctctgcagagaggggccctggggagaagcaggatgggattgatgggcaggagggatccccgcactgggagacaggcccaggtatgaatgagccagccatgcttcctcctgcctgtgtgacgctgggcgagtctcttcccctgtctgggccaaacagggagcgggtaagacaatccatgctctaagatccattttagatcaatgtctaaaatagctctatggctctgcggagtcccagcagaggctatggaatgtttctgcaaccctaaggcacagagagccaaccctgagtgtctcagaggccccctgagtgttccccttggcctgagccccttacccattcctgcagccagtgagagacctggcctcagcctggcagcgctctcttcaaggccatatccacctgtgccctggggcttgggagaccccataggccgggactcttgggtcagcccgccactggcttctctctttttctccgtttcattctgtgtgcgttgtggggtgggggagggggtccacctgccttacctttctgagttgcctttagagagatgcgtttttctaggactctgtgcaactgtcgtatatggtcccgtgggctgaccgctttgtacatgagaataaatctatttctttctaccaaaaaaaaaaaaaaaaaaa

SEQ ID NO: 2039 - DNA, 1953 bp, Homo sapiens
cgctcccacccgcccgtggcccgcgcccatggccgcgcgcgctccacacaactcaccggagtccgcgccctgcgccgccgaccagttcgcagctccgcgccacggcagccagtctcacctggcggcaccgcccgcccaccgccccggccacagcccctgcgcccacggcagcaatcgaggcgaccgcgacagtggtgggggacgctgctgagtggaagagagcgcagcccggccaccggacctacttactcgccttgctgattgtctatttttgcgtttacaacttttctaagaacttttgtatacaaaggaactttttaaaaaagacgcttccaagttatatttaatccaaagaagaaggatctcggccaatttggggttttgggttttggcttcgttttttctcttcgttgactttggggttcaggtgccccagctgcttcgggctgccgaggaccttctgggcccccacattaatgaggcagccacctggcgagtctgacatggctgtcagcgacgcgctgctcccatctttctccacgttcgcgtctggcccggcgggaagggagaagacactgcgtcaagcaggtgccccgaataaccgctggcgggaggagctctcccacatgaagcgacttcccccagtgcttcccggccgcccctatgacctggcggcggcgaccgtggccacagacctggagagcggcggagccggtgcggcttgcggcggtagcaacctggcgcccctacctcggagagagaccgaggagttcaacgatctcctggacctggactttattctctccaattcgctgacccatcctccggagtcagtggccgccaccgtgtcctcgtcagcgtcagcctcctcttcgtcgtcgccgtcgagcagcggccctgccagcgcgccctccacctgcagcttcacctatccgatccgggccgggaacgacccgggcgtggcgccgggcggcacgggcggaggcctcctctatggcagggagtccgctccccctccgacggctcccttcaacctggcggacatcaacgacgtgagcccctcgggcggcttcgtggccgagctcctgcggccagaattggacccggtgtacattccgccgcagcagccgcagccgccaggtggcgggctgatgggcaagttcgtgctgaaggcgtcgctgagcgcccctggcagcgagtacggcagcccgtcggtcatcagcgtcagcaaaggcagccctgacggcagccacccggtggtggtggcgccctacaacggcgggccgccgcgcacgtgccccaagatcaagcaggaggcggtctcttcgtgcacccacttgggcgctggaccccctctcagcaatggccaccggccggctgcacacaacttccccctggggcggcagctccccagcaggagtaccccgaccctgggttttgaggaagtgctgagcagcagggaatgtcaccctgccctgccgcttcctcccggcttccatccccacccggggcccaattacccatccttcctgcccgatcagatgcagccgcaagtcccgccgctccattaccaagagctcatgccacccggttcctgcatgccagaggagcccaagccaaagaggggaagacgatcgtggccccggaaaaggaccgccacccacacttgtgattacgcgggctgcggcaaaacctacacaaagagttcccatctcaaggcacacctgcgaacccacacaggtgagaaaccttaccactgtgactgggacggctgtggatggaaattcgcccgctcagatgaactgaccaggcactaccgtaaacacacggggcaccgcccgttccagtgccaaaaatgcgaccgagcattttccaggtcggaccacctcgccttacacatgaagaggcatttttaaatcccagacagtggatatgacccacactgccagaaga

SEQ ID NO: 2040 - DNA, 990 bp, Homo sapiens
ggctgtgccaggtgcacatttagcacccgttgccttctctaggagccgctcctagcttgccttatcacatccacgtgacccctcagagcacagcagcttctgattctccatcctattttcttctcttgactgatacatttgggcacttctagggaattcagaaaccaagggaaggggggaagtgctggcttttgctcctgcccagctgaaaggcttgaaaacagttcagtaattctgggcaggtttctctccttaaattaaaatccaatatgggcccctctgtacttaacattccaaatgctcattccaaacactttgccaacgaaggcaaacagtagagaagttaaatacagtgctgcccttgaggctctccaagggaaaggcgaatgaatattctccaggccctctgcttattcctctctgcctattgtgaaggcaatcaggccagactattgagggcatctggcagcaggactcaggcaggtatgaagtagccagccacaagtgtgaaaaggaagagtgctgagagaaactgcctagtcatgtgatatccctaatgcactgtgctttcttccctcaagaaccaccccttctggttccgctgcatgtacatgctgatctggggcaagtttgtgctgtacaaatatgtcacctgttggctggtcacagaaggagtatgcattttgacgggcctgggcttcaatggctttgaagaaaagggcaaggcaaagtgggatgcctgtgccaacatgaaggtgtggctctttgaaacaaacccccgcttcactggcaccattgcctcattcaacatcaacaccaacgcctgggtggcccggtgagctgctggtggggagcctggaccctggttccttccttccactgtcttcccagattggagggcaggggtgtaccatgtcacccctatgcgtctttcccatctgggcagaaccccctgtcgctcacactgactttgacccccacctatacccc

SEQ ID NO: 2041 - DNA, 1198 bp, Homo sapiens
cctttatgtctagcacatttgatgaaataaaaaacttctgaatctgaatagaagttctactgtttcaggcttgaaccttttacatgctcaagagattcaaatggtctctgtgtgtagatcatgccaccgcctccaaagcctaatccacatcacttctgagaggcaaggctgagcatatggtgacatcagctctgtgttgagatggtgatgaggatgatggctcgctggccaggcagggcagccgaaggtcagggacctgtcctaactaactgcagccttgcctttagtgtttgtcattctcagatacaacacggtatgtccagtgtccgtttttattactttaaagcatttgagggcttaattgtgtatagtagaaatactattttagacaaataattatctgtgtacagatatttgatatactctaagtaaattttctaatttcactaagtacgtttttaggctcctctcaaatactgcgtattgaagaaaaaaatctgacaccaccgagccaaagatgcttttttgtctgttttcgttgtttaacagaatggaaagagtaatgcatagtgcttcctggtgtctcctgattgattgattgtgcacaaagtaggacgataaataaataaaatggagtctgatgggacattgattaaaggtgaaggatgattgatatatagatcatgaaaagaaaaatgaatggcaggaaaaaaagtttggtccttaatatactttggcctagttaaaatatgtgcctttttggtgtgttttgttcatcactacaagataaaaaggaaacattacaactcaagtctttaaaaagttcatttattgaaaatcatatgtataacctagcatacgaatgagcagatttaaacacataacttcaagccatttctgaaaacatacaccaggagctctgctcagctagagtcagactccagctccagcccgactgcgtgcggggacagcgcccgcgttgatgaggaccagccccactgcaggctgaggcggtgtcaccctgggaaggtcgtggtgcgttgtggcatattaagtctaaaccagatgaatgtaaatatctctttgtaaatcatttatttcactctgttccatccaggtcagcaatcagattgtggcatgctgggtaactggaaaaaataataaaaagtaagtttcaataaaaaaaaaaaaaaaaaaa

SEQ ID NO: 2042 - DNA, 3881 bp, Homo sapiens; identical to SEQ ID NO: 298

SEQ ID NO: 2043 - DNA, 874 bp, Homo sapiens
gggcgggaagacgtgcagcctgggccgtggctgctcactgcgttcggacccagacccgctgcaggcagcagcagcccccgcccgcgcacgagcatggagctctggggggcctacctcctcctctgcctcttctccctcctgacccaggtcaccaccgagccaccaacccagaagcccaagaagattgtaaatgccaagaaagatgttgtgaacacaaagatgtttgaggagctcaagagccgtctggacaccctggcccaggaggtggccctgctgaaggagcagcaggccctgcagacggtctgcctgaaggggaccaaggtgcacatgaaatgctttctggccttcacccagacgaagaccttccacgaggccagcgaggactgcatctcgcgcgggggcaccctgagcacccctcagactggctcggagaacgacgccctgtatgagtacctgcgccagagcgtgggcaacgaggccgagatctggctgggcctcaacgacatggcggccgagggcacctgggtggacatgaccggcgcccgcatcgcctacaagaactgggagactgagatcaccgcgcaacccgatggcggcaagaccgagaactgcgcggtcctgtcaggcgcggccaacggcaagtggttcgacaagcgctgccgcgatcagctgccctacatctgccagttcgggatcgtgtagccggcggggcgggggccgtggggggcctggaggagggcaggagccgcgggaggccgggaggagggtggggaccttgcagcccccatcctctccgtgcgcttggagcctctttttgcaaataaagttggtgcacgttcgcggagaggaaaaaaaaaaaaaaaaaaaaaaaaaa

SEQ ID NO: 2044 - DNA, 857 bp, Homo sapiens
gaattccgagagaagacctgactggcacgaggaaaggtgcaataatgaagagttttcttctagttgtcaatgccctggcattaaccctgccttttttggctgtggaggttcaaaaccagaaacaaccagcatgccatgagaatgatgaaagaccattctatcagaaaacagctccatatgtcccaatgtattatgtgccaaatagctatccttattatggaaccaatttgtaccaacgtagaccagctatagcaattaataatccatatgtgcctcgcacatattatgcaaacccagctgtagttaggccacatgcccaaattcctcagcggcaatacctgccaaatagccacccacccactgtggtacgtcgcccaaacctgcatccatcatttattgccatccccccaaagaaaattcaggataaaataatcatccctaccatcaataccattgctactgttgaacctacaccagctcctgccactgaaccaacggtggacagtgtagtcactccagaagctttttcagagtccatcatcacgagcacccctgagacaaccacagttgcagttactccacctacggcataaaaacaccaaggaaatatcaaagaacacaacgcaggacttgctgaaaccaaattactacttcacactctccttcagccatttgtctgccttcagtcaacagaaaatgtgattttcacagattcagctcttctctccttacattttacattcatgccacattcaatattttgattcttgcacaataaagccaactgattgcaaaaaaaaaaaaaaaaaaaaaaaaaaaaaaaaaaaaaaaaaaaaaaaaaaaaaaaaccggaattc

SEQ ID NO: 2045 - DNA, 3742 bp, Homo sapiens
gaattccttctctcctcctcctcgcccttctcctcgccctcctcctcctcctcgccctcccctcccgatcctcatccccttgccctcccccagcccagggacttttccggaaagtttttattttccgtctgggctctcggagaaagaagctcctggctcagcggctgcaaaactttcctgctgccgcgccgccagcccccgccctccgctgcccggccctgcgccccgccgagcgatgagcgcccctccggtcctgcggccgcccagtccgctgctgcccgtggcggcggcagctgccgcagcggccgccgcactggtcccagggtccgggcccgggcccgcgccgttcttggctcctgtcgcggccccggtcgggggcatctcgttccatctgcagatcggcctgagccgtgagccggtgctgctgctgcaggactcgtccggggactacagcctggcgcacgtccgcgagatggcttgctccattgtcgaccagaagttccctgaatgtggtttctacggaatgtatgataagatcctgctttttcgccatgaccctacctctgaaaacatccttcagctggtgaaagcggccagtgatatccaggaaggcgatcttattgaagtggtcttgtcacgttccgccacctttgaagactttcagattcgtccccacgctctctttgttcattcatacagagctccagctttctgtgatcactgtggagaaatgctgtgggggctggtacgtcaaggtcttaaatgtgaagggtgtggtctgaattaccataagagatgtgcatttaaaatacccaacaattgcagcggtgtgaggcggagaaggctctcaaacgtttccctcactggggtcagcaccatccgcacatcatctgctgaactctctacaagtgcccctgatgagccccttctgcaaaaatcaccatcagagtcgtttattggtcgagagaagaggtcaaattctcaatcatacattggacgaccaattcaccttgacaagattttgatgtctaaagttaaagtgccgcacacatttgtcatccactcctacacccggcccacagtgtgccagtactgcaagaagcttctgaaggggcttttcaggcagggcttgcagtgcaaagattgcagattcaactgccataaacgttgtgcaccgaaagtaccaaacaactgccttggcgaagtgaccattaatggagatttgcttagccctggggcagagtctgatgtggtcatggaagaagggagtgatgacaatgatagtgaaaggaacagtgggctcatggatgatatggaagaagcaatggtccaagatgcagagatggcaatggcagagtgccagaacgacagtggcgagatgcaagatccagacccagaccacgaggacgccaacagaaccatcagtccatcaacaagcaacaatatcccactcatgagggtagtgcagtctgtcaaacacacgaagaggaaaagcagcacagtcatgaaagaaggatggatggtccactacaccagcaaggacacgctgcggaaacggcactattggagattggatagcaaatgtattaccctctttcagaatgacacaggaagcaggtactacaaggaaattcctttatctgaaattttgtctctggaaccagtaaaaacttcagctttaattcctaatggggccaatcctcattgtttcgaaatcactacggcaaatgtagtgtattatgtgggagaaaatgtggtcaatccttccagcccatcaccaaataacagtgttctcaccagtggcgttggtgcagatgtggccaggatgtgggagatagccatccagcatgcccttatgcccgtcattcccaagggctcctccgtgggtacaggaaccaacttgcacagagatatctctgtgagtatttcagtatcaaattgccagattcaagaaaatgtggacatcagcacagtatatcagatttttcctgatgaagtactgggttctggacagtttggaattgtttatggaggaaaacatcgtaaaacaggaagagatgtagctattaaaatcattgacaaattacgatttccaacaaaacaagaaagccagcttcgtaatgaggttgcaattctacagaaccttcatcaccctggtgttgtaaatttggagtgtatgtttgagacgcctgaaagagtgtttgttgttatggaaaaactccatggagacatgctggaaatgatcttgtcaagtgaaaagggcaggttgccagagcacataacgaagtttttaattactcagatactcgtggctttgcggcaccttcattttaaaaatatcgttcactgtgacctcaaaccagaaaatgtgttgctagcctcagctgatccttttcctcaggtgaaactttgtgattttggttttgcccggatcattggagagaagtctttccggaggtcagtggtgggtacccccgcttacctggctcctgaggtcctaaggaacaagggctacaatcgctctctagacatgtggtctgttggggtcatcatctatgtaagcctaagcggcacattcccatttaatgaagatgaagacatacacgaccaaattcagaatgcagctttcatgtatccaccaaatccctggaaggaaatatctcatgaagccattgatcttatcaacaatttgctgcaagtaaaaatgagaaagcgctacagtgtggataagaccttgagccacccttggctacaggactatcagacctggttagatttgcgagagctggaatgcaaaatcggggagcgctacatcacccatgaaagtgatgacctgaggtgggagaagtatgcaggcgagcagcggctgcagtaccccacacacctgatcaatccaagtgctagccacagtgacactcctgagactgaagaaacagaaatgaaagccctcggtgagcgtgtcagcatcctctgagttccatctcctataatctgtcaaaacactgtggaactaataaatacatacggtcaggtttaacatttgccttgcagaactgccattattttctgtcagatgagaacaaagctgttaaactgttagcactgttgatgtatctgagttgccaagacaaatcaacagaagcatttgtattttgtgtgaccaactgtgttgtattaacaaaagttccctgaaacacgaaacttgttattgtgaatgattcatgttatatttaatgcattaaacctgtctccactgtgcctttgcaaatcagtgtttttcttactggagcttcattttggtaagagacagaatgtatctgtgaagtagttctgtttggtgtgtcccattggtgttgtcattgtaaacaaactcttgaagagtcgattatttccagtgttctatgaacaactccaaaacccatgtgggaaaaaaatgaatgaggagggtagggaataaaatcctaagacacaaatgcatgaacaagttttaatgtatagttttgaatcctttgcctgcctggtgtgcctcagtatatttaaactcaagacaatgcacctagctgtgcaagacctagtgctcttaagcctaaatgccttagaaatgtaaactgccatatataacagatacatttccctctttcttataatactctgttgtactatggaaaatcagctgctcagcaacctttcacctttgtgtatttttcaataataaaaaatattcttgtcaaaaaaaaaaaaa

SEQ ID NO: 2046 - DNA, 2224 bp, Homo sapiens
cagagccgcaagcgcagggaaggcctccccgcacggtgggggaaagcggccggtgcagcgcggggacaggcactcgggctggcactggctgctagggatgtcgtcctggataaggtggcatggacccgccatggcgcggctctggggcttctgctggctggttgtgggcttctggagggccgctttcgcctgtcccacgtcctgcaaatgcagtgcctctcggatctggtgcagcgacccttctcctggcatcgtggcatttccgagattggagcctaacagtgtagatcctgagaacatcaccgaaattttcatcgcaaaccagaaaaggttagaaatcatcaacgaagatgatgttgaagcttatgtgggactgagaaatctgacaattgtggattctggattaaaatttgtggctcataaagcatttctgaaaaacagcaacctgcagcacatcaattttacccgaaacaaactgacgagtttgtctaggaaacatttccgtcaccttgacttgtctgaactgatcctggtgggcaatccatttacatgctcctgtgacattatgtggatcaagactctccaagaggctaaatccagtccagacactcaggatttgtactgcctgaatgaaagcagcaagaatattcccctggcaaacctgcagatacccaattgtggtttgccatctgcaaatctggccgcacctaacctcactgtggaggaaggaaagtctatcacattatcctgtagtgtggcaggtgatccggttcctaatatgtattgggatgttggtaacctggtttccaaacacatgaatgaaacaagccacacacagggctccttaaggataactaacatttcatccgatgacagtgggaagcagatctcttgtgtggcggaaaatcttgtaggagaagatcaagattctgtcaacctcactgtgcattttgcaccaactatcacatttctcgaatctccaacctcagaccaccactggtgcattccattcactgtgaaaggcaaccccaaaccagcgcttcagtggttctataacggggcaatattgaatgagtccaaatacatctgtactaaaatacatgttaccaatcacacggagtaccacggctgcctccagctggataatcccactcacatgaacaatggggactacactctaatagccaagaatgagtatgggaaggatgagaaacagatttctgctcacttcatgggctggcctggaattgacgatggtgcaaacccaaattatcctgatgtaatttatgaagattatggaactgcagcgaatgacatcggggacaccacgaacagaagtaatgaaatcccttccacagacgtcactgataaaaccggtcgggaacatctctcggtctatgctgtggtggtgattgcgtctgtggtgggattttgccttttggtaatgctgtttctgcttaagttggcaagacactccaagtttggcatgaaaggttttgttttgtttcataagatcccactggatgggtagctgaaataaaagaaaagacagagaaaggggctgtggtgcttgttggttgatgctgccatgtaagctggactcctgggactgctgttggcttatcccgggaagtgctgcttatctggggttttctggtagatgtgggcggtgtttggaggctgtactatatgaagcctgcatatactgtgagctgtgattggggaacaccaatgcagaggtaactctcaggcagctaagcagcacctcaagaaaacatgttaaattaatgcttctcttcttacagtagttcaaatacaaaactgaaatgaaatcccattggattgtacttctcttctgaaaagtgtgctttttgaccctactggacatttattgacttaattgcttctgtttattaaaattgacctgcaaagttaaaaaaaaattaaagttgagaacaggtataagtgcacactgaatagtctaatctacatgtaacacatattttagtatgattttctatactctaatcagcactgaattcagagggtttgactttttcatctataacacagtgactaaaagagttaagggtatatataccatcactttgggacttggtagtattattaaaaggttatttccttcactgtcaataaaagtccaaatgtttagcttaggtctgagagtcaaacaatgttaaggattgtcttaaagttccttagc

SEQ ID NO: 2047 - DNA, 3573 bp, Homo sapiens
  misc_feature (1)..(3573): n=a,t,g or c
tctagacanataaaaataaaagaaatcatccaagaatggtgacttgcctactattctactcgagaggctgagaggggaggatttcttgagcccaggagtttgaggatgcagtgagctatgatcacatcactgtacttcagcctgagcaacagcaagatcctgtctcaaaaaattaaattaggctgggcttggtggctcatgcctgtaatcccagcactttggaaggccatggtgggcagattgcttgagcccaggagtttgagacgaggtgggcaacatgacgaaaccccggctctaccaaaaaatacaaaaaattaactgggcataatggtacatgtctgtggtcccagctactcggtaggctgaggtgggaggaatgcttgagcccaggaaataggggctacagtgaaccaggatgatgccagtgcactccaacctgggcaacagagcaagactctacctcaaaataatttaaaaaaatggattaattgggaataggtggcttgtgcctgtagtcccagttactcaggaggctgaggtgggaggattgcctgagtctaggaggttgaggctgcagtgagccgggatggtaccattgcactccacctgggaacagggtgagaccctgtctcaaaaaagaaaaaaaagggaggggttataatcactcctcctgacatgatacagagtatccatttgagttcataacataaatatgtacttggtgaatgctctgtaactattggtgaatgctctgtaactattggcttttttattgttcccattttacatataaggaagctgaggctttgtgaggagaaatagcttagcccaggtcatccagtgggaagcgtctggtgaagaggaatagtgatcatggtgggactttgcctagcctaaggttcagcatacaatattcagtcagtactcaagggctgggctgtttctggtaatcaaagggctgccttgtcctcctgccccacagcaggaaattccaaggtggttttctttacaggctcctccgcttctgtggccagaggggacagcggaggagcccaggtacctaagccaactcaagagaagatggaattgaatatttcaaccaccttatctaggcctctgtgattgttgaggagggggctgtcactgggaaagttgtgagctgctttggaccttatctgggaatttccttgggcttacagcctttaccctatccttgaaatggttctggtttcatagcaacttctaggtggtgtgggcgaagtttgggactggtttagggcggggacaagaccaagaacacaagtttccttgtactagggagagagggaggggaggaaattggagaccccagcacccccttgctcactctcttgctcacagtccacgatggcccggtccctggtgtgccttggtgtcatcatcttgctgtctgccttctccggacctggtgtcaggggtggtcctatgcccaagctggctgaccggaagctgtgtgcggaccaggagtgcagccgtaagaatggggaggggtagaattgggcttgggtgttagcctgtgtggatgtgctgcattccccttctattccttccctagaccctatctccatggctgtggcccttcaggactacatggcccccgactgccgattcctgaccattcaccggggccaagtggtgtatgtcttctccaagctgaagggccgtgggcggctcttctggggaggcagcgtgcgtcttgggagagtgaaagagggaagggtacagagctggggtagactcattatccccatgaagggaagatttgaggggggtgaactgaaatagacattgtggggggatattgttacttactttattttatttgcttattattttttaattttttccgagacagagtcttgctctgtcacccaggctggatgcaatggcacgatctcggctcactgtaacctccacctcttgggtttaagcgattctccagcctcagcctcccaagtacctgggattacaggcatgcaccaccacacctnntaatttttgtatttttagtagagacagggttttaccatattggccaggctggtcttgaactcctgacctcatgatctgcccgccttggctcccggagtgctgggattacaggtgtgagccactggccccccagcctattttcactttatttaccaattttaggacctgatatggtcccannntctgttctagatctagacaccaagatacaacaacaaatgatcctttttattctaatggagggaaatgaacaaaaagcaaggcataaaaaatagcagcagccgggcacagtagctcacacctgtaatcccaagtaaggccaagtnnggaggatagcttgagcccaggagttcgagaccagcctgggcaacatagcaagacccccatctctataaaaaaaaatttaaaattaactgggcatcatggcatgtgtctgtggtcccggctactcgggaggctgaggtgggaggattgcttgatcccagaagttgaggctgcagtgagccgtgatcatgctactgcacctcaacctggccgacacaatgagaccctgtttccaaaataataataataaaagcaaatatgcgctgctgtgagaattaacagagacttacttgggtgttcagaaagggcctctgaacaggtggcatttaagctgagattcatatgacaaggatggagcagttatgtggagatcagggagaggggagaatgcaaaggccttcagcaggcacaagcttgccatcttccagaccctagcttttaactcctcttccccaggttcagggagattactatggagatctggctgctcgcctgggctatttccccagtagcattgtccgagaggaccagaccctgaaacctggcaaagtcgatgtgaagacagacgtgagtgtcatgggggctggcaagaaatgtggggggaggacccttaggttgtggggatgggcaaaaatgctcccacacttggctccctggccgcctaggtatgtgcgctgggagaaattctttccctgcctcaattttctcaccagtaaaatgggtccagttgggaggtgcaaagattagagggctctaggctaatttgcatagcanntgtgtggccagacctgggccctgcagctgcagcctttgctaaaaccactagatcctttgtggtgtgaccgctggttttctttccactgtttcccctttctctttttcagaaatgggatttctactgccagtgagctcagcctaccgctggccctgccgtttcccctccttgggtttatgcaaatacaatcagcccagtgcaaacggctcgtctccgtggtctttggggtggggtagggtagggtggggactgtacaaatgaaatgtttctctaggttgctgaatctaaccaattaacccgctgcctgtggtaacgtcagtggttgctaggcagagtttcgctgatgaaagccctgtgcagtaggagcgctcctaagcttaggtttcgacacaagcaaagaaaacctaagcagcccaactagggattgtagtgtcctctctaga

SEQ ID NO: 2048 - DNA, 1130 bp, Homo sapiens
tgagagtccggctcaggctccggctgcggctccagcccgcgatgccccattccgtgaccctgcgcgggccttcgccctggggcttccgcctggtgggccgggacttcagcgcgcccctcaccatctcacgggtccatgctggcagcaaggcctcattggctgccctgtgcccaggagacctgatccaggccatcaatggtgagagcacagagctcatgacacacctggaggcacagaaccgcatcaagggctgccacgatcacctcacactgtctgtgagcaggcctgagggcaggagctggcccagtgcccctgatgacagcaaggctcaggcacacaggatccacatcgatcctgagatccaggacggcagcccaacaaccagcaggcggccctcaggcaccgggactgggccagaagatggcagaccaagcctgggatctccatatggaaaacccccttgctttccagtccctcacaatggcagcagcgaggccaccctgccagcccagatgagcaccctgcatgtgtctccaccccccagcgctgacccagcagaggcctcccgcggagccgggagcagagtcgacctgggctccgaggtgtacaggatgctgcgggagccggccgagcccgtggccgcggagcccaagcagtcaggctccttccgctacttgcagggcatgctagaggccggcgagggcggggattggcccgggcctggcggcccccggaacctcaagcccacggccagcaagctgggcgctccgctgagcggcctgcaggggctgcccgagtgcacgcgctgctgccacggaatcgtgggcaccatcgtcaaggaacgggacaagctctaccatcccgagtgcttcatgtgcagtgactgcggcctgaacctcaagcagcgtggttacttctttctggacgagcggctctactgtgagagccacgccaaggcgcgcgtgaagccgcccgagggctacgacgtggtggcggtgtaccccaatgccaaggtggaactcgtctgagctgggaccctgctcccacccctgcttcttaaggtccctgctcggccggtgtaaatatgtttcaccctgtccctctaataaagctcctctgctcaaaaaaaa

SEQ ID NO: 2049 - DNA, 1457 bp, Homo sapiens
tccgttgctgtcggcgcgcggcggcccgggcgggggaagctggcgggctgaggcgccccgctcttctcctctgccccgggcccgcgaggccacgcgtcgccgcacgagagatgatgcaggacgtgtccagctcgccagtctcgccggccgacgacagcctgagcaacagcgaggaagagccagaccggcagcagccgccgagcgcgaagcgcggggcacgcaagcggcgcagcagcaggcgcagcgcgggcggcggcgcggggcccggcggagccgcgggtggggccgtcggaggcggcgacgagccgggcagcccggcccagggcaagcgcggcaagaagtctgcgggctgtggcggcggcggcggcgcgggcggcggcggcggcggcggcggcggcagcagcagcggcggcgggagtccgcagtcttacgaggagctgcagacgcagcgggtcatggccaacgtgcgggagcgccagcgcacccagtcgctgaacgaggcgttcgccgcgctgcggaagatcatccccacgctgccctcggacaagctgagcaagattcagaccctcaagctggcggccaggtacatcgacttcctctaccaggtcctccagagcgacgagctggactccaagatggcaagctgcagctatgtggctcacgagcggctcagctacgccttctcggtctggaggatggagggggcctggtccatgtccgcgtcccactagcagcggagccccccaccccctcagcagggccggagacctagatgtcattgtttccagagaaggagaaaatggacagtctagagactctggagctggataactaaaaataaaaatatatgccaaagattttcttggaaattagaagagcaaaatccaaattcaaagaaacagggcgtggggcgcacttttaaaagagaaagcgagacaggcccgtggacagtgattcccagacgggcagcgcaccatcctcacatcctctgcattctgatagaagtctgaacagttgtttgtgtttttttttttttttttttgacgaagaatgtttttatttttatttttttcatgcatgcattctcaagaggtcgtgccaatcatcagccactgaaaggaaaggcatcactatggactttctctattttaaaatggtaacaatcagaggaactataagaacacctttagaaataaaaatactgggatcaaactggcctgcaaaaccatagtcagttaattctttttttcatccttcctctgaggggaaaaacaaaaaaaaacttaaaatacaaaaaataacattctatttatttattgaggacccatggtaaatgcaatagtccggtgtctaaatgcattcatatttttatgattgttttgtaaatatctttgtatatttttctgcaataaataaatataaaaaatttagagaaaaaaaaaaaaaaaaaaaaaaaa

SEQ ID NO: 2050 - DNA, 1296 bp, Homo sapiens
ccggcgcctgggttggcgctgcggggcggaggcggtgtctgagcgccgctccggctctgctctctctcgagcttcggcacccgcccgagccgctcgcgcgcccgccacctgtctgcccactcggctgtctgtctgccctcccgccgccagctcctgcctcgggcctgccctctccggtctcggtgctccgaggggcgacgagaagcgcgacggggccgtggcgcaccgggcagggcgcgcggggcgcacggcctgggggcgcacggtgcggcgccggcccatgaggctttccagcgcggggagcggcagcgccggccggccatggggggtagcctgcgggtggccgttctaggcgccccgggcgtgggcaagacggccatcatccgccagttcctgttcggtgactaccccgagcgccaccggcccacggacgggccgcgcctctaccgacccgcggtgctgctcgacggcgccgtctacgacttgagcatccgcgacggcgacgtcgctggccccggctcgagccccgggggtccggaggagtggccagacgctaaggactggagcttgcaggacacggacgccttcgtgctcgtctacgacatctgcagcccggacagtttcgactacgtgaaggccctgcggcagcgcatcgcggagaccaggccggcgggcgcgcccgaagcgcccatcctcgtggtaggcaacaagcgggacaggcagcggctgcgcttcggaccgcggcgcgcgctggccgccctagtgcgcaggggctggcgctgcggctacctcgagtgctccgccaagtacaactggcacgtgctgcgtctcttccgcgagctgctgcgctgcgctctggtgcgcgcgcgccctgcacacccggccctgcgcctgcagggggcgctgcatcccgcgcgctgcagcctcatgtgacccgatcggacagtgccatccatgggccccaccttgtgactgggacaatcagggacctggattggacgggatcgcccaacttcactgggactggacagggaagtctccgccctgattggatgaggaaagctccaacccagtctcctaagcgactggcccccttttgaacctcattggacccaaccaggtcccaagctccattggagatgaccagtcctttctgggacctcaatgggtcacaatcccattggatggaaaggacttggctatgaacttgactggaaacacgcagcctgctcctggagcttcactggacatattctttatgccacacctaccacgggataataaaagggaaaataa

SEQ ID NO: 2051 - DNA, 838 bp, Homo sapiens
gaattccggagttttcatccagccacgggccagcatgtctgggggcaaatacgtagactcggagggacatctctacaccgttcccatccgggaacagggcaacatctacaagcccaacaacaaggccatggcagacgagctgagcgagaagcaagtgtacgacgcgcacaccaaggagatcgacctggtcaaccgcgaccctaaacacctcaacgatgacgtggtcaagattgactttgaagatgtgattgcagaaccagaagggacacacagttttcacggcatttggaaggccagcttcaccaccttcactgtgacgaaatactggttttaccgcttgctgtctgccctctttggcatcccgatggcactcatctggggcatttacttcgccattctctctttcctgcacatctgggcagttgtaccatgcattaagagcttcctgattgagattcagtgcaccagccgtgtctattccatctacgtccacaccgtctgtgacccactctttgaagctgttgggaaaatattcagcaatgtccgcatcaacttgcagaaagaaatataaatgacatttcaaggatagaagtatacctgattttttttccttttaattttcctggtgccaatttcaagttccaagttgctaatacagcaacgaatttatgaattgaattatcttggttgaaaataaaaagatcactttctcagttttcataagtattatgtctcttctgagctatttcatctatttttggcagtctgaatttttaaaacccatttatatttctttccttacctttttatttgcatgtggatcaaccatcgctttatt

SEQ ID NO: 2052 - DNA, 3360 bp, Homo sapiens
gaattccggctgtgccgcaccgaggcgagcaggagcagggaacaggtgtttaaaattatccaactgccatagagctaaattcttttttggaaaattgaaccgaacttctactgaatacaagatgaaaatgtggttgctggtcagtcatcttgtgataatatctattactacctgtttagcagagtttacatggtatagaagatatggtcatggagtttctgaggaagacaaaggatttggaccaatttttgaagagcagccaatcaataccatttatccagaggaatcactggaaggaaaagtctcactcaactgtagggcacgagccagccctttcccggtttacaaatggagaatgaataatggggacgttgatctcacaagtgatcgatacagtatggtaggaggaaaccttgttatcaacaaccctgacaaacagaaagatgctggaatatactactgtttagcatctaataactacgggatggtcagaagcactgaagcaaccctgagctttggatatcttgatcctttcccacctgaggaacgtcctgaggtcagagtaaaagaagggaaaggaatggtgcttctctgtgaccccccataccattttccagatgatcttagctatcgctggcttctaaatgaatttcctgtatttatcacaatggataaacggcgatttgtgtctcagacaaatggcaatctctacattgcaaatgttgaggcttccgacaaaggcaattattcctgctttgtttccagtccttctattacaaagagcgtgttcagcaaattcatcccactcattccaatacctgaacgaacaacaaaaccatatcctgctgatattgtagttcagttcaaggatgtatatgcattgatgggccaaaatgtgaccttagaatgttttgcacttggaaatcctgttccggatatccgatggcggaaggttctagaaccaatgccaagcactgctgagattagcacctctggggctgttcttaagatcttcaatattcagctagaagatgaaggcatctatgaatgtgaggctgagaacattagaggaaaggataaacatcaagcaagaatttatgttcaagcattccctgagtgggtagaacacatcaatgacacagaggtggacataggcagtgatctctactggccttgtgtggccacaggaaagcccatccctacaatccgatggttgaaaaatggatatgcgtatcataaaggggaattaagactgtatgatgtgacttttgaaaatgccggaatgtatcagtgcatagctgaaaacacatatggagccatttatgcaaatgctgagttgaagatcttggcgttggctccaacttttgaaatgaatcctatgaagaaaaagatcctggctgctaaaggtggaagggtgataattgaatgcaaacctaaagctgcaccgaaaccaaagttttcatggagtaaagggacagagtggcttgtcaatagcagcagaatactcatttgggaagatggtagcttggaaatcaacaacattacaaggaatgatggaggtatctatacatgctttgcagaaaataacagagggaaagctaatagcactggaacccttgttatcacagatcctacgcgaattatattggccccaattaatgccgatatcacagttggagaaaacgccaccatgcagtgtgctgcgtcctttgatcctgccttggatctcacatttgtttggtccttcaatggctatgtgatcgattttaacaaagagaatattcactaccagaggaattttatgctggattccaatggggaattactaatccgaaatgcgcagctgaaacatgctggaagatacacatgcactgcccagacaattgtggacaattcttcagcttcagctgaccttgtagtgagaggccctccaggccctccaggtggtctgagaatagaagacattagagccacttctgtggcacttacttggagccgtggttcagacaatcatagtcctatttctaaatacactatccagaccaagactattctttcagatgactggaaagatgcaaagacagatcccccaattattgaaggaaatatggaggcagcaagagcagtggacttaatcccatggatggagtatgaattccgcgtggtagcaaccaatacactgggtagaggagagcccagtataccatctaacagaattaaaacagacggtgctgcaccaaatgtggctccttcagatgtaggaggtggaggtggaagaaacagagagctgaccataacatgggcgcctttgtcaagagaataccactatggcaacaattttggttacatagtggcatttaagccatttgatggagaagaatggaaaaaagtcacagttactaatcctgatactggccgatatgtccataaagatgaaaccatgagcccttccactgcatttcaagttaaagtcaaggccttcaacaacaaaggagatggaccttacagcctactagcagtcattaattcagcacaagacgctcccagtgaagccccaacagaagtaggtgtaaaagtcttatcatcttctgagatatctgttcattgggaacatgttttagaaaaaatagtggaaagctatcagattcggtattgggctgcccatgacaaagaagaagctgcaaacagagttcaagtcaccagccaagagtactcggccaggctcgagaaccttctgccagacacccagtattttatagaagtcggggcctgcaatagtgcagggtgtggacctccaagtgacatgattgaggctttcaccaagaaagcacctcctagccagcctccaaggatcatcagttcagtaaggtctggttcacgctatataatcacctgggatcatgtcgttgcactatcaaatgaatctacagtgacgggatataaggtactctacagacctgatggccagcatgatggcaagctgtattcaactcacaaacactccatagaagtcccaatccccagagatggagaatacgttgtggaggttcgcgcgcacagtgatggaggagatggagtggtgtctcaagtcaaaatttcaggtgcacccaccctatccccaagtcttctcggcttactgctgcctgcctttggcatccttgtctacttggaattctgaatgtgttgtgacagctgctgttcccatcccagctcagaagacacccttcaaccctgggatgaccacaattccttccaatttctgcggctccatcctaagccaaataaattatactttaacaaactattcaactgatttacaacacacatgatgactgaggcattcaggaaccccttcatcca

SEQ ID NO: 2053 - DNA, 4037 bp, Homo sapiens
gagctccgttgggagtcccatgtttctttatggcataatgggtgagaacacagacttggaagccaaaccacctgaatttgaaccccagttccatttaccaactgtcaaaagcttaggctttgattctaagcctgtttcctcaactgctgttctaaagattaaataggctaatattcataaggcaactgggacagtggcttgtgtgtatagcaaccattatataagtgaattatctactgagcaccacagcacttcttcactccatggtgtggtgaccagaatggagatgagacagagaactgcaggttctgcttcgagtttaagttaggatttcccttgaccaatgagacctgacttggaggagtcctggcctcattccattaccccaaacaccctctagtctctagatgaacagatcctgaatgtccaggccccacgtggcctgttctaaggcctgagatggaattggatacaggacacatccagccttgagatcttttgctaagtgtgacacagtgcccccagccctgtgctcatgttcatgcctagggaaaggcttctatcaaaagagttgaacttcttcccactggggatggaagaccatttcctcccttaaaccttggctctccctgcttccttcaggccaccaacaacacatgtgcaggatatgaaattgctgaggcatcactgctttcctacttcccttccaagtctcagctcccttattttaaaaaatatttggcctcaatgatcatttctcaacaattcctcaccgcaggagcctctgaagctcccaccaggccagctctcctcccacaacagcttcccacagcatgaagatctccgtggctgccattcccttcttcctcctcatcaccatcgccctagggaccaagactgaatcctcctcacgtgagtgcaatgccttgtcttccttccaacctagagcctgcagggaaataagcaggagtgaggttggggctcaggggaagaccaggagcagggactcagaaaggagggctggtatcttcttgaaattgtgtgtatagcaacattatataaatgaattatctactgagcaccacagcacttcaccccatggtgtggtgagcaggatggagatgagacttaggactgtaggttctgcttaagagtttaagttgggatcttccagccttgaccaatgagacttgacttgggagactccaggcttcattccactaccccaaatgccctctagtctccaaataaacagatcctgaatctccaggcctcacatggccttgatctcttatcattgccccccaggaccagtccccccttgccctcaaggacatggagtgagaccagcctgcctctctactccctcaatttctctctctttgccgctaagcaaaagagtggcccaccccatttggggtatatttcctcagggagattaggagcagtgtcttgagcccctcaagggcatttttctattggcctcctgaggtttgggcccagcctgcttccagcgtcacctgtgcccagtgagtgcagcattgcttgggtatgggctggggggaaacacgacagtgtggggtccatcctaggcccccttttctcagctgatttcttagaataagctgcctttagagataaccaaaactatttatcactcttccattttacctactctccttttcagaaactggggggaaaccgaaggttgttaaaatacagctaaagttggtgggtatgtgcacagtttgacttgccctctccgatgtcatttgtcagctcagaggaacaaggtgggagagtataggagctctgactgggtctcaggaaacaggggccccttatgccgttctttggatcgtgaggatgctgcctggaatggagctggaaaacaggatgagacccttccacccagacatctggccaccctcagtgacctctgaggccattgtgatgcacatccatgattctatgaagcagggtcacataacatgcacacacctgatttctccactccataaccacaacatgtgcctgtttgtacagggctcttggcctacaatgtccttcctgctacctctataattcaagcttggggtggctgctgtcaccttgcttctcctataaaagccatgaaacttctcaatcagaaaatagatgaaaaaatcacccaatccagtgatttttaaaactttttagaccacaaaaccttttcttcaagcaatatcttccacagaggcccaatatgtaaaacagaaaaaatgggttgagtagggtacaagacaccactctcaaatgcagcaaggcctccacaatagtccctgaggcccccagagctcagtgtaaaaaccactgatgcagtccaagggcctcatttacagaggagggaacagggggaaagtaaaatggccacagtacacaggaagcacaggcaaggttaggttaggatttgggtgccctgactctgtggcctttgtccttggggcttgctgtgggcatcctgctctctctgcaggttgtcggttcaatggggacatgggcagggtggagcactaggaggggctgggtttgcattcccaaatggcatgtctccaaatccctattgggatttcttccaaatattcctcctatttggagcacctttcccgaataaggcatgaaggctgcatgatattggccaagtccctagccttctctgccagtcggcccccagagatggtgtaagaagatctgagtgtgctgctcttcaatcctggagttgaaagtcatccaccagtctttccaagaggggttgaagaaaaggaggaagggtgattgatgatgagggaggagaaaaagaagagcccaggagtaccatggagaaggagaagagaagatgaggaaagcctactctcccctccaagttctgaggggctgtctcctccttccttccctcctccatgccctcagcttgcaggagcagccaatggtatggcctttaacaaggggcccctcctcagcatctgatgctctctcctcagggggaccttaccacccctcagagtgctgcttcacctacactacctacaagatcccgcgtcagcggattatggattactatgagaccaacagccagtgctccaagcccggaattgtgtaggtggtacacacacatcacactggggggagagggagccagcagggcctcctggagggaagcagggagtggtggtggaatggggacccccagcgtacctcccaggtgtgactacatggggagaggcagctgaggggcaatctgagcgctttctggctggagcctgcaggagccatggggaaactgaccccatggatggggagatgacagagaagggagaagaaggcaagagggcacttcctcagggggacacagagactagatgggtctaggggtcctaggaaccgaagagtatgtctcagagaggagactggctctaagctgcctctgtggaagaaaggaaaagcagtataggtcaggtggggaatttaggagggagggaagatgggctgtctcttccggccactgggcccctcggtttgtgatccttctccctcttgctccacagcttcatcaccaaaaggggccattccgtctgtaccaaccccagtgacaagtgggtccaggactatatcaaggacatgaaggagaactgagtgacccagaaggggtggcgaaggcacagctcagagacataaagagaagatgccaaggccccctcctccacccaccgctaactctcagccccagtcaccctcttggagcttccctgctttgaattaaagaccactcatgctcttccctggcctcattcctttctacgggatttactcattggccatgcactgaggacaccagggtgtggcaccctcggcatcaagcctcgctctgcagaagttttggtggagcctggtacaaaaaataggtcaggcctgcaatgcaggtagtgagaagcagaaagtgagaaagaaaagcagtgtaaagaccgtctcctcctcagcagcaacagtagcagaccccg

SEQ ID NO: 2054 - DNA, 3426 bp, Homo sapiens
gtaggaatcgcagcgccaacggttgcaaggcccaagaagccatcctgggaaggaaaatgcattggggaaccctgtgcggattcttgtggctttggccctatcttttctatgtccaagctgtgcccatccaaaaagtccaagatgacaccaaaaccctcatcaagacaattgtcaccaggatcaatgacatttcacacacgcagtcagtctcctccaaacagaaagtcaccggtttggacttcattcctgggctccaccccatcctgaccttatccaagatggaccagacactggcagtctaccaacagatcctcaccagtatgccttccagaaacgtgatccaaatatccaacgacctggagaacctccgggatcttcttcacgtgctggccttctctaagagctgccacttgccctgggccagtggcctggagaccttggacagcctggggggtgtcctggaagcttcaggctactccacagaggtggtggccctgagcaggctgcaggggtctctgcaggacatgctgtggcagctggacctcagccctgggtgctgaggccttgaaggtcactcttcctgcaaggactacgttaagggaaggaactctggcttccaggtatctccaggattgaagagcattgcatggacaccccttatccaggactctgtcaatttccctgactcctctaagccactcttccaaaggcataagaccctaagcctccttttgcttgaaaccaaagatatatacacaggatcctattctcaccaggaagggggtccacccagcaaagagtgggctgcatctgggattcccaccaaggtcttcagccatcaacaagagttgtcttgtcccctcttgacccatctccccctcactgaatgcctcaatgtgaccaggggtgatttcagagagggcagaggggtaggcagagcctttggatgaccagaacaaggttccctctgagaattccaaggagttccatgaagaccacatccacacacgcaggaactcccagcaacacaagctggaagcacatgtttatttattctgcattttattctggatggatttgaagcaaagcaccagcttctccaggctctttggggtcagccagggccaggggtctccctggagtgcagtttccaatcccatagatgggtctggctgagctgaacccattttgagtgactcgagggttgggttcatctgagcaagagctggcaaaggtggctctccagttagttctctcgtaactggtttcatttctactgtgactgatgttacatcacagtgtttgcaatggtgttgccctgagtggatctccaaggaccaggttattttaaaaagatttgttttgtcaagtgtcatatgtaggtgtctgcacccaggggtggggaatgtttgggcagaagggagaaggatctagaatgtgttttctgaataacatttgtgtggtgggttctttggaaggagtgagatcattttcttatcttctgcaattgcttaggatgtttttcatgaaaatagctctttcaggggggttgtgaggcctggccaggcaccccctggagagaagtttctggccctggctgaccccaaagagcctggagaagctgatgctttgcttcaaatccatccagaataaaacgcaaagggctgaaagccatttgttggggcagtggtaagctctggctttctccgactgctagggagtggtctttcctatcatggagtgacggtcccacactggtgactgcgatcttcagagcaggggtccttggtgtgaccctctgaatgggtccagggttgatcacactctgggtttattacatggcagtgttcctatttggggcttgcatgccaaattgtagttcttgtctgattggctcacccaagcaaggccaaaattaccaaaaatcttggggggtttttactccagtggtgaagaaaactcctttagcaggtggtcctgagacctgacaagcactgctaggcgagtgccaggactccccaggccaggccaccaggatgcccttcccactggaggtcacattcaggaagatgaaagaggaggtttggggtctgccaccatcctgctgctgtgtttttgctatcacacagtgggtggtggatctgtccaaggaaacttgaatcaaagcagttaactttaagactgagcacctgcttcatgctcagccctgactggtgctataggctggagaagctcacccaataaacattaagattgaggcctgccctcagggatcttgcgttcccagtggtcaaaccgcactcacccatgtgccaaggtggggtatttaccacagcagctgaacagccaaatgcatggtgcagttgacagcaggtgggaaatggtatgagctgaggggggccgtgcccaggggcccacagggaaccctgcttgcactttgtaacatgtttacttttcagggcatcttagcttctattatagccacatccctttgaaacaagataactgagaatttaaaaataagaaaatacataagaccataacagccaacaggtggcaggaccaggactatagcccaggtcctctgatacccagagcattacgtgagccaggtaatgagggactggaaccagggagaccgagcgctttctggaaaagaggagtttcgaggtagagtttgaaggaggtgagggatgtgaattgcctgcagagagaagcctgttttgttggaaggtttggtgtgtggagatgcagaggtaaaagtgtgagcagtgagttacagcgagaggcagagaaagaagagacaggagggcaagggccatgctgaagggaccttgaagggtaaagaagtttgatattaaaggagttaagagtagcaagttctagagaagaggctggtgctgtggccagggtgagagctgctctggaaaatgtgacccagatcctcacaaccacctaatcaggctgaggtgtcttaagccttttgctcacaaaacctggcacaatggctaattcccagagtgtgaaacttcctaagtataaatggttgtctgtttttgtaacttaaaaaaaaaaaaaaaagtttggccgggtgcggtggctcacgcctgtaatcccagcactttgggaggccaaggtggggggatcacaaggtcactagatggcgagcatcctggccaacatggtgaaaccccgtctctactaaaaacacaaaagttagctgagcgtggtggcgggcgcctgtagtcccagccactcgggaggctgagacaggagaatcgcttaaacctgggaggcggagagtacagtgagccaagatcgcgccactgcactccggcctgatgacagagcgagattccgtcttaaaaaaaaaaaaaaaaaaagtttgtttttaaaaaaatctaaataaaataactttgccccctg

SEQ ID NO: 2055 - DNA, 3388 bp, Homo sapiens; identical to SEQ ID NO: 85

SEQ ID NO: 2056 - DNA, 854 bp, Homo sapiens
tgggaggaggtggattccagcccccagccccagggctctgaatcgctgccagctcagccccctgcccagcctgccccacagcctgagccccagcaggccagagagcccagtcctgaggtgagctgctgtggcctgtggccaggcgaccccagcgctcccagaactgaggctggcagccagccccagcctcagccccaactgcgaggcagagagacaccaatgggaatcccaatggggaagtcgatgctggtgcttctcaccttcttggccttcgcctcgtgctgcattgctgcttaccgccccagtgagaccctgtgcggcggggagctggtggacaccctccagttcgtctgtggggaccgcggcttctacttcagcgacttccagaggcccgcaagccgtgtgagccgtcgcagccgtggcatcgttgaggagtgctgtttccgcagctgtgacctggccctcctggagacgtactgtgctacccccgccaagtccgagagggacgtgtcgacccctccgaccgtgcttccggacaacttccccagataccccgtgggcaagttcttccaatatgacacctggaagcagtccacccagcgcctgcgcaggggcctgcctgccctcctgcgtgcccgccggggtcacgtgctcgccaaggagctcgaggcgttcagggaggccaaacgtcaccgtcccctgattgctctacccacccaagaccccgcccacgggggcgcccccccagagatggccagcaatcggaagtgagcaaaactgccgcaagtctgcagcccggcgccaccatcctgcagcctcctcctgaccacggacgtttccatcaggttccatcc

SEQ ID NO: 2057 - DNA, 1025 bp, Homo sapiens
gtcccgagcgcgagcggagacgatgcagcggagactggttcagcagtggagcgtcgcggtgttcctgctgagctacgcggtgccctcctgcgggcgctcggtggagggtctcagccgccgcctcaaaagagctgtgtctgaacatcagctcctccatgacaaggggaagtccatccaagatttacggcgacgattcttccttcaccatctgatcgcagaaatccacacagctgaaatcagagctacctcggaggtgtcccctaactccaagccctctcccaacacaaagaaccaccccgtccgatttgggtctgatgatgagggcagatacctaactcaggaaactaacaaggtggagacgtacaaagagcagccgctcaagacacctgggaagaaaaagaaaggcaagcccgggaaacgcaaggagcaggaaaagaaaaaacggcgaactcgctctgcctggttagactctggagtgactgggagtgggctagaaggggaccacctgtctgacacctccacaacgtcgctggagctcgattcacggaggcattgaaattttcagcagagaccttccaaggacatattgcaggattctgtaatagtgaacatatggaaagtattagaaatatttattgtctgtaaatactgtaaatgcattggaataaaactgtctcccccattgctctatgaaactgcacattggtcattgtgaatatttttttttttgccaaggctaatccaattattattatcacatttaccataatttattttgtccattgatgtatttattttgtaaatgtatcttggtgctgctgaatttctatattttttgtaacataatgcactttagatatacatatcaagtatgttgataaatgacacaatgaagtgtctctattttgtggttgattttaatgaatgcctaaatataattatccaaattgattttccttcgtgcatgtaaaaataacagtattttaaatttgtaaagaatgtctaataaaatataatctaattac

SEQ ID NO: 2058 - DNA, 655 bp, Homo sapiens; identical to SEQ ID NO: 139

SEQ ID NO: 2059 - DNA, 2130 bp, Homo sapiens
gcgcccaggtagctgcgaggaaacttttgcagcggctgggtagcagcacgtctcttgctcctcagggccactgccaggcttgccgagtcctgggactgctctcgctccggctgccactctcccgcgctctcctagctccctgcgaagcaggatggccgggaccgtgcgcaccgcgtgcttggtggtggcgatgctgctcagcttggacttcccgggacaggcgcagcccccgccgccgccgccggacgccacctgtcaccaagtccgctccttcttccagagactgcagcccggactcaagtgggtgccagaaactcccgtgccaggatcagatttgcaagtatgtctccctaagggcccaacatgctgctcaagaaagatggaagaaaaataccaactaacagcacgattgaacatggaacagctgcttcagtctgcaagtatggagctcaagttcttaattattcagaatgctgcggttttccaagaggcctttgaaattgttgttcgccatgccaagaactacaccaatgccatgttcaagaacaactacccaagcctgactccacaagcttttgagtttgtgggtgaatttttcacagatgtgtctctctacatcttgggttctgacatcaatgtagatgacatggtcaatgaattgtttgacagcctgtttccagtcatctatacccagctaatgaacccaggcctgcctgattcagccttggacatcaatgagtgcctccgaggagcaagacgtgacctgaaagtatttgggaatttccccaagcttattatgacccaggtttccaagtcactgcaagtcactaggatcttccttcaggctctgaatcttggaattgaagtgatcaacacaactgatcacctgaagttcagtaaggactgtggccgaatgctcaccagaatgtggtactgctcttactgccagggactgatgatggttaaaccctgtggcggttactgcaatgtggtcatgcaaggctgtatggcaggtgtggtggagattgacaagtactggagagaatacattctgtcccttgaagaacttgtgaatggcatgtacagaatctatgacatggagaacgtactgcttggtctcttttcaacaatccatgattctatccagtatgtccagaagaatgcaggaaagctgaccaccactattggcaagttatgtgcccattctcaacaacgccaatatagatctgcttattatcctgaagatctctttattgacaagaaagtattaaaagttgctcatgtagaacatgaagaaaccttatccagccgaagaagggaactaattcagaagttgaagtctttcatcagcttctatagtgctttgcctggctacatctgcagccatagccctgtggcggaaaacgacaccctttgctggaatggacaagaactcgtggagagatacagccaaaaggcagcaaggaatggaatgaaaaaccagttcaatctccatgagctgaaaatgaagggccctgagccagtggtcagtcaaattattgacaaactgaagcacattaaccagctcctgagaaccatgtctatgcccaaaggtagagttctggataaaaacctggatgaggaagggtttgaaagtggagactgcggtgatgatgaagatgagtgcattggaggctctggtgatggaatgataaaagtgaagaatcagctccgcttccttgcagaactggcctatgatctggatgtggatgatgcgcctggaaacagtcagcaggcaactccgaaggacaacgagataagcacctttcacaacctcgggaacgttcattccccgctgaagcttctcaccagcatggccatctcggtggtgtgcttcttcttcctggtgcactgactgcctggtgcccagcacatgtgctgccctacagcaccctgtggtcttcctcgataaagggaaccactttcttatttttttctatttttttttttttgttatcctgtatacctcctccagccatgaagtagaggactaaccatgtgttatgttttcgaaaatcaaatggtatcttttggaggaagatacattttagtggtagcatatagattgtccttttgcaaaaaaaaaaaccg

SEQ ID NO: 2060 - DNA, 2943 bp, Homo sapiens
gggaagcatggggcttcccaggctggtctgcgccttcttgctcgccgcctgctgctgctgtcctcgcgtcgcgggtgtgcccggagaggctgagcagcctgcgcctgagctggtggaggtggaagtgggcagcacagcccttctgaagtgcggcctctcccagtcccaaggcaacctcagccatgtcgactggttttctgtccacaaggagaagcggacgctcatcttccgtgtgcgccagggccagggccagagcgaacctggggagtacgagcagcggctcagcctccaggacagaggggctactctggccctgactcaagtcaccccccaagacgagcgcatcttcttgtgccagggcaagcgccctcggtcccaggagtaccgcatccagctccgcgtctacaaagctccggaggagccaaacatccaggtcaaccccctgggcatccctgtgaacagtaaggagcctgaggaggtcgctacctgtgtagggaggaacgggtaccccattcctcaagtcatctggtacaagaatggccggcctctgaaggaggagaagaaccgggtccacattcagtcgtcccagactgtggagtcgagtggtttgtacaccttgcagagtattctgaaggcacagctggttaaagaagacaaagatgcccagttttactgtgagctcaactaccggctgcccagtgggaaccacatgaaggagtccagggaagtcaccgtccctgttttctacccgacagaaaaagtgtggctggaagtggagcccgtgggaatgctgaaggaaggggaccgcgtggaaatcaggtgtttggctgatggcaaccctccaccacacttcagcatcagcaagcagaaccccagcaccagggaggcagaggaagagacaaccaacgacaacggggtcctggtgctggagcctgcccggaaggaacacagtgggcgctatgaatgtcaggcctggaacttggacaccatgatatcgctgctgagtgaaccacaggaactactggtgaactatgtgtctgacgtccgagtgagtcccgcagcccctgagagacaggaaggcagcagcctcaccctgacctgtgaggcagagagtagccaggacctcgagttccagtggctgagagaagagacagaccaggtgctggaaagggggcctgtgcttcagttgcatgacctgaaacgggaggcaggaggcggctatcgctgcgtggcgtctgtgcccagcatacccggcctgaaccgcacacagctggtcaagctggccatttttggccccccttggatggcattcaaggagaggaaggtgtgggtgaaagagaatatggtgttgaatctgtcttgtgaagcgtcagggcacccccggcccaccatctcctggaacgtcaacggcacggcaagtgaacaagaccaagatccacagcgagtcctgagcaccctgaatgtcctcgtgaccccggagctgttggagacaggtgttgaatgcacggcctccaacgacctgggcaaaaacaccagcatcctcttcctggagctggtcaatttaaccaccctcacaccagactccaacacaaccactggcctcagcacttccactgccagtcctcataccagagccaacagcacctccacagagagaaagctgccggagccggagagccggggcgtggtcatcgtggctgtgattgtgtgcatcctggtcctggcggtgctgggcgctgtcctctatttcctctataagaagggcaagctgccgtgcaggcgctcagggaagcaggagatcacgctgcccccgtctcgtaagaccgaacttgtagttgaagttaagtcagataagctcccagaagagatgggcctcctgcagggcagcagcggtgacaagagggctccgggagaccagggagagaaatacatcgatctgaggcattagccccgaatcacttcagctcccttccctgcctggaccattcccagctccctgctcactcttctctcagccaaagctcaaagggactagagagaagcctcctgctcccctcgcctgcacaccccctttcagagggccactgggttaggacctgaggacctcacttggccctgcaaggcccgcttttcagggaccagtccaccaccatctcctccacgttgagtgaagctcatcccaagcaaggagccccagtctcccgagcgggtaggagagtttcttgcagaacgtgttttttctttacacacattatgctgtaaatacgctcgtcctgccagcagctgagctgggtagcctctctgagctggtttcctgccccaaaggctggcattccaccatccaggtgcaccactgaagtgaggacacaccggagccaggcgcctgctcatgttgaagtgcgctgttcacacccgctccggagagcaccccagcagcatccagaagcagctgcagtgcaagcttgcatgcctgcgtgttgctgcaccaccctcctgtctgcctcttcaaagtctcctgtgacattttttctttggtcagaggccaggaactgtgtcattccttaaagatacgtgccggggccaggtgtggctcacgcctgtaatcccagcactttgggaggccgaggcggcggatcacaaagtcagacgagaccatcctggctaacacggtgaaaccctgtctctactaaaaatacaaaaaaaaattagctaggcgtagtggttggcacctatagtcccagctactcggaaggctgaagcaggagaatggtatgaatccaggaggtggagcttgcagtgagccgagaccgtgccactgcactccagcctgggcaacacagcgagactccgtctcgagccggccggttgcgcgggccctcggaccctcagagaggcgagggttcgagggcacgagttcgaggccaacctggtccacatgggttg

SEQ ID NO: 2061 - DNA, 1340 bp, Homo sapiens
gcacccggcagcggtctcaggccaagccccctgccagcatggccagcgagttcaagaagaagctcttctggagggcagtggtggccgagttcctggccacgaccctctttgtcttcatcagcatcggttctgccctgggcttcaaatacccggtggggaacaaccagacggcggtccaggacaacgtgaaggtgtcgctggccttcgggctgagcatcgccacgctggcgcagagtgtgggccacatcagcggcgcccacctcaacccggctgtcacactggggctgctgctcagctgccagatcagcatcttccgtgccctcatgtacatcatcgcccagtgcgtgggggccatcgtcgccaccgccatcctctcaggcatcacctcctccctgactgggaactcgcttggccgcaatgacctggctgatggtgtgaactcgggccagggcctgggcatcgagatcatcgggaccctccagctggtgctatgcgtgctggctactaccgaccggaggcgccgtgaccttggtggctcagccccccttgccatcggcctctctgtagcccttggacacctcctggctattgactacactggctgtgggattaaccctgctcggtcctttggctccgcggtgatcacacacaacttcagcaaccactggattttctgggtggggccattcatcgggggagccctggctgtactcatctacgacttcatcctggccccacgcagcagtgacctcacagaccgcgtgaaggtgtggaccagcggccaggtggaggagtatgacctggatgccgacgacatcaactccagggtggagatgaagcccaaatagaaggggtctggcccgggcatccacgtagggggcaggggcaggggcgggcggagggaggggaggggtgaaatccatactgtagacactctgacaagctggccaaagtcacttccccaagatctgccagacctgcatggtcaagcctcttatgggggtgtttctatctctttctttctctttctgtttcctggcctcagagcttcctggggaccaagatttaccaattcacccactcccttgaagttgtggaggaggtgaaagaaagggacccacctgctagtcgcccctcagagcatgatgggaggtgtgccagaaagtcccccctcgccccaaagttgctcaccgactcacctgcgcaagtgcctgggattctaccgtaattgctttgtgcctttgggcacggccctccttcttttcctaacatgcaccttgctcccaatggtgcttggagggggaagagatcccaggaggtgcagtggagggggcaagctt

SEQ ID NO: 2062 - DNA, 2625 bp, Homo sapiens
ggcagccgtccggggccgccactctcctcggccggtccctggctcccggaggcggccgcgcgtggatgcggcgggagctggaagcctcaagcagccggcgccgtctctgccccggggcgccctatggcttgaagagcctggccacccagtggctccaccgccctgatggatccactgaatctgtcctggtatgatgatgatctggagaggcagaactggagccggcccttcaacgggtcagacgggaaggcggacagaccccactacaactactatgccacactgctcaccctgctcatcgctgtcatcgtcttcggcaacgtgctggtgtgcatggctgtgtcccgcgagaaggcgctgcagaccaccaccaactacctgatcgtcagcctcgcagtggccgacctcctcgtcgccacactggtcatgccctgggttgtctacctggaggtggtaggtgagtggaaattcagcaggattcactgtgacatcttcgtcactctggacgtcatgatgtgcacggcgagcatcctgaacttgtgtgccatcagcatcgacaggtacacagctgtggccatgcccatgctgtacaatacgcgctacagctccaagcgccgggtcaccgtcatgatctccatcgtctgggtcctgtccttcaccatctcctgcccactcctcttcggactcaataacgcagaccagaacgagtgcatcattgccaacccggccttcgtggtctactcctccatcgtctccttctacgtgcccttcattgtcaccctgctggtctacatcaagatctacattgtcctccgcagacgccgcaagcgagtcaacaccaaacgcagcagccgagctttcagggcccacctgagggctccactaaagggcaactgtactcaccccgaggacatgaaactctgcaccgttatcatgaagtctaatgggagtttcccagtgaacaggcggagagtggaggctgcccggcgagcccaggagctggagatggagatgctctccagcaccagcccacccgagaggacccggtacagccccatcccacccagccaccaccagctgactctccccgacccgtcccaccacggtctccacagcactcctgacagccccgccaaaccagagaagaatgggcatgccaaagaccaccccaagattgccaagatctttgagatccagaccatgcccaatggcaaaacccggacctccctcaagaccatgagccgtagaaagctctcccagcagaaggagaagaaagccactcagatgctcgccattgttctcggcgtgttcatcatctgctggctgcccttcttcatcacacacatcctgaacatacactgtgactgcaacatcccgcctgtcctgtacagcgccttcacgtggctgggctatgtcaacagcgccgtgaaccccatcatctacaccaccttcaacattgagttccgcaaggccttcctgaagatccttcactgctgactctgctgcctgcccgcacagcagcctgcttcccacctcctgcccaggccagccagcctcacccttgcgaaccgtgagcaggaaggcctgggtggatcggcctcctcttcaccccggcagccctgcagtgttcgcttggctccatgctcctcactgcccgcacaccctcactctgccagggcagtgctagtgagctgggcatggtaccagccctggggtgcccccagctcaggggcagctcatagagtcccccctcccacctccagtccccctatccttggcaccaaagatgcagccgccttccttgaccttcctctggggctctagggttgctggagcctgagtcagggcccagaggctgagttttctctttgtggggcttggcgtggagcaggcggtggggagagatggacagttcacaccctgcaaggcccacaggaggcaagcaagctctcttgccgaggagccaggcaacttcagtcctgggagaccatgtaaataccagactgcaggttggacccagagattcccaagccaaaaccttagctccctccgcacccgatgtgacctctactttccagctagtccgacccacctcaccccgttacagctccccaagtggtttccacatgctctgagaagaggagccctcatcttgaagggcccaggagggtctatggggagaggaactccttgcctagcccaccctgctgccttctgacggccctgcaatgtatcccttctcacagcacatgctgccagcctggggcctggcagggaggtcaggccctggaactctatctgggcctgggctaggggacatcagaggttctttgagggactgcctctgccacactctgacgcaaaaccactttccttttctattccttctggcctttcctctctcctgtttcccttcccttccactgcctctgccttagaggagcccacggctaagaggctgctgaaaaccatctgcctggcctggccctgccctgaggaaggaggggaagctgcagcttgggagagcccctggggctagactctgtaacatcactatccatgcaccaaactaataaaactttgacgagtcaccttccaggacccctgggtaaaaaaaaaaaaaaa

SEQ ID NO: 2063 - DNA, 3128 bp, Homo sapiens
ccttgtgcatttggtctgaagacaaagatgactgcaggagtgggcaggccggagtgggggtgacctggcctgtgccaggaaggaggaggagtctgcagccctgtgcggttcaacatccatcaaggagtccagagcaggagccaggccaggcgggagggaaaggccctgggaggggctctctaatctcccagccccgactctgccccgtcactgccgctgctcctcattactcgctggggctgctgtcgcctccccgaagggtggccttgtccagatagtggcaaacctccctgccgtggatgagtcaggagcattttcttaagaggaacatcactggaaaacaaaatgagcggggacacagaaaccaacagcagtggctgcatttgtggtacaggctcctcttccagagctcgctgatgcccacctcagacaggcctgaccacggcacggctggtgggatttgccagtcacctcaaccagccagttccaccctcagcttctctcagaagggagcaccacactcctcaagctcagtgaatgtatcccggcatgggtggggccagagcctgtgatatctcgaggtgggctcggcaggacaccggggtgtggaagggggaagcgagcacctgactcagacagcgcgggagctcgcaggagtcacgaggccacagcgacttcattgtctgactgggcctggacctataaacttcccacctcagccttgggccaagcctggaagataaaaatggagcaccccatggcgcccctcactcagattctcccctgggcttctcccacgcagccccagaagaggacacaccagccccagagttagccccagaggcccctgagcctcctgaagagccccgcctaggagtgctgaccgtgaccgacacaaccccagactccatgcgcctctcgtggagcgtggcccagggcccctttgattccttcgtggtccagtatgaggacacgaacgggcagccccaggccttgctcgtggacggcgaccagagcaagatcctcatctcaggcctggagcccagcaccccctacaggttcctcctctatggcctccatgaagggaagcgcctggggcccctctcagctgagggcaccacagggctggctcctgctggtcagacctcagaggagtcaaggccccgcctgtcccagctgtctgtgactgacgtgaccaccagttcactgaggctcaactgggaggccccaccgggggccttcgactccttcctgctccgctttggggttccatcaccaagcactctggagccgcatccgcgtccactgctgcagcgcgagctgatggtgccggggacgcggcactcggccgtgctccgggacctgcgttccgggactctgtacagcctgacactgtatgggctgcgaggaccccacaaggccgacagcatccagggaaccgcccgcaccctcagcccagttctggagagcccccgtgacctccaattcagtgaaatcagggagacctcagccaaggtcaactggatgcccccaccatcccgggcggacagcttcaaagtctcctaccagctggcggacggaggggagcctcagagtgtgcaggtggatggccaggcccggacccagaaactccaggggctgatcccaggcgctcgctatgaggtgaccgtggtctcggtccgaggctttgaggagagtgagcctctcacaggcttcctcaccacggttcctgacggtcccacacagttgcgtgcactgaacttgaccgagggattcgccgtgctgcactggaagcccccccagaatcctgtggacacctatgacgtccaggtcacagcccctggggccccgcctctgcaggcggagaccccaggcagcgcggtggactaccccctgcatgaccttgtcctccacaccaactacaccgccacagtgcgtggcctgcggggccccaacctcacttccccagccagcatcaccttcaccacagggctagaggcccctcgggacttggaggccaaggaagtgaccccccgcaccgccctgctcacttggactgagcccccagtccggcccgcaggctacctgctcagcttccacacccctggtggacagaaccaggagatcctgctcccaggagggatcacatctcaccagctccttggcctctttgggtccacctcctacaatgcacggctccaggccatgtggggccagagcctcctgccgcccgtgtccacctctttcaccacgggtgggctgcggatccccttccccagggactgcggggaggagatgcagaacggagccggtgcctccaggaccagcaccatcttcctcaacggcaaccgcgagcggcccctgaacgtgttttgcgacatggagactgatgggggcggctggctggtgttccagcgccgcatggatggacagacagacttctggagggactgggaggactatgcccatggttttgggaacatctctggagagttctggctgggcaatgaggccctgcacagcctgacacaggcaggtgactactccatccgcgtggacctgcgggctggggacgaggctgtgttcgcccagtacgactccttccacgtagactcggctgcggagtactaccgcctccacttggagggctaccacggcaccgcaggggactccatgagctaccacagcggcagtgtcttctctgcccgtgatcgggaccccaacagcttgctcatctcctgcgctgtctcctaccgaggggcctggtggtacaggaactgccactacgccaacctcaacgggctctacgggagcacagtggaccatcagggagtgagctggtaccactggaagggcttcgagttctcggtgcccttcacggaaatgaagctgagaccaagaaactttcgctccccagcggggggaggctgagctgctgcccacctctctcgcaccccagtatgactgccgagcactgaggggtcgccccgagagaagagccagggtccttcaccacccagccgctggaggaagccttctctgccagcgatctcgcagcactgtgtttacaggggggaggggaggggttcgtacaggagcaataaaggagaaactgaggtacccgaaaa

SEQ ID NO: 2064 - DNA, 1158 bp, Homo sapiens
cagcggactccgagaccagcggatctcggcaaaccctctttctcgaccacccacctaccattcttggaaccatggcggcagtggcggcggcctcggctgaactgctcatcatcggctggtacatcttccgcgtgctgctgcaggtgttcaggtactccctgcagaagctggcatacacggtgtcgcggaccgggcggcaggtgttgggggagcgcaggcagcgagcccccaactgaggccccagctcccagcctgggcggccgtatatagtgctcctgtgcatctcggccagcacgggagccagtgccgcgcaggaatgtggggtcccctgtgttccctcgccagaggagcacttggcaaggtcagtgaggggccagtagacccccggagaagcagtaccgacaatgacgaagataccagatcccttcccaacccctttgcaccggtcccactaaggggcagggtcgagagaggaggggggatagggggagcagaccctgagatctgggcataggcaccgcattctgatctggacaaagtcgggacagcaccatcccagccccgaagccagggccatgccagcaggccccaccatggaaatcaaaacaccgcaccagccagcagaatggacattctgacatcgccagccgacgccctgaatcttggtgcagcacccaccgcgtgcctgtgtggcgggactggagggcacagttgaggaaggagggtggttaagaaatacagtggggccctctcgctgtcccttgcccagggcacttgtattccagcctcgctgcatttgctctctcgattgcccctttcctcctacatgcctcccaagcccaccctactccaaaagtaatgtgtcacttgatttggaactattcaagcagtaaaagtaaatgaatcccacctttactaaaacactttctctgaaccccccttgcccctcactgatcttgcttttccctggtctcatgcagttgtggtcaatattgtggtaatcgctaattgtactgattgtttaagtgtgcattagttgtctctccccagctagattgtaagctcctggaggacagggaccacctctacaaaaaataaaaaaagtacctcccctgtctcgcacagtgtcccaggaccctgcggtgcagtagaggcgca

SEQ ID NO: 2065 - DNA, 975 bp, Homo sapiens
cacttcggaggattgctcaacaaccatgctgggcatctggaccctcctacctctggttcttacgtctgttgctagattatcgtccaaaagtgttaatgcccaagtgactgacatcaactccaagggattggaattgaggaagactgttactacagttgagactcagaacttggaaggcctgcatcatgatggccaattctgccataagccctgtcctccaggtgaaaggaaagctagggactgcacagtcaatggggatgaaccagactgcgtgccctgccaagaagggaaggagtacacagacaaagcccatttttcttccaaatgcagaagatgtagattgtgtgatgaaggacatgatgtgaacatggaatcatcaaggaatgcacactcaccagcaacaccaagtgcaaagaggaaggatccagatctaacttggggtggctttgtcttcttcttttgccaattccactaattgtttggggaaacagtggcaataaatttatctgatgttgacttgagtaaatatatcaccactattgctggagtcatgacactaagtcaagttaaaggctttgttcgaaagaatggtgtcaatgaagccaaaatagatgagatcaagaatgacaatgtccaagacacagcagaacagaaagttcaactgcttcgtaattggcatcaacttcatggaaagaaagaagcgtatgacacattgattaaagatctcaaaaaagccaatctttgtactcttgcagagaaaattcagactatcatcctcaaggacattactagtgactcagaaaattcaaacttcagaaatgaaatccaaagcttggtctagagtgaaaaacaacaaattcagttctgagtatatgcaattagtgtttgaaaagattcttaatagctggctgtaaatactgcttggttttttactgggtacattttatcatttattagcgctgaagagccaacata

SEQ ID NO: 2066 - DNA, 1443 bp, Homo sapiens
cctactccacgaactgatgcgcccaccccaggcagtaactctactcccggattgaggcctgtacctggaaaaccaccaggagttgaccctttggcctcaagcctaaggaccccaatggcagtaccttgtccatatccaactccatttgggattgtgccccatgctggaatgaacggagagctgaccagccccggagcggcctacgctgggctccacaacatctcccctcagatgagcgcagctgctgccgccgccgctgctgctgctgcctatgggagatcaccagtggtgggatttgatccacaccatcacatgcgtgtgccagcaatacctccaaacctgacaggcattccaggaggaaaaccagcatactccttccatgttagcgcagatggtcagatgcagcctgtcccttttccacccgaccccctcatcggacctggaatcccccggcatgctcgccagatcaacaccctcaaccacggggaggtggtgtgcgcggtgaccatcagcaaccccacgagacacgtgtacacgggtgggaagggcgcggtcaaggtctgggacatcagccacccaggcaataagagtcctgtctcccagctcgactgtctgaacagggataactacatccgttcctgcagattgctccctgatggtcgcaccctaattgttggaggggaagccagtactttgtccatttgggacctggcggctccaaccccacgcatcaaggcagagctgacatcctcggcccccgcctgctatgccctggccatcagccccgattccaaggtctgcttctcatgctgcagcgacggcaacatcgctgtgtgggatctgcacaaccagaccttggtgaggcaattccagggccacacagatggagccagctgtattgacatttctaatgatggcaccaagctctggacaggtggtttggacaacacggtcaggtcctgggacctgcgggaggggcggcagctgcagcagcacgacttcacctcccagatcttttctctgggctactgcccaactggagagtggcttgcagtggggatggagaacagcaatgtggaagttttgcatgtcaccaagccagacaaataccaactacatcttcatgagagctgtgtgctgtcgctcaagtttgcccattgtggcaaatggtttgtaagcactggaaaggacaaccttctgaatgcctggagaacgccttacggggccagtatattccagtccaaagaatcctcatcggtgcttagctgtgacatctccgtggacgacaaatacattgtcactggctctggggataagaaggccacagtttatgaagttatttattaaagacaaatcttcatgcagactggacttctcctcctggtagcactttgctctgtcatcctttttgttcacccccatccccgcatctaaaaccaagga

SEQ ID NO: 2067 - DNA, 1309 bp, Homo sapiens
  misc_feature (1)..(1309): n=a,t,g or c
actttctctctctttcgattcttccatactcagagtacgcacggtctgattttctctttggattcttccaaaatcagagtcagactgctcccggtgccatgaacggagacgacgcctttgcaaggagacccacggttggtgctcaaataccagagaagatccaaaaggccttcgatgatattgccaaatacttctctaaggaagagtgggaaaagatgaaagcctcggagaaaatcttctatgtgtatatgaagagaaagtatgaggctatgactaaactaggtttcaaggccaccctcccacctttcatgtgtaataaacgggccgaagacttccaggggaatgatttggataatgaccctaaccgtgggaatcaggttgaacgtcctcagatgactttcggcaggctccagggaatctccccgaagatcatgcccaagaagccagcagaggaaggaaatgattcggaggaagtgccagaagcatctggcccacaaaatgatgggaaagagctgtgccccccgggaaaaccaactacctctgagaagattcacgagagatctggacccaaaaggggggaacatgcctggacccacagactgcgtgagagaaaacagctggtgatttatgaagagatcagcgaccctgaggaagatgacgagtaactcccctcagggatacgacacatgcccatgatgagaagcagaacgtggtgacctttcacgaacatgggcatggctgcggacccctcgtcatcaggtgcatagcaagtgaaagcaagtgttcacaacagtgaaaagttgagcgtcatttttcttagtgtgccaagagttcgatgttagcgtttacgttgtattttcttacactgtgtcattctgttagatactaacattttcattgatgacgcaagccatacttaatgcatattttggtttgggtatccatgaacctaccnnnngaaaccaagnattgccggttacctctgcatggaccagcattaccctcctctctccccagatgtgactactgaggcagttctgagtgtttaatttcagattttttcctctgcatttacacacacacgacacaaaccacaccacacacacacacacacacacacacacacacacacacacaccaagtaccagtataagcatctgccatctgcttttcccattgccatgcgtcctggtcaagctcccctcactctgtttcctggtcagcatgtactcccctcatccgattcccctgtagcagtcactgcacagttaataaacctttgcaaacgttaaaaaaaaaaaaaaaaaaa

SEQ ID NO: 2068 - DNA, 567 bp, Homo sapiens; identical to SEQ ID NO: 1667
  misc_feature (1)..(567): n=a,t,g or c

SEQ ID NO: 2069 - DNA, 299 bp, Homo sapiens
ccgacatgaaggtgtcagctgtgatgcatgtttaaaaggaaattttcgaggtcgcagatataagtgtttaatttgctacgattacgatctttgtgcatcttgttatgaaagtggtgcacaacaacaaggcatacaactgaccacccaatgcagtgcatattaacaagggtagattttgatttatactatggtggggaagctttctctgtagagcagccacagtcttttacttgtccctattgtggaaaatgggctatcgagacatctctcagacctgttacttctaaacatgcagaaca

SEQ ID NO: 2070 - DNA, 269 bp, Homo sapiens
gttaaaacatttttttaaagcagtaagtttatagaaaatgttttcatttaatggaaggctggggaatgtccagcatcaacccctatggcatgcattccagtggccttctcatctgggcctggaacctttgttcagggcttaggggagaacaggccacatggcaacagccacacagtcattgccttcacacagagccacgtgtcccaaacagcatagtcatgccttgtcagctggatctaattgtcatagtcgtgctcctcctgtagact

SEQ ID NO: 2071 - DNA, 263 bp, Homo sapiens; identical to SEQ ID NO: 1669

SEQ ID NO: 2072 - DNA, 306 bp, Homo sapiens
ataaaccccaaggcagccatgtcatagactagtgtttactcttgttttgactttgttttaatgcttcctaagacccaagtgcctcctgctgtttcctcctttgtggtagcctctggccatctggacctcaatgcccagctttcccactttcagcagtcctttgctctctttgcttctacctcaaatagccccaggagtgggctttagtctccaatatggagcatctcaagcttctcctggggatgggattggatggcagatctgtttggactccggtattccagtgggtaagcagactggacttcc

SEQ ID NO: 2073 - DNA, 423 bp, Homo sapiens
gttcttttgaatacttaatgacagaacaaatacttggcaaactcctttgctctgctgtcatcctgtgtacccttgtcaatccatggagctggttcactgtaactagcaggccacaggaagcaaagccttggtgcctgtgagctcatctcccaggatggtgactaagtagcttagctagtgatcagctcatcctttaccataaaagtcatcattgctgtttagcttgactgttttcctcaagaacatcgatctgaaggattcataaggagcttatctgaacagatttatctaagaaaaaaaaaaaacgacataaaataagtgaaacaactaggaccaaattacagataaactagttagcttcacagcctctatggctacatggttcttctggccgatggtatgacacctaagttagaacacagc

SEQ ID NO: 2074 - DNA, 103 bp, Homo sapiens
cagctcacgcgggacctggccggcctcccgagtctcttcaagcagctgcccagcccgcccttcctgccggccgccgggacagcagactgccggtaacgcgcgg

SEQ ID NO: 2075 - DNA, 288 bp, Homo sapiens
gtttcaagaacacatgaaattcttttaacaccagattagtgtgttaccccaaatgaacggttctagccctctattaagaaataaagggaccataagcattttggctgcttatggctgtgtgttactacttacaagagtcttgaaaattatacagaactttgccttctttttttaatgtcttccacaatgttgtgactgattataaccctgtttcccctcagagaagagctatggctcagggatctgtgttgactctggcatttagtggctttgtgaaggaaagaaacc

SEQ ID NO: 2076 - DNA, 182 bp, Homo sapiens; identical to SEQ ID NO: 1671

SEQ ID NO: 2077 - DNA, 320 bp, Homo sapiens
ctggacaccacttttaaaaagcaatcactgtgctagaaaagtatattggctttgttaggattaaagttcattaacttcaatgtaatcatgcctcctattactgaagtcagattggaaccactaaagatccaaactttctgtctggtaatagaaagtaaaaatctagacatcatttacatttgagaaagctgtttttaacattattttaaaatgccaaatatgttctttctagaaaaatatttatttttgtttttgttggatagcttttaattacatttcagagaggtgtaattttggggtagatgctcattacatttttg

SEQ ID NO: 2078 - DNA, 421 bp, Homo sapiens
tcgacctcctgaatcatgtggttctgcaaatgaataccttcaactaggatttagaccactaagaacttgcacagaaaaacacgcattgaatgtgtgtcgaacctctacattgtgaagttgcactatgtaccatactctaaaatgaaataagaactctttatgtctgtgagagagtgtgtgtgtgtgtgtgcgtgcgtgtgtgcttgtgggggttgggtagtgtgtgtgtattttctctggctttaaaattttaaaacaaacaaacaaaaaagccatagagagcagaacttgccgagggtcatttattgcccaagtttacaagagtagcgatacaagtttttgcaaattgaatttgcctcagatatatctgtcctaatgcttatatttgcacaagtatgtaaaatatcgtgttgaggatcat

SEQ ID NO: 2079 - DNA, 463 bp, Homo sapiens
ctctcaaacttgttttcgaatctcctgggagtgagggagaaacagggagctgaatcctcccccaagctgttccaggccagaggactctgcagtaccttctcctacatctagtaacaaagaatggtgataaccatgcactggttcaaggttctggagttctccatgaaacttgggttaattttgctcagagtatccggagttagccactagctgcgggtgaaatgggatggagtagaacaacagcaggcttcctggagccacatgggctgactagggcactctgtggctggctgcacggctcaccatgaagaggagaaacgatcccttgcctgcccctccctgtggcagggctaactgcctggccctcctggctcgcagcagccagccccctggcagcaggttctcctcagggcttgggtcttcaacctgtggcgacaggaggcagggcagactgtggaggaca

SEQ ID NO: 2080 - DNA, 348 bp, Homo sapiens; identical to SEQ ID NO: 1676
  misc_feature (1)..(348): n=a,t,g or c

SEQ ID NO: 2081 - DNA, 532 bp, Homo sapiens; identical to SEQ ID NO: 1678

SEQ ID NO: 2082 - DNA, 501 bp, Homo sapiens
tgttaccaatatatccacagaaagaattgcaatttaccaaggttttcacgtgttttgagagaaatcttactgaaagactagtgatgtccattttccagtaaatactgagcgaaaaacaatttttataccccaatctgaggtataaacttgctttttgtgggatcacaactgctgtaaattagacaattgtagcaacaatccaagacaataacagaatgcctatgacagtctgccatattctggtgagtgtctatcaaagctcatcatgattttttgtgagatcttccccgtaattggtagcttggcttccaacaaacatgttccagttctccaatatttcctctttagttagcttctcatccttgtttttgtctgattcatataccagatgcctggcctcagcctgtgcgtgatcataatcttgagggaggatccagtggcgaatctcatctttgtctaacttcccgtcttgttcagatccggaattcgttaactgctccc

SEQ ID NO: 2083 - DNA, 5338 bp, Homo sapiens
ggccgcgagtgcatcttccacgaacctaattcatctctccagcaaaggacacatctctccagcaaaggacacctctctccagcaaaggacacctgcagagatgtccccagtccttcacttctatgttcgtccctctggccatgagggggcagcctctggacacactcggaggaaactgcaagggaaactgccagagctgcagggcgtcgagactgaactgtgctacaacgtgaactggacagctgaggccctccccagtgctgaggagacaaagaagctgatgtggctgtttggttgccccttactgctggatgatgttgctcgggagtcctggctccttcctggctccaatgacctgctgctggaggtcgggcccaggctgaacttctccaccccaacatccaccaacatcgtgtcagtgtgccgcgccactgggctggggcctgtggatcgtgtggagaccacccggcgctaccggctctcgtttgcccaccccccgtcagctgaggtggaagccattgctctggctaccctgcacgaccggatgacagagcagcacttcccccatcccatccagagtttctcccctgagagcatgccggaacccctcaatggccctatcaatatactgggtgagggccggcttgcgctggagaaggccaaccaggagcttggtctggctttagactcttgggacctagacttctacaccaagcgcttccaggagctacagcggaacccgagcactgtggaggcctttgacttggcgcagtccaatagcgagcacagccgacactggttcttcaagggccagctccacgtggatgggcagaagctggtgcactcactgtttgagtccatcatgagcacccaggaatcctcgaaccccaacaacgtcctcaaattctgtgataacagcagtgcaatccagggaaaggaagtccgattcctacggcctgaggaccccacacggccaagccgcttccagcaacagcaagggctgagacatgttgtcttcacagcagagactcacaactttcccacaggagtatgcccctttagtggtgcaaccactggcacagggggccggattcgagatgtccagtgcacaggccgcggggcccacgtggtggctggcactgccggctattgctttggaaatctgcatattccaggttacaatctgccctgggaggatctaagcttccagtatcctgggaattttgcccggcccctggaggttgccattgaagccagtaatggagcttctgactatggcaacaagtttggggaaccagtgctggctggcttcgcccgctccttgggcctccagctcccagacggccagcggcgtgagtggatcaagcccatcatgtttagtgggggcattgggtccatggaagctgaccacataagcaaggaggccccagagccaggcatggaagttgtaaaggttggaggtcccgtctacaggattggagttggaggtggagctgcttcatctgtgcaggtgcagggagataacaccagtgacctggactttggggctgtgcagcgaggagacccggagatggaacagaagatgaaccgtgtgatcagggcttgtgtggaggcccccaagggaaaccccatctgcagccttcatgatcagggcgctggtggcaatggcaatgtcctaaaagagctgagtgacccagctggagccatcatttacaccagccgcttccagcttggggacccaaccctgaatgccctggaaatctggggggctgagtaccaggaatcaaatgctcttctgctgaggtcccccaaccgggacttcctgactcatgtcagtgcccgtgaacgttgcccggcttgcttcgtgggcaccatcactggagaccggagaatagtgctggtggacgatcgggagtgtcctgtcagaagaaatggccagggggatgcccccccgacacccccgccaacccctgtggacctggagctcgaatgggtgctgggcaagatgcctcggaaggagttcttcctgcagaggaagccccccatgctgcagcctctggccttgcccccagggctgagcgtgcaccaggctctggagagggttctgaggctgcccgccgtggccagcaagcgctacctcaccaataaggtggaccgctccgtgggaggcctggtggcccagcagcagtgcgtggggcccctgcaaactcctctggcagatgtagcggttgtggcactgagccatgaggagctcataggggctgccacagccttgggagaacagccagtcaagagcctgctggacccaaaagtcgccgcccggctggccgtggccgaagccctcaccaacctggtgtttgctctggtcactgacctccgggatgtgaagtgtagcgggaactggatgtgggcagccaagctcccaggggagggcgcagctttggcggatgcctgtgaggctatggtggcagtgatggcagccctgggtgtggcagtggatggtggcaaggactccctcagcatggctgctcgggttggcactgagaccgtgcgggctcctgggtcactggtcatctcagcctatgccgtctgcccagacatcacagccactgtgaccccagacctcaagcatcctgaagggagaggccatctgctctatgtggctctgagccctgggcagcaccggctcgggggcacagctctggcccagtgcttctcccagcttggggaacaccctccagacctggaccttcctgagaacttggtgcgggccttcagcatcactcaggggctgctgaaagaccgcctcctctgctcaggccacgatgtcagtgacggaggcctcgtcacatgcctgctggagatggcctttgctggaaattgcgggctacaggtggatgtgcctgtccccagggttgatgtcctgtctgtgctgttcgctgaggagccaggcctcgtgctggaggtgcaggagccagacctggcccaggtgctgaagcgttaccgggatgctggcctccattgcctggagctgggccacacaggcgaggccgggccccacgccatggtccgggtgtcagtgaacggggctgtggttctggaggagcctgttggggagctgcgagccctctgggaggagacgagtttccagctggaccggctacaggcagagcctcgctgtgtggcagaggaggaacggggcctgagggagcggatggggcccagctattgcctgccccccacctttcccaaagcctccgtgccccgtgagcctggtggtcccagcccccgagtcgccatcttgcgagaggagggcagtaatggagaccgggagatggccgatgccttccacttagctgggtttgaggtatgggacgtgaccatgcaggacctctgctctggggcaattgggctggacactttccgtggcgtggccttcgtgggcggcttcagctatgcagatgtcctgggctctgccaaagggtgggcagctgctgtgacctttcatcccagggctggggctgagctgaggcgcttccggaagcggccagacaccttcagcctgggcgtgtgtaatggctgtcaactgctggctctgctcggctgggtgggaggcgaccccaatgaggatgctgcagagatgggccctgactcccagccagcccggccaggccttctgctacgccacaacctgtctgggcgctacgagtctcgctgggccagcgtgcgtgtggggcctgggccagccctgatgctgcgagggatggagggcgccgtgctgcccgtgtggagtgcgcacggggaaggttacgtagcattttcttctccggaactccaagctcagattgaggccaggggcttggctccactgcactgggctgatgatgacgggaaccccacagagcagtaccctctgaatcccaatgggtccccagggggcgtggctggcatctgctcctgtgatggccgccacctggctgtcatgcctcaccctgagcgggccgttaggccttggcagtgggcatggcgaccccctccatttgatactctgaccacctccccctggctccagctctctatcaatgcccgaaactggaccctggaagggagctgctgactggccacaggggctcacctgggccccatggcttttcacctaagtgggtcctgccccctcccccatgaccttcaggagcaccccatattatttccaaaaatatcttggacagacaaggaccaaaatgccaaaatctcagcggactcgatgatctgcctgctgatgttccttctgtggctgtgtctattttcagttctgctctaacatggcatgccctttctcagcccaggaaacagcatgtggttcagagaaaagagcgacaaggaaaagttaggactcctgaggtccgaacaggggcttctgttgcccacttcacaacacccagtgatcaccggtgtgcaattgcctccttggctctgagggatgttttgcgctcccttttctcatcattggggttagcgggtgcagacaaattcagcaatagtatgcagatcagcccctcaccacctcattgttctcatctggaactgaaactttctggatttctcttgaagtgctacactgcactgaatgtaaggaattgttgcttgtggaagtttctcagcgtttctggctgtcttagggctggcctcagaacccagcattcctgttatttgcttctaaattagcagctctctttttttttttttttttgaggcagtctcactctgtcacccaggctggagtgcagtggcgtgatctcggcccactgcaacctctgcctcctgggttcaagcaattttcctgcctcagcctcccgagtagctgggagtacaggcacacaccaccacacccagctaatttttgtatttttagtagagatagggtttcaccgtgtctcccaggctggtctcaaactcctaacctcaagtgattcgcctgcctcggcctcccaaagtgctgggattacaggtgggagccactacagctggcccagcagctctgtttctgatagaggtggttggggctctcatccctagatcctaaccctttagtatgctggaattctactcttcacttactgcattgactgttgttgattagttattattgcaaagcactgccaccggcctcagggagtttatgtgtaatagaattaaaaataatagctgtgtataacacttagctcaagccacgcatgtgtgaggcatttggtatgtatctgaattaattctcactaaaattcagcaaaggacttgatagcctctccccgccttttcaataaaggatgaatgaaggttg

SEQ ID NO: 2084 - DNA, 416 bp, Homo sapiens
caatgggatttacagcaacattttccattgctgaagtgaggtagcagctctcttctgtcagctgaatgttaaggatggggaaaaagaatgcctttaagtttgctcttaatcgtatggaagcttgagctatgtgttggaagtgccctggttttaatccatacacaaagacggtacataatcctacaggtttaaatgtacataaaaatatagtttggaattctttgctctactgtttacattgcagattgctataatttcaaggagtgagattataaataaaatgatgcactttaggatgtttcctatttttgaaatctgaacatgaatcattcacatgaccaaaattgtgtttttttaaaaatacatgtctagtctgtccttaatagctctcttaaataagctatgatattaatcag

SEQ ID NO: 2085 - DNA, 212 bp, Homo sapiens
cggggttgacggctttttggtaggagtgggctggaccggacgccagagacaaaggctcccaaggcaagagggactgtggccctgcgtcggctctgctcgggactgctgaccccaggaatttacggcccttcgtttttctcttctgattcttctcttccgccgccattttaaatccagctccatacaacgctccgccgccgttgctgccgcga

SEQ ID NO: 2086 - DNA, 445 bp, Homo sapiens
  misc_feature (1)..(445): n=a,t,g or c
ttttactgcacaattcacaagcatgttttcctggtgaattggactgaaaattacattttgacaactttttttccttttatccccaacttttgccagaaagcagaaaaatgctctatttttataaagaaagattaaattctccaatgatattttaaaaaatatcaacctacatgcactttagaatgtaaaataacaatgactattttaaactcgaagacccactattttgagtattttttatagactttaaatactgggtttttttcctccttcaatctcagggcttttctccatcttttaaggcagcctctgtaactcccttttgtccataggtgttgcgtgcctctgcatctgtgggggaagtattatttaaataaaatttatgttacagggataactttattttaanggggcnggggcttgtctatacacaagggtatgtatg

SEQ ID NO: 2087 - DNA, 426 bp, Homo sapiens
  misc_feature (1)..(426): n=a,t,g or c
gctgacccaccttgtagtagcgggcagtgtcagggacggggccaaactcctgagtgacggcattncgcacggagttggccttgccgttttcaatgttgatggcaccaatgagcaggttgttggagatgttatccaagtgcccacggaacttgagccaggggccagcagctgagatgtggtcagtggtacacttccctttgaccttgggtggtaagtagagagnacagaggtcagggcatggcctggnangggtggatgacaagccctccagaggcaggcagcaggncccggggccagggaggggtgacagaggggtgagaggcaggcaagtttttcatcacgtgttctgtggtcctgggtgctttccaccctaaagggccacatngggcttcaggccagggctttcattcccttnaaaggcctctg

SEQ ID NO: 2088 - DNA, 449 bp, Homo sapiens
  misc_feature (1)..(449): n=a,t,g or c
gagaatgagtcacacaaactgttcagtgttgcaggaaccttttcttgggggtgggggagtttcccttttctaaaaatgcaatgcactaaaactattttaagaatgtagttaattctgcttattcataaagtgggcatcctctgttttaggtgtaatatcgaagtcctggcttttctcgttttctcacttgctctcttgttctctgtttttttaaaccaattttactttatgaatatattcatgacatttgtaataaatgtcttgagaaagaatttgtttcatggcttcatggtcatcactcaagctcccgtaaggatattaccgtctcaggaaaggatcaggactccatgtcacagtcctgccatcttactttcctcttgtcggagttctggagtgggaaatnaactggcattatgggccgctttaaccncaggncattcaaaagaaac

SEQ ID NO: 2089 - DNA, 433 bp, Homo sapiens
  misc_feature (1)..(433): n=a,t,g or c
tcgatgcccttatttgtgagttaaagagaaaatatcataaatggtatactcttaagtatagaggttttgtatctagaggatctcagttcaactcctgtctctccatataccagcagtgtaactgtgaataacatacttaaatggctgtgcttatttccttttcttttcttttttctttttttttttttttgagatgaagttttgctcttgttccccaggnctggagtgcaatggcacgatctcggttcactgcaacctccacctctcagattcaaggcaattctcctgcctcagcctcccaagtaggctggggattacaggtgcccaccaccacccnggggctaaaatttgtatttttcagtaggagacgggggtttnccccatgttnggttagggctcgttntaggaacctctggaccccaggtgantccca

SEQ ID NO: 2090 - DNA, 3705 bp, Homo sapiens
ggaattcccggccgggcgcacccgcggggccctgggctcgctggcttgcgcgcagctgagcggggtgtaggttggaagggccagggcccctggggcgcaagtgggggccggcgccatggaacccccgaccgtcccctcggaaaggagcctgtctctgtcactgcccgggccccgggagggccaggccaccctgaagcctcccccgcagcacctgtggcggcagcctcggacccccatccgtatccagcagcgcggctactccgacagcgcggagcgcgccgagcgggagcggcagccgcaccggcccatagagcgcgccgatgccatggacaccagcgaccggcccggcctgcgcacgacccgcatgtcctggccctcgtccttccatggcactggcaccggcagcggcggcgcgggcggaggcagcagcaggcgcttcgaggcagagaatgggccgacaccatctcctggccgcagccccctggactcgcaggcgagcccaggactcgtgctgcacgccggggcggccaccagccagcgccgggagtccttcctgtaccgctcagacagcgactatgacatgtcacccaagaccatgtcccggaactcatcggtcaccagcgaggcgcacgctgaagacctcatcgtaacaccatttgctcaggtgctggccagcctccggagcgtccgtagcaacttctcactcctgaccaatgtgcccgttcccagtaacaagcggtccccgctgggcggccccacccctgtctgcaaggccacgctgtcagaagaaacgtgtcagcagttggcccgggagactctggaggagctggactggtgtctggagcagctggagaccatgcagacctatcgctctgtcagcgagatggcctcgcacaagttcaaaaggatgttgaaccgtgagctcacacacctgtcagaaatgagcaggtccggaaaccaggtctcagagtacatttccacaacattcctggacaaacagaatgaagtggagatcccatcacccacgatgaaggaacgagaaaaacagcaagcgccgcgaccaagaccctcccagccgcccccgccccctgtaccacacttacagcccatgtcccaaatcacagggttgaaaaagttgatgcatagtaacagcctgaacaactctaacattccccgatttggggtgaagaccgatcaagaagagctcctggcccaagaactggagaacctgaacaagtggggcctgaacatcttttgcgtgtcggattacgctggaggccgctcactcacctgcatcatgtacatgatattccaggagcgggacctgctgaagaaattccgcatcccggtggacacgatggtgacatacatgctgacgctggaggatcactaccacgctgacgtggcctaccataacagcctgcacgcagctgacgtgctgcagtccacccacgtactgctggccacgcctgcactagatgcagtgttcacggacctggagattctcgccgccctcttcgcggctgccatccacgatgtggatcaccctggggtctccaaccagttcctcatcaacaccaattcggagctggcgctcatgtacaacgatgagtcggtgctcgagaatcaccacctggccgtgggcttcaagctgctgcaggaggacaactgcgacatcttccagaacctcagcaagcgccagcggcagagcctacgcaagatggtcatcgacatggtgctggccacggacatgtccaagcacatgaccctcctggctgacctgaagaccatggtggagaccaagaaagtgaccagctcaggggtcctcctgctagataactactccgaccgcatccaggtcctccggaacatggtgcactgtgccgacctcagcaaccccaccaagccgctggagctgtaccgccagtggacagaccgcatcatggccgagttcttccagcagggtgaccgagagcgcgagcgtggcatggaaatcagccccatgtgtgacaagcacactgcctccgtggagaagtctcaggtgggttttattgactacattgtgcacccattgtgggagacctgggcggaccttgtccacccagatgcccaggagatcttggacactttggaggacaaccgggactggtactacagcgccatccggcagagcccatctccgccacccgaggaggagtcaagggggccaggccacccacccctgcctgacaagttccagtttgagctgacgctggaggaggaagaggaggaagaaatatcaatggcccagataccgtgcacagcccaagaggcattgactgcgcagggattgtcaggagtcgaggaagctctggatgcaaccatagcctgggaggcatccccggcccaggagtcgttggaagttatggcacaggaagcatccctggaggccgagctggaggcagtgtatttgacacagcaggcacagtccacaggcagtgcacctgtggctccggatgagttctcgtcccgggaggaattcgtggttgctgtaagccacagcagcccctctgccctggctcttcaaagcccccttctccctgcttggaggaccctgtctgtttcagagcatgccccgggcctcccgggcctcccctccacggcggccgaggtggaggcccaacgagagcaccaggctgccaagagggcttgcagtgcctgcgcagggacatttggggaggacacatccgcactcccagctcctggtggcggggggtcaggtggagaccctacctgatccccagacctctgtccctgttcccctccactcctcccctcactcccctgctcccccgaccacctcctcctctgcctcaaagactcttgtcctcttgtccctcctgagaaaaaagaaaacgaaaagtggggtttttttctgttttctttttttcccctttccccctgcccccacccacggggcctttttttggaggtgggggctggggaatgaggggctgaggtcccggaaggattttatttttttgaattttaattgtaacatttttagaaaaagaacaaaaaaagaaaaaaaaaagaaagaaacacagcaactgtagatgctcctgttcctggttcccgctttccacttccaaatccctcccctcaccttcccccactgccccccaagttccaggctcagtcttccagccgcctggggagtctctacctgggcccaagcaggtgtggggcctccttctgggcttttcttctgaatttagaggatttctagaacgtggtcaggaatagccattctaggcggggctggggccagggtggggggcagtcactgtgggaggtcccagctccagcccccctctggtttgctgcctcctctcccctctaaaaaagtcttccgcttgattttgcacaatcccggcgatactcctggcgatactgactagaagtcagggagctgggggagctgttcactttaggatacggggggatggaagggagcgttcacaccgccagcctcgggcctgggatttgaggagggccctagacctcctccactctccatcccctttcccttccactttgggttcactttgaattttctccgttttttggggcagtggctctgatccactcacccccccgccccgtaagttatagccactgtggaaagtagtatgaaagttcctcaagaaactaaaaatggaattc

SEQ ID NO: 2091 - DNA, 383 bp, Homo sapiens; identical to SEQ ID NO: 1683
  misc_feature (1)..(383): n=a,t,g or c

SEQ ID NO: 2092 - DNA, 375 bp, Homo sapiens; identical to SEQ ID NO: 1684
  misc_feature (1)..(375): n=a,t,g or c

SEQ ID NO: 2093 - DNA, 339 bp, Homo sapiens
  misc_feature (1)..(339): n=a,t,g or c
tatttaaagggatagttgattcctggggtgttttgaaattaagttggaattaagttgcttaagcatatttatgttgtgagaaacccttaatatgaggtttatcatgccatttttcaagcagatttatgagcagatttctgtcacataagtcgtcttctgcttgagtatcctaatatttcaatgcatcaggggagcgctccactggataagcattttatttcccgcatggcataatgtttttgcacctaaaaggctcaaagtgtgagaacctggttcctggatttgtttgaaattntttcaccaataaaagatcataaatnaaatggtttctttcangaa

SEQ ID NO: 2094 - DNA, 222 bp, Homo sapiens; identical to SEQ ID NO: 1685

SEQ ID NO: 2095 - DNA, 359 bp, Homo sapiens
  misc_feature (1)..(359): n=a,t,g or c
nggcttcaacaaacaggccccttctttccataccaccacagtcacctgaccaaataaacggagaaagcttccagaacgtgagcaaaaatgctagttctgcagcgaatgcccaacctcataaactgtctgaaaccccagggcactaaagcagagtttcatccctgtctttaaactgggggtatgtccactctaggcaagtaaaaaaactactgttacacgttccagtaactctgtcaatattttcttgtatcaggaattgttattatggcagcctttcatttggggctgggttttcatcatttttgcactgtggaantggcttttacagtggcattacttacaggccaggaaggaacata

SEQ ID NO: 2096 - DNA, 403 bp, Homo sapiens; identical to SEQ ID NO: 1687
  misc_feature (1)..(403): n=a,t,g or c

SEQ ID NO: 2097 - DNA, 415 bp, Homo sapiens
  misc_feature (1)..(415): n=a,t,g or c
atatgctttcactgtttgtgcaatatgcatttatttcttatatgaatgctttaaagtcatttgaggttagatcttttaattcctattttctgcttcattggtcactttttttttattgtagtataagatgttagattctgtaatcttcacattcattttagcaggtactgagtgatgctgtatatacaaataagtgtattgttttgatttttagaccaccacatgggcatgcttgactatttcttatttcaaatgtctgctaatgcagagtaggctactccatgatagtgttaaaaaacaaaatttgctaacaatgtgatataaagactttaaaagttacacattatgtgggagccctatctttacaaaagtttccnactgttaaggtgcnttttatttttccggtttcacntgg

SEQ ID NO: 2098 - DNA, 511 bp, Homo sapiens; identical to SEQ ID NO: 1689
  misc_feature (1)..(511): n=a,t,g or c

SEQ ID NO: 2099 - DNA, 401 bp, Homo sapiens
  misc_feature (1)..(401): n=a,t,g or c
taagggtggactagtaataaaatataatattcttgctgcttatgcantggacattgttgccctccctaaagcaaccaagtagcctttatttcccacagtgaaagaaaacgctggcctatcagttacattacaaaaggcagatttcaagaggattgagtaagtagttggatggctttcataaaaacaagaattcaagaagaggattcatgctttaagaaacatttgttatacattcctcacaaattatacctggggataaaaactatgtaggcagggcagtgtgttttccttccatgtctctctggcactacctgncagtgtgttcctctggagggctggcaagtctgttcctattctgaatttcccaggcaggaaggcactaaggaaggttcccaacctnt

SEQ ID NO: 2100 - DNA, 1346 bp, Homo sapiens
  misc_feature (1)..(1346): n=a,t,g or c
cagacaatgaggatgaagatgaagatgtcaaagctgaaagactaaaggtcaaagagctgatgggttgccagtgttgtgaggagaaaccatccattatggtcagcaatttgcataaagaatatgatgacaagaaagattttcttctttcaagaaaagtaaagagagtggcaactaaatacatctctttctgtgtgaaaaaaggagagatcttaggactattgggtccaaatggtgctggcaaaagcacaattattaatattctggttagtgatattgaaccagcttcaggccaggtatttttaggagattattcttcagagacaagtgaagatgatgattcactgaagtgtatgggttactgtcctcagataaaccctttgtggccagatactacattgcaggaacattttgaaatttatggagctgtcaaaggaatgagtgcaagtgacatgaaagaagtcataagtcgaataacacatgcacttgatttaaaagaacatcttcagaagactgtaaagaaactacctgcnaggaatcaaacgaaagtgtgttttgctctaagtatgctagggaatcctcagattactttgctagatgaaccatctacaggtctggatcccaaatgccaaacatgcacatgtggcatgcaattcgaactgcatnnaagcgggctgctattctgaccactcactatatggaggaggcagaggctgtctgtgatcgagtagctatcatggtgtctgggcagttaagatgtatcggaacagtacaacatctaaagagtaaatttggaaaagnactttttggaaattaaattgaacggactggatagaaaacctagaagctagaccgccttcaaagagaaattcagtatattttcccaaatgcaagccgtcagaaagtttttcttctattttggcttctaaaattaataaggaagatgttcagtccctttcccaatctttttttaagctggaagaagctaaacatgctttgccattgaagaatatagctttctcaagcaacattggaacaggtttttgtagaactcactaaagaacaagaggaggaagataatagttgtggaactttaaacagcacactttggtggaacgaacacaagaagatagagtagtattttgaatttgtattgttcggtctgcttactgggacttctttctttttcacttaattttaactttggtttaaaaagttttttattggaatggtaactggagaaccaagaacgcacttgaaatttttctaagctccttaattgaaatgctgtggttgtgtgttttgcttttctttaaataaaacgtatgtataattaagtgaaaaaaaaa

SEQ ID NO: 2101 - DNA, 3282 bp, Homo sapiens
gggacagggctgaggatgaggagaaccctggggacccagaagaccgtgccttgcccggaagtcctgcctgtaggcctgaaggacttgccctaacagagcctcaacaactacctggtgattcctacttcagccccttggtgtgagcagcttctcaacatgaactacagcctccacttggccttcgtgtgtctgagtctcttcactgagaggatgtgcatccaggggagtcagttcaacgtcgaggtcggcagaagtgacaagctttccctgcctggctttgagaacctcacagcaggatataacaaatttctcaggcccaattttggtggagaacccgtacagatagcgctgactctggacattgcaagtatctctagcatttcagagagtaacatggactacacagccaccatatacctccgacagcgctggatggaccagcggctggtgtttgaaggcaacaagagcttcactctggatgcccgcctcgtggagttcctctgggtgccagatacttacattgtggagtccaagaagtccttcctccatgaagtcactgtgggaaacaggctcatccgcctcttctccaatggcacggtcctgtatgccctcagaatcacgacaactgttgcatgtaacatggatctgtctaaataccccatggacacacagacatgcaagttgcagctggaaagctggggctatgatggaaatgatgtggagttcacctggctgagagggaacgactctgtgcgtggactggaacacctgcggcttgctcagtacaccatagagcggtatttcaccttagtcaccagatcgcagcaggagacaggaaattacactagattggtcttacagtttgagcttcggaggaatgttctgtatttcattttggaaacctacgttccttccactttcctggtggtgttgtcctgggtttcattttggatctctctcgattcagtccctgcaagaacctgcattggagtgacgaccgtgttatcaatgaccacactgatgatcgggtcccgcacttctcttcccaacaccaactgcttcatcaaggccatcgatgtgtacctggggatctgctttagctttgtgtttggggccttgctagaatatgcagttgctcactacagttccttacagcagatggcagccaaagatagggggacaacaaaggaagtagaagaagtcagtattactaatatcatcaacagctccatctccagctttaaacggaagatcagctttgccagcattgaaatttccagcgacaacgttgactacagtgacttgacaatgaaaaccagcgacaagttcaagtttgtcttccgagaaaagatgggcaggattgttgattatttcacaattcaaaaccccagtaatgttgatcactattccaaactactgtttcctttgatttttatgctagccaatgtattttactgggcatactacatgtatttttgagtcaatgttaaatttcttgcatgccataggtcttcaacaggacaagataatgatgtaaatggtattttaggccaagtgtgcacccacatccaatggtgctacaagtgactgaaataatatttgagtctttctgctcaaagaatgaagctccaaccattgttctaagctgtgtagaagtcctagcattataggatcttgtaatagaaacatcagtccattcctctttcatcttaatcaaggacattcccatggagcccaagattacaaatgtactcagggctgtttattcggtggctccctggtttgcatttacctcatataaagaatgggaaggagaccattgggtaaccctcaagtgtcagaagttgtttctaaagtaactatacatgttttttactaaatctctgcagtgcttataaaatacattgttgcctatttagggagtaacattttctagtttttgtttctggttaaaatgaaatatgggcttatgtcaattcattggaagtcaatgcactaactcaataccaagatgagtttttaaataatgaatattatttaataccacaacagaattatccccaatttccaataagtcctatcattgaaaattcaaatataagtgaagaaaaaattagtagatcaacaatctaaacaaatccctcggttctaagatacaatggattccccatactggaaggactctgaggctttattcccccactatgcatatcttatcattttattattatacacacatccatcctaaactatactaaagcccttttcccatgcatggatggaaatggaagatttttttgtaacttgttctagaagtcttaatatgggctgttgccatgaaggcttgcagaattgagtccattttctagctgcctttattcacatagtgatggggtactaaaagtactgggttgactcagagagtcgctgtcattctgtcattgctgctactctaacactgagcaacactctcccagtggcagatcccctgtatcattccaagaggagcattcatccctttgctctaatgatcaggaatgatgcttattagaaaacaaactgcttgacccaggaacaagtggcttagcttaagtaaacttggctttgctcagatccctgatccttccagctggtctgctctgagtggcttatcccgcatgagcaggagcgtgctggccctgagtactgaactttctgagtaacaatgagacacgttacagaacctatgttcaggttgcgggtgagctgccctctccaaatccagccagagatgcacattcctcggccagtctcagccaacagtaccaaaagtgatttttgagtgtgccagggtaaaggcttccagttcagcctcagttattttagacaatctcgccatctttaatttcttagcttcctgttctaataaatgcacggctttacctttcctgtcagaaataaaccaaggctctaaaagatgatttcccttctgtaactccctagagccacaggttctcattccttttcccattatacttctcacaattcagtttctatgagtttgatcacctgatttttttaacaaaatatttctaacgggaatgggtgggagtgctggtgaaaagagatgaaatgtggttgtatgagccaatcatatttgtgattttttaaaaaaagtttaaaaggaaatatctgttctgaaaccccacttaagcattgtttttatataaaaacaatgataaagatgtgaactgtgaaataaatataccatattagctacccaccaaaaaaaaaaaaaaaaaa

SEQ ID NO: 2102 - DNA, 563 bp, Homo sapiens; identical to SEQ ID NO: 1693
  misc_feature (1)..(563): n=a,t,g or c

SEQ ID NO: 2103 - DNA, 744 bp, Homo sapiens
  misc_feature (1)..(744): n=a,t,g or c
ttnnntactccggngatgaagacagagcagtacaggtgaccaagaaaaaaaagaagaaacaacacaagattccaacaaatgacgaattactgtntgatcctgaaaaagataacagagatcaggcctgggttgatgcacagagaaggggttaccatggtttgggaccacagagatcacgtcaacaacagcctgttccaaatagtgatgctgtcttganttgtcctgcctgcatgaccacactttgccttgattgccaaaggcatgantcatacaaaactcaatatagagcaatgtttgtaatgaattgttctattaacaaagaggaggttctaagatataaagcctcagagaacaggaagaaaaggcgggtcccataagaagatgaggtcttaacccgggaagatgctgccgagaaggcagagacagattgtggaagaaatcttatcacccagtcatgtgcactgattgtcccctgaaggtggnagcttcgacaaggtgattcatgtncgtgtncnnnnnnnnnnnnnnnnnnnnnnnnnncccgnnnntcnnnnnnnnnnnnnnnnnnnnnnnnnnnnnnnnnnnnnnnnnnnnnncnnnnncnnnnnnncnnncnnnnnnnnnncnnnnnnnnnnncnnnnnnnnnncnnnnnnnnnnnnnnnnnnnncnnnnnnnnnnnnnnnnnnnnnnnnnnnnnnnnnnnnnnnnnnnnnnnnnnnnnnnncnnnnnncnnncnnnnct

SEQ ID NO: 2104 - DNA, 773 bp, Homo sapiens
  misc_feature (1)..(773): n=a,t,g or c
cnnnnnttcntgtnntcngaagagagtgacaagaatggagtaacacatgaactagcactctcctcatgtgacagagagtacatctgacccacatggtggcaggacacaggggaagggctctcagagctggtgccaagtgtccaccaaagaaagtcccattcaccagagacaggctgtttccttggactccaccatctctgttacagctaccagccaggtctccatgatcttcctggaatccttcatgccagcatcagttcatgctctctgagcttgtcactcccgactctttcaagacccaggtcaactgncccatggntcacccacccaggncgnctccggagtcctgcagnacatctctttgggtatgctgctgccctgctgccctcaagggnatngttgtgggtagggggagaacatcaacatcacattaccannggaancagaggggtacattagtanncganantgggcatggcggacaacccanaggacacatgntcctccccaantnntnctaatccncaagngtgggttcaanttggnttancaggtnantggtaaannggttnnccngnnnnttgncaannnnnnnnnnnnnnntnncannnnnnnnnnnnnnnnnnnnnnnnnnnnnnnnnnntnnntnncnnnnnnnnnnnnnnnnnnnnnnnnnnnnnnnnnnnnnnnnnnnnnnnnnnnnnnnnnnnnnnnnnnnnnnnnnnnnnnnnnnnnnnnnnnnnnnnnnnnnnnnnnnnnnnnnnnnnnnnnng

SEQ ID NO: 2105 - DNA, 2191 bp, Homo sapiens; identical to SEQ ID NO: 828

SEQ ID NO: 2106 - DNA, 265 bp, Homo sapiens; identical to SEQ ID NO: 1697

SEQ ID NO: 2107 - DNA, 403 bp, Homo sapiens
ttttttttttcaaagaaacactagcaatttattgattttctctatttccaaaaaaagcaaatacattagtgtatcacacaaggaaactgggcctggccggcacaaggttcctctacaaacatgaagcaaggggaaggtgggctacagggaagctccaagatccctcacagcagcccccggttcccttccctgcccaccccagccgcagtcttggtcctgccagccagttcagccagattccaaggtggacatgcagacagcaacactgcctcttgggtccccaggaggagtgtggagtcagggctgctagtgtggtccccactgcagaggtggctggtggccaatgactggatttgtcattggccgctagcacaggagatcccagggcagagtctgtgtcctt

SEQ ID NO: 2108 - DNA, 491 bp, Homo sapiens; identical to SEQ ID NO: 1698
  misc_feature (1)..(491): n=a,t,g or c

SEQ ID NO: 2109 - DNA, 516 bp, Homo sapiens; identical to SEQ ID NO: 1700

SEQ ID NO: 2110 - DNA, 233 bp, Homo sapiens; identical to SEQ ID NO: 1702

SEQ ID NO: 2111 - DNA, 297 bp, Homo sapiens
ttttttttttttttttttttttggttgttgcacctactttaatgacaacttcaaaaaaggaacaacatccatccacttcttaatgtctttatgaacacagaggctagagtccccagccagcttctgaggcagccctgcacatcctgcaggtggccacactcaacccatgccacaccgtttgcttaaagctacaagtcctagagctgaagaactggcaagccagtgcgtgaagcttatcgacagcgcttccaggcacacgagcaaagctgcgcagatacaggggaggttccttggggc

SEQ ID NO: 2112 - DNA, 563 bp, Homo sapiens
  misc_feature (1)..(563): n=a,t,g or c
ttaatcaactctgctgttgttgctgcttcttagcaaaactggtaaaaacaaaattgtaatcattgaacatagcactctggcaatcaagacgcttaaaaccttcaatcttctggggcgacaagcactgtgcgacatttagaactctgattaacaaacaaggtggtcacaaattttcctggcttgaagacttctacaactttcctgatcaggtcatcataggaggtctgacttaagtttgtttcaaagctaacataagaaaattctggttctggagtgatgtgaataagtccaataagttccatcccgatttcattccattcatccgaatacccacaaggattgaacattgtggcatcaatgacagaacctggtatcaggtcacgaattccactctcacgagtgacatcccttgcagtaacaccatctttcatgtagaactggtccataactgctgggtcaagctcactcatcagaatttcccagggttgatctggctgactgattaccccnctcctctgggnaatccaggnatataagtaccacagtcaggattcctacgtccc

SEQ ID NO: 2113 - DNA, 446 bp, Homo sapiens
tttttacacaaagaaaaagattttattgtcttcttagtcaatatccctggtgaaattagaggcatagcttgagactggtgacagtgcaacacagaccttcaggagctgctttgaggactggcctgcccagatgcctgctgttaagccagcagccccctcactccggcccctgccatcttgacagatggagctgccatggtttcagggacactcagcagggcatctgggttggtccctcccacatggaccttgtaaagttgctattcaggggaacctggtatcgtttcaggcaaaacacagaaccatattagcacttctaagccccctgccccggccgcctccccggaacatttgggcttgtcgcacattccaggagggagcaggagcacagctgcagccacagctgccaggaacaggcctgggctcccgcctgtgtggggggaagg

SEQ ID NO: 2114 - DNA, 273 bp, Homo sapiens
cacaaacaaagatggtttaatagatttcagcatgtttccacttgacaatgttatacgaaaatagaatctttattaaaatagcaaggcataacaatcactgctactcaggaaacactgtgtttattctttttaatcatcaaaatcaatgactttgggcaagacctgtgaaatctcagagcctgtttctccatctggagaacaggcaggtagggcattgccagctccctgtgagtgggggccactggtgggaggagatggccctggtcgcccatg

SEQ ID NO: 2115 - DNA, 496 bp, Homo sapiens
tagttattaaaatacatttaatgcttggtattgtgaacatgcagacgaaagaaaataagattacaaaatgaaataagagctagaattaaaagccgatgtataggaaatgttctcaactgtgcaagtgattaacagccagatgttcccctacgattccaaacatgagtccccagtgccaagttccagccccaactctgctggagtctcagagaaaatgtatagtaacaaaagcagccaagacttgtgtggcgtccgtcttatttcttcttgagtttttgtcccgtggatgtgaatcactaagaacacatgcattcctcaagttttaagaagataaataaggtggaaaaaaataaatcttagggatttgcttcaattcttatttaagcttcatggaatgcaaacataggaggctaaagcagaaataagtattgcttcagtgatcatgagtccagccagcttagtaaacaaaacaggggttaccttcctaaccttctaa

SEQ ID NO: 2116 - DNA, 245 bp, Homo sapiens
tttttcaaattagaattcttttaatataaaaaaaagtactaaaatacccacgtggttctgctgtgttatttgccctaaaggaagtgaggggcagagtgaagaatcccagtgcagctcagtgggcccagaaatggcgtttccggtaggctaaggcgtgcccactccacctccaccagacttctatcccctctgctgttcccagcccccaattcctgcagcaggaaaccccagtggtctggctttgg

SEQ ID NO: 2117 - DNA, 388 bp, Homo sapiens
tgggggtaggctctttattagacggttattgctgtactacagggtcagagtgcagtgtaagcagtgtcagaggcccgcgttcagcccaagaatgtgggatttctctccctattgatcacagtgggtgggtttcttcagaaaagccccagaggcagggaccagtgagctccaaggttagaagttggactggaaggcttcagtcacatgctgctttcaagctttcaggctgggcaacaaggaggagatgcccatgacgtgccagggtctccccatctgacaccagtgaagtctggtaagacagcagccgcacgcctgcctctgccaggagggcaatcatggtaggcagcattgcagggtcagaggtctgagtccggaataggagcaaggg

SEQ ID NO: 2118 - DNA, 384 bp, Homo sapiens; identical to SEQ ID NO: 1706

SEQ ID NO: 2119 - DNA, 382 bp, Homo sapiens
ttgaaaataacaaaaaaaccaaactttacttgcatttagccattaataaataatttacagtatgtacacgcggtgacactccacacaggtcgcagaacggtggacgcagtgaggggtccccacttccaagcagaacgtgagcaaacacaaccaaaataaagtgcttcactttttacttccaacatagggaccaactaaaaccagcagggagagggaggggccgggccgagtcgccctcccacccgcccacacacggttctggcagagggagcaggacctcttggagggagggggagacacacgttctgcagcctcctggccagtgtatgagaggtccctggggaacagcagaggggctgccgatgggtgggtagggtgtgga

SEQ ID NO: 2120 - DNA, 478 bp, Homo sapiens; identical to SEQ ID NO: 1708

SEQ ID NO: 2121 - DNA, 469 bp, Homo sapiens
agtattatcatttattgagtagctacactgtggccagaactaagctttacatgttttatatcacttatttatctcaacaatcttgaaagggtggtattattttccccgtcttataggtgaagactctgaggttcagaaagttaaagtgatatcgccagggttcctgactggtaagtgatggaggctgaatttgagccagatctatatgctccatcatcactctcctggggaaaagagcctagatgtgttctatctgcattcctgcttagattctgcatgacttctcctgtccatccccttggccccctctcctctagtccatgagattacagctttgcacactgacaggagggtccttccttcttagcctacacatacaaccaggtgtcaaaggatggaagggttcatctcacacactcacagaccatgtagactattcaatctacacctccagctcgaactcagaaca

SEQ ID NO: 2122 - DNA, 363 bp, Homo sapiens
taatatttgaagaaatttattgagtcaaatatgagtgaccatgccccatgacacagccctcagaaggtcctgaggacatgtggcaaaggtgttcttcaaagtgttcattattaaggcatccatctcccataacttcaatgcactttgctaaacaatgcattatttctgaggacatctgaatctgtttctgtaccaatggtcttaatcagaacatcacataaattgccacatctgtgtgagatactcaggaccacggactctcacacactccagaagaaaaggcacggattctgctgctgcccctccaacaccattgtggaaataaaatttcagtaaagggaccaccagtttgacaacctgctt

SEQ ID NO: 2123 - DNA, 120 bp, Homo sapiens
ttttttttttttttttttttttttttttttttttttttttgcaggaagactatgtctagagcgaaggctacacagaccccacgatgggggagtggggcctgaggtgggagaggcctggag

SEQ ID NO: 2124 - DNA, 586 bp, Homo sapiens
tttttcctgttttgaaagtgttttaattagacaaaagcatcaggacaaaccattttaaaaacaaagtcttcaacttgggtgttgagattggcaaaaggggaagcaagggaaaagccaaggaaagataaaatattcagaagaaagtcaaagttatctgcaattacatgttagaacagattttgcaggttaaaaagatgttgcttaaatatattcataagcctgttgtaagattttcacttatgcagtttcagaaaatttagctgcttaacatatgacagaactgtattttaacaaatgacattaaaagtcaggagagctactcagttaattgataaagtagaggcaacgtgggggagccctccccacgtttattgaagatttgtggctcccccagccccgtttgcctgcatcaggctaacaacctcattcctcccatagagcctggccaaatcacaggcggtggtccccttatggttccgatgccccacattgctggccgtgtgcttcaccagggactccaccaccgggaggtgggccttctttgggcagccaagtgcaagggcaggttcccttcattatcctcgat

SEQ ID NO: 2125 - DNA, 451 bp, Homo sapiens
ttttttcacgtgtaagatttttattcaaatttgatttacattccaaaagaaattataaaatgtattcacttgtttataaaaaaaatttgtggggggacaaaactttaattcaaattataaaacatgataaattttcagattaaaattgggcaagttgcttggagtaacaagtttttaaatcaccattttccacctccacaccaaggataaccttctaattaatgatcagccatgttgtaataggatagcactgagacttgaggaaacagaaaaactgaagagctcttccaagccccgaccaggaacatttttatgccttctcatagtggcgaacagcaaccacatcaccaaaagtaagggtcataaccattttgccatccttaatttctcttacaaaatttgtttctttgccatcccatttctgtatgtgaacaagtttgtctccatccag

SEQ ID NO: 2126 - DNA, 315 bp, Homo sapiens; identical to SEQ ID NO: 1715

SEQ ID NO: 2127 - DNA, 323 bp, Homo sapiens
ttaacagttaaacttttatatttacaatattctcttcatcttttgccaggtttaaaaatgtgtacagagccgcaaagggttggggtagggataagggattgtcgggattgttttggggagaggagctgggcattggagtccgtggctgaatcatggggtcccccagcccccctcccatgccccaattctgagggcatctgtctacagggttcagggcccaggtctctagcatttggagggcatggctgtttggagaggagctagaccaggcaggggaaaggatcagaaaataactaattttccatggatggaggtaggaagag

SEQ ID NO: 2128 - DNA, 503 bp, Homo sapiens
tttttgtaatcctttaaaaatattttattaagcattgatttagaaaacgcaagacaagattgtaacacctcagggcaaaggcttgaaggtgaaacaaataacactataaatattgcacttctaaaatctttttttgacatcttcacacaactcaattctaaaatatccttttacagagatgtataaataaacgcttccaagctgtcaacgcttgacacttttagcttcctatcaccgcactaagtcggcaggtttccaatcagatagctgctcctctgacagcaggcaaagaacttccctcagctatctcggaggcctcatacctccatcatgtgaagagtcaaccagtcccatctttcggaatgctctttcagaatatgtaattttataagtatttttttttctactgagagaacatagatctttcaaaggcaatggcagaatacagcttaaatggacacagttcactgttaacattgcttattttttaaggcatccaggag

SEQ ID NO: 2129 - DNA, 315 bp, Homo sapiens; identical to SEQ ID NO: 1717

SEQ ID NO: 2130 - DNA, 495 bp, Homo sapiens; identical to SEQ ID NO: 1718

SEQ ID NO: 2131 - DNA, 225 bp, Homo sapiens
ttttttttttttttaggaggagaaagaccatttatttctccacccacagtgggactgtgtaggttttgaaaagagcaatcgctggcatccctttaaatcttggctgactcccaccgtggcagccaatcagcagaggcggactggtcgagttgcctgggcacaggcccctggttggccgaagacaattagccaccccactgcccactcccaacgaaagggaaattg

SEQ ID NO: 2132 - DNA, 288 bp, Homo sapiens
tttcatgctttttatttttcggtttatttaatcttctttaacacagccattgttggttcaacaatccaatatttgaggttacattattgcaaaaataaggacatagctgaataggttatgccatcaatatgtttgttaatcctatcccttttattaaagacaaagcacagtttgttaatattgtcttggattaactctatttgtaaggttacttatagtggttcatactaaaggcaggggatttgcttcctgggccaattgtctttaaactataatttaagaaatcat

SEQ ID NO: 2133 - DNA, 464 bp, Homo sapiens
tttattggactgtaggtttttattaaaacaaacatttctcatagctctaagcaaagcattagaattcatcaagcggactcacatcttttctctgcacagagagggctgaaaagggagagaaagtcccttatgtatgtctagatttggtaaagcgaaggatttcagcgaatgagtcactgaggctatacacgtttgcaaattgtaaggcactggcgggcagagagcacagataaaggacttctggggtcccccatcctgtccagcaacctcccagctcacaccttagcttctaccaagaagggtgaacacagcatccctgctatcttcactcagaccccagaagacacaggaaaccgcacagctccactcccaccataacttattaggagataagtcacattttatcaacttgccatcgcgcctcctatagattatacttcggtaaacccaatctgtataaattc

SEQ ID NO: 2134 - DNA, 308 bp, Homo sapiens; identical to SEQ ID NO: 1721

SEQ ID NO: 2135 - DNA, 308 bp, Homo sapiens; identical to SEQ ID NO: 1721

SEQ ID NO: 2136 - DNA, 304 bp, Homo sapiens
agacaggaacacagtgtttattcaggcattttatttcctccattaaaaygtatcatttycctcataaggattttgcattttycccattgtttattcttagacagtatacagttccaagttttgctgmaaatgggattttcaaattacatttccaattggccaatgctatattctatatacagrtttbctatatagtacagattttcatggkgaactattaaacaaaactaccttttgtcatttctaatagttttycaactgtttctcttggatgtttgtctctacaatcacactgctcaaaata

SEQ ID NO: 2137 - DNA, 325 bp, Homo sapiens; identical to SEQ ID NO: 1722

SEQ ID NO: 2138 - DNA, 212 bp, Homo sapiens
ctaacttttatctttattcggtggaattttccagcatgagctttttgactaccctacaggttcgattttgttgctttagagattggcagcatatcaatttgtcctgagaactgataataaagggaagtgaaatcaagcacttaccctgcctttcytgtacartgatgagggtattaagrgttaaaaacaggcacatatacaaatatttcatg

SEQ ID NO: 2139 - DNA, 308 bp, Homo sapiens
cttaattttttctcttcttttctttttctttttttttctgtactcatcagaatgggatactccacaactgtctcaccaactcagtgccagtacacatgctctagaggacttctggactcgcagctacaactgtacaagtgcacacaagtgaatctaccctgttatcctccacccactgattgaggatcgaattgcacatttctcttaaccatgacaggagaaagcaaacagtgaaacagaatcatgggtgatctttctcactttccctcttgttttcattggtttgtccataccattctaattatcat

SEQ ID NO: 2140 - DNA, 266 bp, Homo sapiens
aaagtcgtgagtttattgcatatgtaacaaaatgaacctgacctcctgggcccagcctgctgtacaatcactgtttgttttgtgtttccagctggttccataaccacattaaatagaactagtatttcattaaatacttttgattttgacatagaacattagtgtacaactttcacaaaataaatcagtgataaaaacagtgggaaggataacaaggatagcagcaatacttcaaaacaagacattacaaaataaattaaaaaata

SEQ ID NO: 2141 - DNA, 313 bp, Homo sapiens
  misc_feature (1)..(313): n=a,t,g or c
ccaactcagcagctctatttacataacagcgtcgcccacaccccgtggggcctctnacggcttcttggctttcttcacggaagatgagctggaggccgactcccgtcgctttctcgaattgggcgtgaggggtgcgcccaccacatcaatgatggtgtccttggggtcaggaccaagtccgggttcagtcactgccggctcagcagaggccgggcctgggcctgatgctggtgtggcagggccccctagcacaccagcccgggccagtgcctcatgacggtgccgcagcatctgcagctcatactcgcagttg

SEQ ID NO: 2142 - DNA, 229 bp, Homo sapiens; identical to SEQ ID NO: 1726
  misc_feature (1)..(229): n=a,t,g or c

SEQ ID NO: 2143 - DNA, 294 bp, Homo sapiens; identical to SEQ ID NO: 1728
  misc_feature (1)..(294): n=a,t,g or c

SEQ ID NO: 2144 - DNA, 256 bp, Homo sapiens
  misc_feature (1)..(256): n=a,t,g or c
ctccaacaatctggaatttnattccatccatatacatgcatagtaacaacatttgttgagaaattatttctatcagaagtagaacattatctttgtgatcaccaggtgcagtattgctactctnatatttaaatagatcttatatatganttaaattcatacttgcagcattgagtttagggtttcgatttagactgtgcctttcaaaagataaaactgattaatactacctcattacttacaatactgcttccag

SEQ ID NO: 2145 - DNA, 305 bp, Homo sapiens
  misc_feature (1)..(305): n=a,t,g or c
gctcagtgaagatttattgttatagaaggcaactaatacaatagatttgtgggctcgaaattttaaaaagttctaaaaaggcagttaaagcttgacaataaacttgagtaaggtttacacaatatcaaagtatattagttctttgaaatgaaaaggtatttttttnctncctttaacattgagatgtctgagatgtcaggattttgtagcattcttagaaacaacatccactgtgtgggatacttttttcccttctggagttttaaaccagtctgactctttggttgtgcctatacaatgaaaag

SEQ ID NO: 2146 - DNA, 243 bp, Homo sapiens
caattaaagtaatttattgtattcttccagatcagacataaagagcatcttgggaattgataccacaacacaatgttatacaccattttcacaaccaggcttgcattgaattcttttttaaagaacatagtaattttaaaaaatctaaatatttacatattaataaaacatatatacagaagattgagacattatccatagatatggattttttttttgctaaaaaagcctataaaaaggttt

SEQ ID NO: 2147 - DNA, 345 bp, Homo sapiens; identical to SEQ ID NO: 1729

SEQ ID NO: 2148 - DNA, 325 bp, Homo sapiens; identical to SEQ ID NO: 1730
  misc_feature (1)..(325): n=a,t,g or c

SEQ ID NO: 2149 - DNA, 440 bp, Homo sapiens
  misc_feature (1)..(440): n=a,t,g or c
gaccacatcactgctcagcnantcngccacggctgcctgaatggccccagctcggccctgcaggggagacgactgcatgccagtgacattgacatcgtggtaggcttcaagccaagcctcagtgcccagaaggtcatgttctgttaccaggaagacgatatctttggcccaataaatctgcccccggaagtgggcagccagtgccagcagcagccccacagcctgggctgttgggtagagtcagagccacagggcacgggtgaggcacaagcgccttcgtgccgaattcttgggccttgaggggcaaatttccctattaggtgagtcgtatttaaattcgtaatcatgttcataggntgttttcctgttgtggaaattgtttatnccgcttnacaattttccacaacaacattacggaggccggaaggcttaaagtgtta

SEQ ID NO: 2150 - DNA, 325 bp, Homo sapiens
  misc_feature (1)..(325): n=a,t,g or c
ttttttttgaatacataccatactttnntaaccaagacaattcagctgtttttccagagtatatttcaaacagagttggcatataacccgtatgtaacaatattgctgtgattttagtcatatttaagggtccaaaatatgttcacaaaagaacagtttgtgaatgtcaaccagtttttgctttatattccttcaaaaacattccaccctgggcatncacactaatctacatcactgaaaataaccaaaataattcacagtctcacctctatgtaaaaattctaattgactcaacagggaaaggactgccctgctccttttgagg

SEQ ID NO: 2151 - DNA, 188 bp, Homo sapiens
tttttttttgtatttcaagtttaaacattttatttacaaaaataggctgggaggaaaagggtttgcgcccccacattctctcctgggacctaacgattttgcgccattttctaatgttgttttctctaacaattttcaaagtcacatttggattccttcagaattgtatttgtcagctagcagctcgg

SEQ ID NO: 2152 - DNA, 350 bp, Homo sapiens; identical to SEQ ID NO: 1735
  misc_feature (1)..(350): n=a,t,g or c

SEQ ID NO: 2153 - DNA, 475 bp, Homo sapiens
  misc_feature (1)..(475): n=a,t,g or c
ttttttttcagttgagcagacatttattaagcacctatcaagtgcaaggcntgttgctaggcgccgtgggaaatacagagaacacaggcggtccctgcccacgaggagctcacagtctagaaagggcagcaagacagtacacaatcagtggcagcagcaccagccagagtggcaagtgctcaaagcaagacacaaagtgctgtgcggttcacaacatcatggggatgcttctggcagaagcactggaaaggagacgaggactcaggctgggccttccagggagggaagccatttgggagaagggcatctctagcggagagaggtccatctgcagagcccacaggtcatgggaaacatgtggnctgcagggagagtttgggggacanttcaagtatggnctggggaggtngacagccacggacattaagttcaggagattttganctttntggtctggttcaaacagccactncag

SEQ ID NO: 2154 - DNA, 443 bp, Homo sapiens
  misc_feature (1)..(443): n=a,t,g or c
cagatatantatcaacactgaggtttaccagtacaaatacaatatcttgcctcaaaaggccttaaacagtacggaaatgtgttatctaaattaattaaaggttataaagtcaagttggctccagacatggnacaatgaggacatctggacagatataaaagagaactctgaacccctcatatcctcctaaacctttctaagaggcagtcctctcaaatccccaaccaagctgctctgcattaaacatttcaatgacttaacctgggggcaatggcctcacacaggtatgcagcttcttctcaggcaggccaccccctttcactgctctggaaccctccgggcccaggagttctcaggcataggcccctaggataggcaggtacaagggtctggattttaaggngataaccaaggcattttggttaattttcctagggggggtt

SEQ ID NO: 2155 - DNA, 384 bp, Homo sapiens; identical to SEQ ID NO: 1740
  misc_feature (1)..(384): n=a,t,g or c

SEQ ID NO: 2156 - DNA, 332 bp, Homo sapiens
  misc_feature (1)..(332): n=a,t,g or c
nctatttttattcttttttcttgcttaatttagggtagtgttgggatagaagatacactttataaaaagcagaaagaccaatcattgagttattttagagacaatatgccagatccatacctttagatttaatcttacctttttttttagtttctcttcattcaagccgaggtagaaagccagtggtggaaagctgtggnattgcataggctacaaacattgtattgtcaacttgaaagtatagctacttctaaggatgttgatgttcattgtaggttttttatttataggtaggctaaaattaggaaggcaacttaaaggcttcccaaaaa

SEQ ID NO: 2157 - DNA, 398 bp, Homo sapiens
  misc_feature (1)..(398): n=a,t,g or c
cattgtcatatgtctctgtaatggggtggtgggacacatagtgtctaacacttcagtttctctgctgcttccctcccattgagaagccagtgacagggttgctgtgaagatgggagagcttctgaacccacctcattaaaggatgagaaacccagggtccgagagcaaagggacttgacggtggccgcaagtgcttcaaaggcagagctgggattggaacccagggtgtcatctcgatgggaatgtccagcagtgatgtccaagtgggaagtgaagacccgaaggctcaagggacacaggtggctgacagtggtcaaaggctagggggcaggattcaggcagaggagctcttaggggggttttttgccaccctgtntgaactcccgagactntaccag

SEQ ID NO: 2158 - DNA, 241 bp, Homo sapiens
gaaacaatctgggtattacaggaatctactttgtcaactgtaaatttatgaaatctaaatacagatcaagtatttctgatgaaaacgtatgaactgagatatgctgttaaatgtaaagtacacaggattttggaaatgtagtacaaaaagaatgtgaaaacccacaattttaaaatactgattacacactgatacaatattttagatacaatggggttaaataaaatatattaataaaaaa

SEQ ID NO: 2159 - DNA, 223 bp, Homo sapiens; identical to SEQ ID NO: 1744
  misc_feature (1)..(223): n=a,t,g or c

SEQ ID NO: 2160 - DNA, 469 bp, Homo sapiens
  misc_feature (1)..(469): n=a,t,g or c
anaattcaaacttttatttggcaataagttcagagtcacataacacataaaatcaacatttaaaataaatagcaaattcacatctagaataaataggtctgcctaatttgcattaattgtgcctgatatcatacaggcacaatctgtcattccacgagataactggaaaagtctccaaagtcagagttcaaacctgcaggactgaaaacacacagaagcactgtcgcaggttgggttccccgaaagcagatactgaggtggagaatggcgtgcaggaaggttcataggacagtgctgtgggctgagccggctgggtacaggcttgtcagggagaggcactgggctgtaatgtggccacaatgaggtctcactggaccccacaaggggctctggagctgggatggccccagaggttttcccaagttggggtgaggaggccagacctttgtaccccatatggagccggtaa

SEQ ID NO: 2161 - DNA, 454 bp, Homo sapiens
  misc_feature (1)..(454): n=a,t,g or c
agacgggcttggtgacccggacccggactctgtgctcaggatcctcctctgtaggttggggtgatgggggaggctttttggggacaaccctctttttcttgtgcttcttcaccagctctggactctgtttttcctccagtcttttgatgagtttgttgagagtggatgtgagagccagcattgcccgatcccgctctgactccttcttcagcccatctgggtccagctctttctctgtctccgaacggagccggtctcggtctgacggaagcaggatcccttccagttccttctcaaattctcccagtaactgccgttcatcctcatcttcatcctcatcctcatcctcatcctcctcttcttccatctctctctggccgttctggatcaaccctttccttctncggggtncctctgaaggaattctggaaggaataatccaaagggtggtctt

SEQ ID NO: 2162 - DNA, 506 bp, Homo sapiens
  misc_feature (1)..(506): n=a,t,g or c
taacataaagcatttgtttattattgctatactcaaggcaaaatctcttaattagccttgataatggaagtataaccagaaccattattcatgaatttacattttgttcttttctgctgttgagacttcactgtttcacacacaccatctaccccaagacctttaatatacaagaacaagaagaattaacttgaaagtcacaaagcatggcttgaccacttgcctagttcctgactttaggccaatcacttcccctctctgaacctgtttcatcctgtgttaaaaaagaaatgggagaggaagaggagaggatagaataaacctacaactgagataacacaggtgataactgaaagaacatgaatgaaatttcactgtgaataaaaaatattatataanataaagtatcactaataacaaataggggttgtggagggtaaaacagtctatggttcctgggaagcctggcatgacagtagccaagatctaaatcctgggggcaggac

SEQ ID NO: 2163 - DNA, 396 bp, Homo sapiens
  misc_feature (1)..(396): n=a,t,g or c
catggtacaaaaatgtttatttaaattaaatatttgcaacaaattaatattgacaactgttccaaagtatgagttgttctttcaaaaaaacgaaacagtttagcttaatgtctgtgatactgttttatgagattattcatacatgctctggactgcgcatcagtcaatcatatcatcaacaatttactatttattaccaaatggcatataaagtaatagcataaagagtaatcataccttataagtgattttacaataggacatcttagaaggacaaaaaggatttatcaacaatacaaaacataagataaaaataataggagattatataanacatatttcatacaggaaataatatggctaaaatccaaaaaaccaaccaactggtctttcagc

SEQ ID NO: 2164 - DNA, 587 bp, Homo sapiens; identical to SEQ ID NO: 188
  misc_feature (1)..(587): n=a,t,g or c

SEQ ID NO: 2165 - DNA, 446 bp, Homo sapiens; identical to SEQ ID NO: 1748

SEQ ID NO: 2166 - DNA, 402 bp, Homo sapiens
ttcgacatataaccaaatgttatttaatatcttaaaaagtaacacaatccaaaatggatatttcacacaacactacataaacaacatgaacacagtatcaccatagggagggactttcaaatatagacttacaaaaatccctcgtccttttttttcttttaagttattatactaagcatgacaagtaatcatcatttacagtatggtacactgacacgataaaaaccatgttacaaatgtgctgttataaatcagtaacattagggaagacatttcatgaactgtaattatttcatatgaaatactatacaatataaacagaacatccatcttgggatgacctttacagcaaccagagaccaagtaatttaaaattttttttcagtgcaaacacattttatt

SEQ ID NO: 2167 - DNA, 438 bp, Homo sapiens; identical to SEQ ID NO: 1750

SEQ ID NO: 2168 - DNA, 230 bp, Homo sapiens; identical to SEQ ID NO: 1753

SEQ ID NO: 2169 - DNA, 335 bp, Homo sapiens
tttgaaattccaattgtaaatggttctctttgaaatactcagttttacataaatgcttatccagcagcacgtcataaaccacagggccaaaacaatttcttgtcacgtaaacatggcgttggtagctaaaactcaaatttagcaacaaataattgttttcataggactcataagataaccttaaattgttagatgcttttagggcattggctaattcagaattggctggtattataacagaacttaatttttgcaggcatttaaagattttcacgcattatgtacctgaaggttttgtctcttaattttctttgaaccacacctcttctccttat

SEQ ID NO: 2170 - DNA, 425 bp, Homo sapiens
catcataaaaaaccaaaagaaatttttatatctcaaattggtaaactttacaaaatatttaacatatgaggaagaggtatatcttacagaattatttggctatgtcataaggcagtaatgaagatggaatttttcctatcataaatctgacataagtgaaagtctataacatggtcattctccataaatctgaaagcttgttggttacagcaatatgatcatgccacactgtcgtcgttattgaactttgatgaaagtagactgaatgagaaaggaacaaatttggtgcctgcacaaccgtagaatttgttctgaaattctacccagtggaggcgtatggcgtgaagaaacgcagaaagcccttccatgatcagaaggatgaaaatggtcaaaactgcaaagagcgcgataaccgggagcagtag

SEQ ID NO: 2171 - DNA, 440 bp, Homo sapiens; identical to SEQ ID NO: 202
  misc_feature (1)..(440): n=a,t,g or c

SEQ ID NO: 2172 - DNA, 276 bp, Homo sapiens
tttttttttttttttttttaagagtagttaaaatgtgtttattcatttacaaacccagtaacatgagaagaaactcagtggaaaccttgcttggtggagacagtgcacagtgttagtgccacattcacaggggcagaaatgctcggtcaccctgtgcacccaaagtcacccaggatctctagaaaagatcccacttactgaagtgcctcggatgtcttcagggccagattgtaactacacaggaacagggaagggctaagcttgaactgcacactg

SEQ ID NO: 2173 - DNA, 529 bp, Homo sapiens; identical to SEQ ID NO: 204
  misc_feature (1)..(529): n=a,t,g or c

SEQ ID NO: 2174 - DNA, 610 bp, Homo sapiens
  misc_feature (1)..(610): n=a,t,g or c
tccctttctccctgtttccctcccttctttccttccttccttccttccttccttcttagaattcactgaagtatttcctaggtagccttttacttactactttaatcaaagcttatctttgtgcccaatgtgtaaaaagtgaaaatgtctcttcgaaattctatattacaatatagacagagaagttgggccttgagggcttgagtttcacttaaatactatacacatgtggtatcacacaaggtggagggggagggaacaaacagaaacataacaattatttttattctgtctttacaaaagaaagcctcttctctatgaaaaagtctttttggcatctgctcccggaaacctgccccgagaacacgttccccattgctttgcaagcatctctttttaaaagcacancactgtccccgggagtcacgtaggttggattaanctgtcttagttgaccaacgaagaancactggatgagttttccagggatgantggttgtctggggtggaacatatagtcctgtctacaacaaatgtaactcctgatatgggacnatgaacncagtgtgtgacccaggagtgnttgatctgtnaacantcgcatgnaatt

SEQ ID NO: 2175 - DNA, 381 bp, Homo sapiens; identical to SEQ ID NO: 1760
  misc_feature (1)..(381): n=a,t,g or c

SEQ ID NO: 2176 - DNA, 330 bp, Homo sapiens
  misc_feature (1)..(330): n=a,t,g or c
ttttaaagaatacggcacttttaataggcggcagccccaggnggtgcgtggacagaccctgtccacagcgcctggctcccgtgctgcctgtccttccatctggaatgccaaacagaagctcctctcaggtggcatctggggagtaggtcccagtcctgaaatatacaaagtggcgcctcccactgggcagtggtcactgggctgcacggtcctttcaagtcctagggtggcccctcaggtcactgcttggccttcttcacaatgggtgcccacagcagagatgacggtggtcttnggagccgctgggcttgggtgggtgaccgtgacaac

SEQ ID NO: 2177 - DNA, 350 bp, Homo sapiens
tgccttgttgcctaggctagtcttgaattcctgggctcaagagatcctcccatcttggcctcccaaattgttggtgttaaaagcgtcaaccaccacacctggcctgtcacttctttatcatgttaattttcatctaaaaaaactatcactgaaaacttttttaagtataatcaaatgagttcaactgtcacgttaaggatgccttgaattcttttgattttctagttccaatttctagctttaatatcttcaaatcaccctgcccaagtgggtgtgtgtttttacaccctctctgggccctttaggttttctgctggggggaacccaggaccggccaggcccaggcaccc

SEQ ID NO: 2178 - DNA, 258 bp, Homo sapiens
  misc_feature (1)..(258): n=a,t,g or c
ggaatttttattacaaaataaaacacaagcatgataaactaatgctggaatatatcattctaatttaactagagctaagcaaataaaatgcaaatgaactatgtaagnaacagcatgcagngaaacaagtntttaattcagtaacaagtctccatgcaaacgggaaaggttgctaaccntatttggcaaacactgcatcactatctacaaatggcctctattcatatcaagtagngctgacttgaactttttaacanc

SEQ ID NO: 2179 - DNA, 379 bp, Homo sapiens
  misc_feature (1)..(379): n=a,t,g or c
gaatttttctgttgtgttgctgtctttaataagtgaacatatgtttgcatttgcacaagtgtattaaactctaacatgcatattgacaagtgtacatataaggtcagagctcaaggaattttcataagctgaagacaccatgtaaactttacaaacattaaaaagaatcaaccagcaccccagtagccttcccttctattccctttttaatcacccaccccttccccaggggttatccctacctcctggacaaaaaggattggggttttgccctctctttggtactttaaataaatgggggatccataaattatgggggcctctttttgccatgggggcttcctttggactccaaanttatgggttncggggggactcc

SEQ ID NO: 2180 - DNA, 319 bp, Homo sapiens
ttttttttttaacaagtgactagtgtttaatctcagaaacatttgcattcagagtacgttcccttagaattttctcctctccactccatgaggagtgggcatgtgctttattatatcaacaagactaagaagccgcacccgagtggtcccactcaaaaaagagatttctgtttctacctcaaaatgcagaaaccactacagattaaaagagaaacacacacagacactttgagaaactcgcccttcctcatcttcaaagtgtgggggtatgcattccagatctctcagcctgatgggacagcttgggaagtgggaaggg

SEQ ID NO: 2181 - DNA, 334 bp, Homo sapiens
  misc_feature (1)..(334): n=a,t,g or c
ttttttttttaagtatatcaacaaagtgaaagatgggtttaatttttcccacaaaaagttaaaagaaataacagcagttttagaggaaganggaaaaaataataagaaaattacatgcagttgcaaaatgtgtgactatttacaaactctaacatataactacaaaacggaccagaagaatcattatcataggaagcaaagggtcatttcaaaantcagaggagggatgattcatatttaatttaattctgtgggaaaacatttaagtaacctttgaggacaaaantaggtgatatgttgaaatgcgggaaaccacagtgggaagggaaaaaga

SEQ ID NO: 2182 - DNA, 496 bp, Homo sapiens
  misc_feature (1)..(496): n=a,t,g or c
tttttttttttttttctttattaataaattttatttttagcacaatcatttacccaaaaagagagtttgagaatgttcgagaatctctaccactcggtaaccatgctggctgttatatcagaaaaatccataaacatacacagcagcgagctgttttcacaagacttcctgctaataaacacaacactttctcctccactcagatgggagcctcagnatgccaaaacggcaggatgtgccaactaactatagggctcgttgctaaggcaggaggaaatctattcaagtttgtccaggcaaattcgattgtacagtggggatgggcgtctgcttctgcgggccttgggacaggggaggccactgggtctntgctggctgttcccctgtagggcagggtcgangctgggtnggccctttaggagggcaagggttaaaatgggtttntcatgggggtttaggaacataaggggntttttgaggnaaaaattgncaaatt

SEQ ID NO: 2183 - DNA, 467 bp, Homo sapiens
  misc_feature (1)..(467): n=a,t,g or c
tttttttttttttttttttttttttttttttatgtgtttatactcaattcataaatggactgtcttacaataaaggngataaaaaatctctgttccnttctttttgcttttcacacttttttnccccataaaaacccactgcagtcatagtcagtagttaggggtgggggttggttcaacacattctgggtgctcactcatgaacatgccaaagctatactgcaacactagcctgaattcaacttagagttacctcaccatcaaaatcaggtggctgggacgttcttttgtctctgaagaccaaaacttgaaaatggactgactttagtggggaaatttccttctgcgacagtcattgtcatgggaactttcctggggctggggagttctgttcagccaaattcagtctgggcagcaccggggagcaaattcaattcatgggtttgtccaaaagagtcctaantttt

SEQ ID NO: 2184 - DNA, 377 bp, Homo sapiens; identical to SEQ ID NO: 1766

SEQ ID NO: 2185 - DNA, 439 bp, Homo sapiens
  misc_feature (1)..(439): n=a,t,g or c
tttttttttttttgtgcttagccaagatttattgaactggatgaatgaatcaatggcttgtggaggggtggggagtgggggggcagtgagagaccacacagcacacagaatgtctaactaacttgaggaattccagttgctgaggaggatgtaagcagattgtttcagagatggataaggaaagagatgactgggacagggtaggaatcatggctattcatgggtactcattctatcctctcagtcaccctccacatccaataatcagtcattaagttatcatcttaccttaacagttcacaccttaacacctccaatctattcctactgggcctttgccctaggtgcagggcctcctggggtctttttttccagtctcctaggctaatcttgttcatcttccatttcggntctcttcacaaatgggattcactcangg

SEQ ID NO: 2186 - DNA, 426 bp, Homo sapiens; identical to SEQ ID NO: 1767

SEQ ID NO: 2187 - DNA, 465 bp, Homo sapiens
  misc_feature (1)..(465): n=a,t,g or c
ttttttttttttattaagcaacatgtttattggcgttgatgcagagacttacacaagtcttcttttttaagagaaaaattacaaggtattcaagttacgatttttagataatctctacatttgagacatcaaattataaaaggtcagtgttaccccatatgacatttgttttaaaagtttaaaggttaccagggtttgcagcttttaaagatatgaatgtcctgggccttacccctttgggtgtctgagctagcagctgcagagagggccctctggaatacacagtatattttgctatcccttcaagttatttaaatacccggaaacacaaaggggttttcccttagggnattgtgttgattgggggctncaggggntttaaacccggaccaaccntcggtcttggggggggattgtnttttcaacgnggccatcttcttgaggncccccttctactntccgggg

SEQ ID NO: 2188 - DNA, 399 bp, Homo sapiens
tttttttttttttttttacgcttttactggttggtttaatgagagagaaccacttttggccattatcaccttacgttactacaaatcctgaaaggaaagcagctttgagtcttgggctcggctgaaccccctgcatggaccggggctaacagtaccctctacgactcccacaggtctctctttgtgtccagatggatggcgactgtgagtcagcaacgccagccaaggacttcctcgcctttaccgtgggcattggggcagtttttcaggctctctacagagaggaggaagtggggccagtaaggggagaggggctagagagaggacaccagtttacataggggttgactttcacttgtgtgtagtagcagtttcaggaattttaaaaagaaattttcc

SEQ ID NO: 2189 - DNA, 314 bp, Homo sapiens
  misc_feature (1)..(314): n=a,t,g or c
ttttttttttttttttttttttttttttttttatanacagccgtctttttattttatcacaataggcaacaagatgggnctggttttggaatatgttaccatttgtgtttaatttccaaagacacgcatattagctcaactagtgtaaacctgtgaaaaaatagctgagccatctttttcctctcctctgttaatttatcttgaaatgttcacagcttaggaaactacagcctgctggggnaagagaggggagtgggcccccatggggaaaatgtcccagnctcgctggaaatagcctcaccccagnaggggtt

SEQ ID NO: 2190 - DNA, 444 bp, Homo sapiens
  misc_feature (1)..(444): n=a,t,g or c
taataaaaatttattganttacaagtgattatttatcaaaagaccattaatagcaggtactgaaatgatgtgttactgggtggtgctgggagactaataggaaatcaatgcagctggccggccagaatgcatatgagaagcccaccccccggcagccagcgcaatcacccccgcaacacacgccaggngccacccctggcgcaatgaaaagttccccctttttatttatcgtttacaaatgaaataatcaatacttttaatctagagcaaaatttattaactttcccatcggagagagacatnttgactgggggagagagtggggtntgcgtgctgtagnaagatgggatggctgcgtggccatatcctaacctgtccgcgaggcagttgcacctgcaggctgncctttccagnctacgggccggggccacngggggcaagttg

SEQ ID NO: 2191 - DNA, 212 bp, Homo sapiens
tttttttttttttttttttatattattttatattttattcaattttaatatggtttccattattaacttttaaaacaaaatgatttccagtttaaaaaacaatgcactgaccacataattccttttttattttacacagttatacaaatattctaaatacacattttgtgttcaagatgatggcaaatagggattaactgtacagtacatag

SEQ ID NO: 2192 - DNA, 424 bp, Homo sapiens; identical to SEQ ID NO: 1769
  misc_feature (1)..(424): n=a,t,g or c

SEQ ID NO: 2193 - DNA, 397 bp, Homo sapiens
tttttttttttaatgatgttcatttatttaaacgatctgtatgaatttggtgattttgtggatacgcccctgacagacaaggattcacagccgacggaagtcagggaggctccctgcaaattcttcatctccgcggggcctgcccgagccctgatcctgcagagccgtggggctgaggtagccgccggttgtggtccagggagtgcgtctttctggatgcggggcaccttcatttcaccgtagcaaccgggtaccaaaagtagaagcggatttttggaaaatgagtcattaggtcccaaagagaacctattgcaacatgggactccataacgttcttgaggatcatcctgaggaaactgatgttctctcgttagacaaaaatggcacgattttgctt

SEQ ID NO: 2194 - DNA, 413 bp, Homo sapiens; identical to SEQ ID NO: 1772

SEQ ID NO: 2195 - DNA, 340 bp, Homo sapiens
  misc_feature (1)..(340): n=a,t,g or c
ggtttcctttttggtttattcttggattgggcctaatttattttttatatttcaaaaatctttcattaataattattccattagggtttagtaactacagactcatttactaatgatttactatgataccctaaaaatagagaaaaaaccctagaatatgagcgtatgcaagtaagtgcaatttaatatatgaattgcagaaaaattttaaacaagctttaaaaatatctctaaaaggaggcttaaagttaattgctgtagcctcctgtcatccacagagaagncaaaattttaaaaacatcaaacatactcaaaaacagggcaaggctggganagggta

SEQ ID NO: 2196 - DNA, 333 bp, Homo sapiens
  misc_feature (1)..(333): n=a,t,g or c
nacattgtatttattttcatgttttaccttctattgatggcaaatgagactggttttccatttacagaagtgatacaaaagattcctgttgcaataatttcattaagtgaataatgagccaatttaaagaaaaatataaagcaaataattntacagatggnaaactaatatggcaaaatcactaatattcaaggctgaagtttggccgggcatggtggctcatggctgtaatcccaacactctgagagatggggatgagtgggctctctcgagcccagggntttaaagaccagcctggggcaacataggcaagaccctgtntctaaaaaaaaa

SEQ ID NO: 2197 - DNA, 449 bp, Homo sapiens
  misc_feature (1)..(449): n=a,t,g or c
ttttttttcccatcttaaaacagtgnaaacaggtaacttatgcttttaaaacaccacgaccccttccccaccccccaaagtccctttcctcctagtatctgggggaaaatctgcaattctgcaaatgttactgcgctagaggttgcaagcagcggagaactggctgaacttggcaaaaggcaaggactggtcaaagcttcccctttctcctccttaaacatctaagtgctttccagtctgtcccttggttggccttgttctcctgccagagggaagggggttcatcatgcccttcttgcatatccttggggttgcttccatccctgtttgatgtctccctcatgtctgggaagctatataactagttacaggatggtagtgattaacccacttattctggctagatctctagtaaaagcataatttttaaggttaaggagcagtttagg

SEQ ID NO: 2198 - DNA, 398 bp, Homo sapiens; identical to SEQ ID NO: 1774
  misc_feature (1)..(398): n=a,t,g or c

SEQ ID NO: 2199 - DNA, 446 bp, Homo sapiens
  misc_feature (1)..(446): n=a,t,g or c
agcaaaagacattttttattgagaagtgaggaaacacacagatcagagaagcaggttctaaagggatcgtatccacagttattcttgtaatcaattagccagaatgaatggatgttctcaacagaattctgggacaagaatgaatgagttcccacattttctggttcatgtacaaatgaattacagactcaaaattctgaaaaagagattaccattatccaacaatgggtaaaatgctcacctgtagctagtggaacggatacctgaaagacactaccacaggaagcaccccagagaggggaggtatttctccagagaaaacaggggtgctcatgtcaatcaatggacaacaggcatgggaactgcaaaatataataaacgttcattataatgagttcttcttaagcgggccccctgtnattaaatgccagttctgcttatngaaa

SEQ ID NO: 2200 - DNA, 357 bp, Homo sapiens; identical to SEQ ID NO: 1775
  misc_feature (1)..(357): n=a,t,g or c

SEQ ID NO: 2201 - DNA, 410 bp, Homo sapiens
tttttttttaacaagcatggatagtattcttatgtaaaggtagtatcaatgagaaagagctggaagacagacctagctgtctgtcaggtagaatgagggtgaaggagatctaggatgcttcaggcattgcgcttgaacttaaaaaacaggatcagcaggccctgacttcataaggcccataaatacaaatgactagctccctttctcaaggtcattgaaaatatacagtagtttcagacatcacatgggtttgggcaaagggggcagatttccaagctaggtcacttaatggtatctcttgcctcaaaatagtcccatcaacactaatttaaattatttccacttttgttttaaagcttaaggttctactcactggacattaatttgaggctaacagcaatgtgttttgc

SEQ ID NO: 2202 - DNA, 424 bp, Homo sapiens
tttttttttttaatgcaccaataaatgtttatttataaataatagaagtgtacaattgtacaatatattatgtacattataaaacacacaaaaatagaaatttaaaaggatgagattaaatacaaataatcatcttaatacttcctcaatggattgatcatctccacgcccctgggatgtatacacccccacctgaaacaatagccctaaagtatgtcaatgattgttatttgggttttcagctcaggttacagaaatatgtacaagatcgcatctttttaagttttgcaaaatagccctagcatccaagtttaaatgggatgaggaatgcttgggtgctaacttcttgaggacatatttgggactaatccactacacagctgggtaaaatgtcgttatgggttccaccaacagttattttcca

SEQ ID NO: 2203 - DNA, 340 bp, Homo sapiens
atctcagacaaacattatgtatctttatttaaatttgcaaatgaaaacaacacatatttcatgttagttttaataagagattccctatcctctgccccagtaaaacctaaccaagccagcctgacaggttatatcaatacagggagctggagtgggagccaagggtggtgttagataggggtggggtacagatcaagggggcctgggagactcagtgactggaagtctctgcccctcactcttgggtgagtagctaatttcagcagctggcttcataaggaggagtcaggggtgggtggaggctcctcccaattccagatccacttcctcttctccttct

SEQ ID NO: 2204 - DNA, 416 bp, Homo sapiens
  misc_feature (1)..(416): n=a,t,g or c
ancntttannnnttccaagtcattagctttatttttactgaattcagcatgggatgacaaaaatgcattatatcactaccatccattattacatgtagacatttatccttgtattctttatatgtccattttctacgttaaatctgttaaccaatactaattnaaattacatgatttcctactaaaaatatgcagttcatataagcaagggcaaataaatcctccttaaaacattttattcctttataattgaggaacttaacagtcttaatgggctaggttcttaaaaaatgtttatagggnttaaggtttatttaaggggaggccggncaaacaaaacatattgtaaaactaggtattttcccggaggccatttcccttctcttcccttcttcccggcaaacngggggttttta

SEQ ID NO: 2205 - DNA, 347 bp, Homo sapiens; identical to SEQ ID NO: 1776
  misc_feature (1)..(347): n=a,t,g or c

SEQ ID NO: 2206 - DNA, 367 bp, Homo sapiens
  misc_feature (1)..(367): n=a,t,g or c
caggaggtaggaggagattcttaaatctctgaagagttctgggctggggttctgggaggcaaggggctggaaaatttgggccactgattggtcagggtaagggagattgaatcattaggatatggaaattgcattctttgatgatttagcttctggtagggtccttcagaccagctgacatcagtagtttcatcagtatgcaggacctgaaagantntctcgaagggaaaacttagcatttcataatgttcaagctgttatctntagaggcagttaaggggaactataatcttntaacagactccacataattctgaaggcaatagccnaacaactttgagggaggggtcagccagcaaagtgaccc

SEQ ID NO: 2207 - DNA, 260 bp, Homo sapiens
  misc_feature (1)..(260): n=a,t,g or c
tcccacacatattccaaatcttttaggggagtaaaagcagtgaaaataacaaaattatgttccacatgcccaagtcacaaaatgtattaaatatgataaagtagcggctgtacaaaattggacaaattgacaaataacaatgggtcaggaacactgtatctgtttgatacaggagtgatattgaaaangggttctgtttttactttctcttatttgtcatcaaaaangaaaattgcatcttccataaacaggattccagg

SEQ ID NO: 2208 - DNA, 192 bp, Homo sapiens
  misc_feature (1)..(192): n=a,t,g or c
ttgtttaatgaaacacagtataagaaactagaaaatattacagngaactatgcatactgatgctaagttctgttttatttcatatacatgtccattttatatcacaaaccagtaaaaacatacaaattgataaatgtataancacattgcacatnggggtatacatgtgttatgttgggtcataatgtatat

SEQ ID NO: 2209 - DNA, 353 bp, Homo sapiens
taaaatgatcttacaatgtcaacatcaatgttaataaaaatatataataggctgaattcatcaatgatagaataagttgtaattcacttggaggttccatctttcaaagtaagcctttcatagataaatgaaaatcctttattttgtagaattttaaagattgttaaaggctgggtcaaggcaaagccacctctattagaaggggaaagaaaagcaagatgaaacaaaatatgttatcatacatatcgcgtgtgctatgagcatctttctactcctgccagattgaaaattctaggtttcaacattcttcaggatttaacaagtcaaaataaaagccggaattcaaatctagg

SEQ ID NO: 2210 - DNA, 328 bp, Homo sapiens
  misc_feature (1)..(328): n=a,t,g or c
ttataaaccaccatttggagggcttatgagcaatgtaagtccacctcatctaattaaaccacattgttttaaaagcttgaacagttttcatgcctataagacttgtctgaataataaactgctagagccagaattctgagtgtctttggagagccagggnttttatctgctgagcgcaaggggccagggcactcaaagagttaaagagtgttcccgcattgctgggtagggttaatatcacagctgcctgggnaaaggcattatccccgtacctcactttaacaaaagcctccttttggcaaacagactcccactttccccgcaaggt

SEQ ID NO: 2211 - DNA, 355 bp, Homo sapiens
  misc_feature (1)..(355): n=a,t,g or c
gctaattaatagctttttattttctcattgtaatatttttgagctccaaattattacaggaaaattatgccctaaactccaacttttctcctatcttttttcggatgttctgacacaatgacaaactgaggcaagacattaagcactatatcatctgccagtctgtttataggngtaccctcaattcttgaatgttctaacttctaggcagcagantaacaaaagggcaaccctggggcttgggcaggcttcaaacagggaaggaaaggcaaggggctaaggtacccaggccaggcataggctcagggctntggaaagggcaagggcatgctaggggaaaaaggggagaagntgg

SEQ ID NO: 2212 - DNA, 220 bp, Homo sapiens
  misc_feature (1)..(220): n=a,t,g or c
gtagttgtaaaacagatttcattgtgttatacatcacttcataaagtaagcatagttcccattcttccacatgatgctttttgcagcattgtaccacagaataatgactccctaataactcagctgaaaaatatttagatctacttgctctaagnntaaggncaacattaaacattctcagatgaaaagcttgctggatgaaatagtgcaccatcagaat

SEQ ID NO: 2213 - DNA, 319 bp, Homo sapiens
tttcacagatacatatatatacttttaataggaaattagtgctcaatactctgccctttgtgtgggggaaaacattcttttatacaaggatttttacctagctattacaatagtttaaggtaatgtacaatatatatttgacacagagagtgttattagatgttcgcactgcataaaatgaatcctctagcctttgatgtcttaaaaagaagttttacaactattagtgaagctaaggcactacatattttccttccacaatatggatttgtgtcatttaaactgaagaagttggatctttgtggtgatgacagggtat

SEQ ID NO: 2214 - DNA, 299 bp, Homo sapiens
tttatagaggagactgaaaaagataatttattccatcagaggcatcacaattacagattacagacatttgcaagtaaataatatgcagggttagagcgctgcgttttaacatttaacattcatgagtaaacagagatggccggtgggtaaatatcttgccaaggtggttccttgtattaagccttttgagtctaagatgacaaatccctaggggtcaggtggtttttcccgcacgaactcttgtcaatgagaaatccctcagccccttttgtcttgggtctcacagctccagaaggtga

SEQ ID NO: 2215 - DNA, 362 bp, Homo sapiens
ctcctgggtgacctgtctgaccatggctggagaatcagcacagcactcccctagcctcacctcttcccccatttggctgtggaaatggagaaacacagtcacctctgaacttctaaacctagaaacagaaggagactgtacacaggggaatacagaaggcagtctgggatgatgtcactatagaatgactgatgaaaaatgcagattgactgttctgacgctggcttagggcctggggctgaagctggggaccttgagcaaggccctttgactcctgtgatctgtttgccatgttgccaatgaggaataggaacctgcttcaaggatcttatgaggaccaggggagggaggggtatggaaag

SEQ ID NO: 2216 - DNA, 342 bp, Homo sapiens
tcaatttctgtgcaaactacttttatttataaggaaagtttctctattttgtttataaacattaaaccagagctgtgtgaaggcacttaattggggagaggtggggcagggatcctggtagagaccaatgtttcccacccagaccccaagactgctgggagagatggtgtcagcagtgactcccaggaatatccagtggtgtggtggcccatcccaggcccggctgggagtatggctggcttgctgggggatgtgatgatggtggtaggcatgggaggcactttggacgggatctgatttggcaaaaggaagtggtttcctgtccccagtgatttccagccc

SEQ ID NO: 2217 - DNA, 415 bp, Homo sapiens; identical to SEQ ID NO: 1783
  misc_feature (1)..(415): n=a,t,g or c

SEQ ID NO: 2218 - DNA, 460 bp, Homo sapiens
  misc_feature (1)..(460): n=a,t,g or c
acattcatcttttattcttttcttatgaattatggggggtttcttggtacccatcttttaaaggactccactccatttttctgcgtcttcaatctgttatttcctgcttccattgccttctgaaatgtaacagttgcacttttcagctgaaaatcatctttttcaatctcagaggatgcctttttcaggtatacaataaataccccctcgaatcttaatgggcacacaaattggagatttttctaaagatttctgttgattctgggtagggaagtttgtctcaaggggaaacatttgtgttgattcctttatgaggaactgctgaggtcttttcacagggcccatgggttttcctcccttctcttattctatatttgtcccatccctgaggggttgaggagggggagccctgtntcccaatcttccaggggcccaggatgatggggagtggggagaggga

SEQ ID NO: 2219 - DNA, 298 bp, Homo sapiens; identical to SEQ ID NO: 1786
  misc_feature (1)..(298): n=a,t,g or c

SEQ ID NO: 2220 - DNA, 436 bp, Homo sapiens
  misc_feature (1)..(436): n=a,t,g or c
ttangtattttgaatagcatttgatttatttttttctcttgtttgagacaggttctcactctgtcatccaggctgagagcagtgtctcagccatatctcactgaagcctcgatctctcggacttaagtgatcttcccacttcagcgtctggagtagcatgtgcatgccgccttgttcagctaactttttcacttttttgtagagatgggatcttgctatgttgcccagggctgggtctcaaactcctagggctcaaggtaatcctcccgcctcagcctcccgaaggtgctagggattacagggcgtgaacccaacacatctgggccagtattttatttgtttaacaggcaattctgggggatcttccccattatggctggggggagncttcttggtcccatggaattccnggcatgcactgggggggttccntggg

SEQ ID NO: 2221 - DNA, 552 bp, Homo sapiens; identical to SEQ ID NO: 1790
  misc_feature (1)..(552): n=a,t,g or c

SEQ ID NO: 2222 - DNA, 472 bp, Homo sapiens
  misc_feature (1)..(472): n=a,t,g or c
tttattgacatgatgcaaatatctttattcgtacaaataacattcaagcatatcattcagtgttgcaataagttaagataagctcctttcagagatgctgggaaaggctggcttttgctccaaaacattgctccctaattttggctccttctatacatttccactaaaagccttgcccggagcaagaaggaagcttaccctgcccacccctcattgcccctgggtcctgttcccctttccaatgctagcagtaggggcaagaggggaggtttattttcaacgtgaaactttaactatatttaattccttctaccaaagcctgcattaagggctaaatggcatttacaaaacattacatacccgcaaactgttgaggataggtgaggcattgtttttaggctatttcatctctttnggtcaaaaaaatatatatagggcctggaaaccttcacttaggtgggcggattttact

SEQ ID NO: 2223 - DNA, 495 bp, Homo sapiens; identical to SEQ ID NO: 1792
  misc_feature (1)..(495): n=a,t,g or c

SEQ ID NO: 2224 - DNA, 252 bp, Homo sapiens
  misc_feature (1)..(252): n=a,t,g or c
ttntttttttcaccaattacaaaaaggctttattatattttgccaaatgttaatcgctttcattatgtctccaaacattatttcaccactcatttttataacaagtgcagtgaagatatgcttatcgaatattgtacaatactgttgtgttctgtaacactctttcgggaacagcttagatgtaggtaacaagagatgccngcgtatgaaagngcttcataaactgtactgtataaatgtaaactactaccc

SEQ ID NO: 2225 - DNA, 422 bp, Homo sapiens; identical to SEQ ID NO: 1794

SEQ ID NO: 2226 - DNA, 397 bp, Homo sapiens
  misc_feature (1)..(397): n=a,t,g or c
tctttattggaaggaaatgtgttaaagacagactcactacagtgttgagacagtagtgagtagcacagtaaggagactgcccaggacttgaggtccttggtccctctatagaagtatcaagtgtttgtaaaaggtttagcacccatgtgacagaaagaagccatcatcctcttaatttctcttgggttttacttaatatatagaagggcaaactagtggggcctctgagtgcaagatgagggacttcattaggaataaagncatattgcctctggggnttttctaacccataggctccaaggagccctcaggtgtcaggaacataggggtaagggggacttggatttactgaggaggaccccctacccctaccaacatcctgtggggacaataggag

SEQ ID NO: 2227 - DNA, 434 bp, Homo sapiens; identical to SEQ ID NO: 1797
  misc_feature (1)..(434): n=a,t,g or c

SEQ ID NO: 2228 - DNA, 387 bp, Homo sapiens
taaatgacccaagatataattctgattgtggtctggatcataaacccgcatcacattttaaatgtctattgtcttggagacaataagctgttttatgggggaatgggtgggtggaaaaatgggagcagggcttctgaagctgactaatacctgaagaatacggcaacgtgagaaagcactgacccggctgctttggtaaatggaagaaaatcatctcagggttgctaggaacatgggtaagaccagactgtagaaagatccttcaaaacaaaacagtttgccattcctttaacaattactaaccgtcaagaactttggaattgtgccacggaagacagagcttaagatggggtggagccctttacctcccacttgctcccctgggcc

SEQ ID NO: 2229 - DNA, 471 bp, Homo sapiens
ttagagttgtgagtgaattgcatttttatttacgtttaagagtctctctccctccttgtgttctagtctgtgaatggctcacacttggacttagtgtaggctcctatgggaggagcgggcggtagtgagaatcttcatcaaatggagtaacatgacccaaatctctagaggtttcataattttgctcttgcttctaaaaacataatcatctcttatggggtgttatgtgctttgtatcctgaaattttccacttgctgcttcttggtgtgaggcgagaaatgccaccacgtgaacttgcaggaggagactggtggaagccacagggctaggccttcacttcccagtgacactgttcccaattccctccaggataagctgagactcctccaggatgtggttctgcagcagatgaggtgcgaacaaagcctgctctggcctgggcacccaggatggcactgagttctaaaagg

SEQ ID NO: 2230 - DNA, 419 bp, Homo sapiens
  misc_feature (1)..(419): n=a,t,g or c
tttttttttttttacaaaaagcaacaagagtttaattctctttttacatggccacaggtctcttcagtcaggggaacttcagctggtgcctctctcttgcagctatgaggcgacagtgtggtgacatgcctcatacagactgtcccagtaagccaggacaagtcaccattaaaatcttgcatgaacagccctgggcacgtgggaatgttaagaaagagccaccgcctccttagtcagcttaaccacagctccaaacgcagtttgtcccagctggcaaacgcctcaaacaccaatcatgcgtcgtgctcctattctgggttctttataaaacacttttatatagcgntatagatagcacagtaaatgtgcttctgatgcactctaacatagaggacaggaatacacactgtggggcgcgc

SEQ ID NO: 2231 - DNA, 385 bp, Homo sapiens
  misc_feature (1)..(385): n=a,t,g or c
caatcatcacatctgtgtattgtctcagggtcaatttttcagtaagaattccagacatttctcttcgttcacattacagtaaactatttttcaatacatttcctccttgactttcaaggcttgaaagtcaaagactttcctttcactagatctcataagtcataactgctctcaaccagatgcaggagtaattttgtataaaagaacaagctttttaaagtccaataactgtatctttgggggaaggttaaaagaatgtttaaatacaaaaaagaaagtaaaaaaaaaaagagagagagacaaataactctcctcctagaaaaaaagggcctggggagccctgggctagggcnggccaggggagggaaagccataaatagggggg

SEQ ID NO: 2232 - DNA, 498 bp, Homo sapiens
  misc_feature (1)..(498): n=a,t,g or c
ccctccacaacggaggattcataagagcaggggccctgtttgttttgttcatgctatatccccagacctggcaccaattaggtgacaatacatatttgttgaatgaatgaatgagaatggtagtcttttggttcccaggtttattgacaattactcatctatttttgactccccgagtcccagctcccaaactcgctctccctactccaggcttcacggtagtcccagaatgtaggaagtgggacaggatagactttaacatcacccaggcctctggtttccaaagcattttttttctttaatgcagtaaaaccattcctttaaaacccaaaatctctcatgggaacccctacgtatcaaatatataaagcaggagctgcccttgttcagggataatatgtggggcttatggctctaagaaacacagtttgacattcactgctctccttacttcagttacctcatggtatagataaatggggctgggccngaagaggg

SEQ ID NO: 2233 - DNA, 265 bp, Homo sapiens
gttttttaacattttaatttcaacgtgccagcatttgtccaaatgagatgatacaggctagaatgcacggcggaattccagactggactcactccataagccaactcatcactgcccgtgaacatgaattctggtcctcagagaagctgacattgtttccctgaacattcccgtggtctccctctgaaagccgatgaccatccaaccctgactcacctgaaatatcctacgagcatcgccctccgagactgacgattattaacca

SEQ ID NO: 2234 - DNA, 434 bp, Homo sapiens
aatcaaagtaaatttatttctgaattacataaggatcatgaaacagaaacattaactctcatgttataaaaacagtagtaaaatacagtacacaggaatgtcaattgaatgacaacaatgaaagtacaatagcaaatgaaaaatagtaacttttaactttaaatacaaagtgaagcaatttaatatgaaattttgttaataagaaaaatatatgtcccatgtctttattacatactgtacaaaataaaatattgcacctttcatataataaatatatacaaagagtatgttacaaatcgatctttcttttaatttaataaccttcaacaatcagatgtgattggatgattaacaactaatcgggctgggtgtgtcctcctcactgtcccccatccattcccaatcaccaaaccctccacatacagtagtgctca

SEQ ID NO: 2235 - DNA, 405 bp, Homo sapiens
  misc_feature (1)..(405): n=a,t,g or c
cttccaccagacattaattttaatgaggttactcaagatttcccctttcttcaagcattccaggaatcagatggaggaagatagggtaacatcatctttatcaaatatttgcaaacattatatagatagctggaaaagcctgtgcatggtcgaatggaagagatgtcacataaaaccgaataactgagtctcataatatttaggtcttgaatgaagttaggccttgatctgcttccagccagttgatctcttaattatgtaggctgtgcaacaangtttttggttctgttttatagttttcttctctcgcattcctctagatttaatatattccctgatttgggtttacagatcactgcttttcctccagaataagccaatgtggataagggagaccaaagggaa

SEQ ID NO: 2236 - DNA, 421 bp, Homo sapiens
attctatatagatatatttattattatttctcaatttaagcaccattcaattcttctggatccattctggctggaaaatatccctaaatccacaggatgttatctatttaatggcacatgttaactgaaaatgaggtggattttttttttaagaaaagaccttaaattaatttctatctacatcttaattggtttgtcttctgagccagctcacaatgtcaatgcaatttctagtgcaggtgtctctgagtgccccttgaccacaccccgaggattgtggcagtgtcctggccatgtgtcggaaggatcgaagggcagcaggtgcagccttgctctgcacatgggacagcagctgggctggtccaccgccacgcaccttcagcagtgtacctccggcacaagttccaccattctgcttcaa

SEQ ID NO: 2237 - DNA, 206 bp, Homoomo sapiens
atagttgtgtgcaatttaatgaacacaattaattttaccaccattttacataaaaggaaactgaagtgcatttcttagggtcccactgtaagttgagggcttgagattccaagaaaagtcttatttcagagctcagtgtcttgcccaaaacgcagcctcactgctcaatcacattcttgaggtttgattggctgaaacgcacgtgg

SEQ ID NO: 2238 - DNA, 286 bp, Homo sapiens; identical to SEQ ID NO: 1805
  misc_feature (1)..(286): n=a,t,g or c

SEQ ID NO: 2239 - DNA, 284 bp, Homo sapiens
cccgattctttccttttatttgccaatttttatgagtcagtgccttacaacttccaaaggtaaacatgaggcttctttccttaagcatcatcatgaactcttagatgttcatttattcaacacaaactaaaaaaggaatgttaagtcttaagatatcattaatactaacttgcattacttgtttatgaaggattaatatactaaatagaatatatgctcacatttttatatgtagatattaatttacaagtaattaacatgctaaaacattttataattcgctt

SEQ ID NO: 2240 - DNA, 348 bp, Homo sapiens
caatgctggcgtgccattcattgaactttgacctaattaatcatctggaaacctgttacaatctttaattgatagcactgtggtaagttaatgtataagtttctaaatcaatcacaaaccaaacagcagcggttccttaaaccatgtttaaccagaagggaggggacataatctgattatgcatgacaagaaaacaaaccccatttgtagaataaaatactttaaatggtttaatattgtaaaccagcccccctcccacacacactttttaataatgggttaaacttttccctttctgtaaggccatagctggttttctgactagttgcctaaacatgtttctcatat

SEQ ID NO: 2241 - DNA, 313 bp, Homo sapiens
acacagaaaaaaaaaatttaatattcaacatgcaaaacaacctttaaaagaaacatgaaatcataaagcaaagctaacagccaaccaacaaataccgcctagcaatgatttccactggatgtgggagagggttaataaagacgctgttggtaacgcgtacagaactatcactggcaatcagcatactgagctatccagtggaggccagcatcgtgtttttgctaaaatacatgttgtagaagtcataattcatagtgaagaatctcaacaggttttcttacagatttaattactctcacacaaataattcatt

SEQ ID NO: 2242 - DNA, 251 bp, Homo sapiens
cagggaaggcagagatgtgcctggcatcacagtttattgtttataaaccatgacaataacagctgttgctcagcacaggcctagcagagcccactgcagggggacggcagcgggcaccagaggccttgcctggcccaacccaatgggaacacccagactcagctgggtccccaagggagacttggcacattggcatgggtgtgggacaggtaaagcatgcaagagggagaagagggacataaggggcatgc

SEQ ID NO: 2243 - DNA, 321 bp, Homo sapiens
aaaacaaaacattttatttaatgcagaaattctaaggtacaaaaacattttgtaaatgtcagctgtgatctactttcacctagttacagagttatgtacaaatcaagtcattaacattttcaatgtcaaaaatacagcacgctgttaagagttctgtcagtgctcattatcccactagatcccacaaagggcaaactcaaagatgaaacaaaggcaacgccatcaataaccaccatattccacaggctttctcccctaggacgtactaacagggagtttccacagggaaaaattctcttttaaaaaattaacagtaaaaat

SEQ ID NO: 2244 - DNA, 451 bp, Homo sapiens
  misc_feature (1)..(451): n=a,t,g or c
tgtgttaagaaatttttattctttcctttggatttgtgatgaaagcacataaaattacaagtggaagaaacatcatgccacaaaattgcatagaattattacaaaaatgtgaattatgcattttaaataatttgagatagaagaaccaaaatatgtacattttaagagcttcaaatactttgtcctatcttttttttcttcttaaaaggcaagagtcacaacgtccaatccatcacaaacaatattaacacagtgcacaagcgcaacattaaattcaaagtaatgcaagcaaatggccctttttttgggaattacttaattgacagcttatctactacaggagtattaattaatgtatggtggatactcaaattttaaaatggaatataaaaaacccanaaacacatgggctatgtcattagaaccttggaaaattgggnttacntgggcc

SEQ ID NO: 2245 - DNA, 278 bp, Homo sapiens
ttttttttttttttttttcacattctcaatatgctttattcaacagaacaaaagaaggcaaagagagcagagaaagcagtgcaggaatgcagactgcatcagaaggtacatcacttgccattcagggacactgcaagagaagatcaggacaactgacttgtcagatgagaactcctgagtgtagctataatgggcaggatggttagcaattaaagagaggactcctcatctgcagctggacctagactgagtttcagttcttatggggatataggtca

SEQ ID NO: 2246 - DNA, 386 bp, Homo sapiens
  misc_feature (1)..(386): n=a,t,g or c
ttttttttttcaggctgtttaattttattaaaaggttcaaatttgatgataaatggtggcatggttacttcaagcttcggatacaagacctgctcagccgtggacatatcatcgacacccactgccatccccaccaggagctcccccaaccctgatgtagtctgagaccgtaaataatgtaatgatttcttgtactttggtaaatatgccaggaacacttgtagctgtctgagagctacagagaatactaacttggtgggctttttttttttttaagaggaaggatgggtaataagtggaagcaatttcagcaggctgactgaaccccacacagtctcaggganggaaaaggggcttnccctctggaaanccatcatttaacntca

SEQ ID NO: 2247 - DNA, 329 bp, Homo sapiens
  misc_feature (1)..(329): n=a,t,g or c
tttttttgggatgcagcactttctttattgcccatccagggaacagccaagccagctccatctgcattctggctgcagcgtgtacattaggggactcaggggccacagtgtgggaccgtgcacactggcaaggcactggcggatntgggcaggccagttggacatggatagatgagaatgacaactcacagatgtcctagcttctgctggcccagctgccancactgncatcacccttttgcccagcatgtgtgcattgtcacccaaaacatcttgaaacttgccattagtgaggcattcaacaaagaagtaagctaagtgagtaggaa

SEQ ID NO: 2248 - DNA, 661 bp, Homo sapiens
  misc_feature (1)..(661): n=a,t,g or c
tacaaaagaaagagctttaattggacttacagttccatgtggcttggaatatcttacgtgaatggtagtaggcaaaaagagcttgtgcaggaaaactcccccctaaaataaccatcagatctcattaaacttactcactatcatgagaacagcacaggaaagacctgcccccataattcaatcacctcccaccaggtccttcccacaacacgtgggaattcaagatgagatttgggtagggacacagccaaaccatatcaatgcctctataaacccaccaggaacacttctagaaaatgttgaacacctccgaggccccacagaaccctcctctacccacatcttcatggcaaggagctaccatggatccccctccgagtgtgcccagaccagttacaggactggttacagtggaaggcaactgagaggcatagagcaagagctgccctcccactaaagtcacacaccacagaaagaactcattcttcataagaagactggagctactgaaaaagggacagacactagctgccaaaacctggctgaagtccacaacatcacatnccctcatctcagantcacacagggtgctctctacancatcacactggtttacttcagagactccacacacactaagattcctggttaattggttgtc

SEQ ID NO: 2249 - DNA, 431 bp, Homo sapiens
  misc_feature (1)..(431): n=a,t,g or c
taaatgggaacaaagaaaagaaaacagcctcagcctccagccttcccttttgggacctgcctcacaatgcaccctctcttccaggcacttcttgaattacagaggaaacaacagtgagtgagtccactatggagctactaccaggttggtttaatttgcatgggtcccagacgagtctcaagggcccaggagggtcacccacgctgtcgtctcttccgcccccgcagcttcagccgcctggtggcaggctgacgggctgcttcccaaacttctccatgatctctcggatcctggccatgttggttttgctaagtgtgaagtcacaccttgtggcccccatgtcatagccaaccatacagttcttgggtggatgcagtgaaaccttcggcctttgctgtgaccacatactctccaggggttcaggaaggcgn

SEQ ID NO: 2250 - DNA, 424 bp, Homo sapiens
  misc_feature (1)..(424): n=a,t,g or c
cggagaagtgccaagtttattagagtgagagagtatcaccctcacattgccaccaacagacatagatctcagagacacactgaccttgcaccataattatggtgaatttctaggttagaagataccttagaggtcaccgggctgaccctcccatctgatgtgttaacccctcttaaacatctccctccaggagactgaggtgagattctgtttaacatacggctatcactgaaactctggccagctctgaatctgcaccctggaggcggagaatgtttaagcactataaggcagtagaaggaaagttccttggctcaggccccaatggtccccctttttttaatngatgaaaggttcccagagtccagtgcaaagtccctcggaaatcccccccancaagcacaaagcacgaaaggaggcctgg

SEQ ID NO: 2251 - DNA, 471 bp, Homo sapiens
  misc_feature (1)..(471): n=a,t,g or c
ttttgctggaacgttttattaagttaagaggttcagggagcagaagagaaacaccttttgggtggctctggcggttctgcacccagcacagcctcgaaggagntgtggnngccatggaggcagctgctagctccctctgtcctgagccccatggtacgggtccaaatngggcaggaantgttagtaggaggtaangcnggaaaaaggtngcangctnccggcttttcccnntaaanaaaccccnccattgntgnttnctnggncttcgccanaactnttgggcaagggcaccancttnanaaanccaagcanaagggtngctttgaagacanaaaggggacccaagggttttggaagggcacacaggcccacccaaggaaatttggcctttttntttttttttttttttaaaagnataaaantgtttttnggaaaaaaaagggaaaaaaaatttattataaaaaatntcct

SEQ ID NO: 2252 - DNA, 447 bp, Homo sapiens
  misc_feature (1)..(447): n=a,t,g or c
cctttcagtctttatttgcagcaaactaccactttatatgacaggtttgtgtgtctgtacacgcacatacacacacatatccttaagctcgagacagggtgcggctttacagaccaaaaagtatggaagcttggttttaactggtgttagagatcagatggagaggaagtgcagcggtgctcacctggccgctcggttcttcagggagacagcgctgctggtgccgctgtcggctcancagcctcaccatcccccagggtgcatgctgtcgtggccaggcgcaaactacggcgggacatccgtggagaatcaaatacagggtccaatttgtgctccgtctcaaaatccagagcatctgaagaatagctggaactggagcgcatacgtgtagcccgtgttctccggcacacactggggaggactgtacatgtgaagccgagaaaaata

SEQ ID NO: 2253 - DNA, 246 bp, Homo sapiens
  misc_feature (1)..(246): n=a,t,g or c
gcaagataaggcactttgtttttaattctatcagtctctttagaatgaacgaaggtctgggtcctctggaaatctcaagtggtgctgcctgcanttntaaaaggctgagcacaaacccatcagagagccacagtcctaagtagactcctcggtgcgctctgcccacctgtccatgtgcattcagatttctcattaaattttccacagcatgaccagtggggatgacctgggtggccgttgtntcca

SEQ ID NO: 2254 - DNA, 387 bp, Homo sapiens
  misc_feature (1)..(387): n=a,t,g or c
aattttgaaatgtttatttcaaagagcgttggtaatttaaacgtcctatttaatccccaaaacagtcctgagggggagataaggcagttatcttcatagtacaggaaaggaaaaaagcgagggtccaaggccgactataccctcagctccattagcccccgaggcctccctgacaggcggggcggacaatcccagtgcagatgctctgtatcgatcgcatgctatcggttctttcaaggaacgtgtattgatcatcaattaagtggtgagtactcctctagatgtcgattcttagcaaactgcggaaactcctacagacaaaaactcaggtgtgggcgcagaagggccggggatgcgcttcggtcaagactttgaaggtncggggct

SEQ ID NO: 2255 - DNA, 563 bp, Homo sapiens
  misc_feature (1)..(563): n=a,t,g or c
tttttggaagacatctattgcatttattttctaaaagaaaaggcatgcctgaagggtcgcattactgcacattttaaacatggtgacaggctatcttctaaacctcaaggaattctgctgatgcaaactgtaatgactatctgctcctattaaacaagcaagacatcagtgagcggagacatcacaagcggttacttcatttctttctgttgcttccagttgctagcatagttgcaactcgcataaatatatttaatgtatccatgtagattgtcaacatcgaattgatgggatcatacttttgagctccatacatgggtgttatttctgcacgtttgattactttctgagtatcatacagaaggaacatgctgaaaagaactaatccaccatacattgccactgagtacagagtggcaccagcccaggaggtagggggaagaaacatagaccccngagaagacgccaagaccagacccaggccacttcccaggggtgctcccatgttcagaacttctcactangcgcacacatnggccncagtagagaggcctcccnccata

SEQ ID NO: 2256 - DNA, 403 bp, Homo sapiens; identical to SEQ ID NO: 1819

SEQ ID NO: 2257 - DNA, 323 bp, Homo sapiens; identical to SEQ ID NO: 1820
  misc_feature (1)..(323): n=a,t,g or c

SEQ ID NO: 2258 - DNA, 587 bp, Homo sapiens
  misc_feature (1)..(587): n=a,t,g or c
taatttcacacttgtaggctttatttcctcatctgtaaaatgagaaagtatgatcaggcggcttctaagtcttccagccaaaaaggaaggtaattttaaatcttgcaccactgaggctgtgtgtcgccgtggaaactccacagccaggctgcccaaagccaaaggagccactactgcagttggtggctcagaatcctctgctgccacctctgctcctcaagtggatgctccaaatccagaagtggatttcatgcttcccatgttgaaaacctaattcattcataacctgagtaactgggaaagaataattcttcagaatggggcaatttgtaaacttcaaaaaactgcagaactctacttgcttatgttgtcctaaatgtctaccataaattttaaatctctaaaaaattatagcaagggttcacttcaaagtcttcattgctgacataacgtggctataggtcctgctgctctgggtgccctttccatatcacagaagcactagccggaaaaagctctgggtttcantgattttactggatagagcaactgtagtcatcaacccaagagtaattgggatcatctgg

SEQ ID NO: 2259 - DNA, 417 bp, Homo sapiens
ttttttgcaaaagacaaaagaaaatatattaaaatgttaattaatagcagttttacagaggtgacaggatttgggggtgttgtttttttctgttcttcttccttgactgaggcaatacattttgtgttacttgtataataaaaaagtagatttacataccagaatggttgattggcttcaaaccaaacagtccaataactgacgcattaaatctttattgactaaacagcttaaaaaattactactatttccttttatttgttgttgtgaattttactcagaattaaagataaatgattagtaattacaggaaaactaacttgtaaaaatcttaaagacattgaatgggttaatgtactgagcagctacggaatgcaaggcactgtaggagtagggtgagtatactccccacaaggg

SEQ ID NO: 2260 - DNA, 448 bp, Homo sapiens
  misc_feature (1)..(448): n=a,t,g or c
gagacggagtttcgctcttgttgccaaggctggagtgcaatggcacgntcccagctcaccacaacctccacctcccagggtcaagcaattctcctgcctcaccctcccgagtagctgggattacaggcatgcgccaccacgcccggccaattttgtattttcagtagagacggggtttctccatgttggtcaagctggtctccaactcccaaccccaggcgatccacctgcctcggcctcccaaagtgctgggattacaggcgcgtgccaccacgcccagccttgggtgtttttctttcagctcctccagtactttcatactattctaataaatatattttgttggtatgaagctatgaagcaaaagtagctattaccaatgcatacatacagtacactggttttaagttccacctcaaagtgaatcttagagcctgggtgtaagtgc

SEQ ID NO: 2261 - DNA, 327 bp, Homo sapiens
  misc_feature (1)..(327): n=a,t,g or c
tttttgactataaaattgcaagtctttttttttttttaataaaaccaacataacagaatgtagaaatctaaacgaacatttctccctcaaagtagttacatccttagctccaacaaaactactattgttggagacttatttagaactcctgtttgaggaaaggccttaaaaggtggtttatgagccacattagaaaatacccttctaaactttgggctgtttaaaaacagaaaatccatactcagaggatgacaccgagaaaattaaaaaggtgctgcagctctcacggaggttcccnaaagacctctagcaagttctgagcaacag

SEQ ID NO: 2262 - DNA, 446 bp, Homo sapiens
atcaatgtcagggtccgtggtgtgtttcttggggcgggcatggtctccctgctcttcagagtctgtgtcagagcactcagagcttccaatatcttctgaatcagaacaagtcctttcctccacttgattttctaggagtgcagggaccttctgaactcctgacaaatctttcttcaatcctgtaacagtctggtatagaatattatcttgttgggcattcatggccatgtcctcttccttcaatttcataattatgtccatatccctctcataatttttcacttcattcaaggttctaggaatatatgctcgcttaaacacctcttcatccacatgatcttggctagaccgttcttccttggtcctttgagatgctatttccatggcctttgagagataagcatccatgttctcatggtgtaatgggatgggatctgtgacaaatt

SEQ ID NO: 2263 - DNA, 296 bp, Homo sapiens
gtgtttaaaattatttttattacttttagactttttctcaaaataattattcaaggaaatatttcttaagtggcccagtaaaactgtagagccaatagtcagttacaccatattcaaggacaaggatagtcagctatagataggaactgtctaaaccacgagaactgatctctgatactgaagtacccagaagtggctatattatcactgacttgaaacagatcttagtcacccatgtagcatttaattcaatgtttggttctttgcctcatttctttcttaggtcacaatctata

SEQ ID NO: 2264 - DNA, 397 bp, Homo sapiens; identical to SEQ ID NO: 1828

SEQ ID NO: 2265 - DNA, 621 bp, Homo sapiens; identical to SEQ ID NO: 1829
  misc_feature (1)..(621): n=a,t,g or c

SEQ ID NO: 2266 - DNA, 440 bp, Homo sapiens; identical to SEQ ID NO: 1830

SEQ ID NO: 2267 - DNA, 381 bp, Homo sapiens
  misc_feature (1)..(381): n=a,t,g or c
gccaatcgttttgcttctattcgttatctcagcttatgtttgaagataaatccttacttttagcttttgccactttgttgcaatagcacattntttcggtttgccagatttcaggcataattctcattctaaagcactatcattagtataaaggaaggacaaaacattcagtgactcccctccgcnacccccatccccaaccccaacactacctacactaaatctagtacatcaagttagcttttttttttttcctgaaaaaaggcaaaaaagactttacattgcatcatacagcagatatcctaaatcagtcaaactatcagaggaaactgttggcgtacagctttacaaacaatttaccctaataaaagttccccagtc

SEQ ID NO: 2268 - DNA, 471 bp, Homo sapiens; identical to SEQ ID NO: 1833
  misc_feature (1)..(471): n=a,t,g or c

SEQ ID NO: 2269 - DNA, 447 bp, Homo sapiens
tatggtagtaacagtttcattcagttttgcattttacaaatttaaacaaaagtctttcttttttttttttctttacttgcatgtttgtcttttgagtgtgttttcaatttgtgcattccttagaaaatctttgtgtggactttggagtttctccctgaaatgtgccaggcgcctgagtcagacacaaacactcccttaggaccttcgtcagaaactccacccctgtgtggaatctccttcctctctctctctccggagatgccacccgaattcgaatgtgactgtgtgtttctgctgagaggtccattgtcatccccagatgaaagaagagaccaaagcagttaccactgatggaagccagtgaagatggttgggggaactccttaacctttcctgggaatgttttgaacgaggacgccgggtcctttggccagtcaggaaccagca

SEQ ID NO: 2270 - DNA, 472 bp, Homo sapiens
  misc_feature (1)..(472): n=a,t,g or c
ttttttcaggacacagtgcactttaatgacatacagcatttaaaatccttcagacaaaggtctgaaaacagtcttttaatgcaagcctaaatcttcaagcacataaaatctttcttttttaagcttaatttcaacatcactggaagaaatacctatcgttaaaccctgatnngcattcttaaccacttgcagccagtgttcatgaggcaaaacgtgacccagagactttgttcaagttctcctcctagggcgtctacattcacggcggtcactccgtttctgtctccttttgtttggcacctgctggtgtgaggatcagggcttgcagaatgtccgacagggaaataatacccacaatactatctgcttcatttaccaccaccaagccgatggaccctcagctcttactattctggtccaggatggtctccaggaatttccagcttattggcacttnaaaaaacntttcaaa

SEQ ID NO: 2271 - DNA, 334 bp, Homo sapiens
  misc_feature (1)..(334): n=a,t,g or c
acattatttacgtttagtttattgcagagatgaagacagcatactagaagttggcttctatttcacaccgttcacagcactcactctgttctccatttcatccactcacccatgcaaaaggtctgtacacgcaatgatgtctgatgtttcttggtttccatagtgtaacaggaaacttgacatttcaattaaaaaggtaaaatgaagacatttaccatcagactataaaactcctcttctgtaagagaatactatagtacttgaagatatgatttgaaaaaaaatcatgtaccaaatganaggggcaccatttcaagagcactaggactacatt

SEQ ID NO: 2272 - DNA, 531 bp, Homo sapiens
  misc_feature (1)..(531): n=a,t,g or c
cgctccaaacgggtcttggctttaatgtggttttcttcaaacccaaatggctgaacattgctatgaacataggtcatgtatattgagacactgattccgttttatggagccctgtggctcatgacaggttaacgagagggcacgaaactccagtgcgacgtgctccattttgaaagcagataaagctcccctcatcagagtgaagaggaaagtagccctgctggaataaggggagagcgtaccgcttgaagacagggtgctcagatgttttcattccaagcaagacagtgataacagcacagcactgctcccatccctggcccctttcctttctcacttactagggctttttgcttcatgcaaactctgtggctggactttgagggatccagaatttaggatatagggcgggtccttcacgagggaagtgaccgtggctcagccaaaaatcacaagatctcctcaagattccagaatgtattccaaagctgttgtaccccttntccctccaccggctcccctttgcaagct

SEQ ID NO: 2273 - DNA, 381 bp, Homo sapiens; identical to SEQ ID NO: 1834

SEQ ID NO: 2274 - DNA, 354 bp, Homo sapiens
tgctggggccacgtgggcatcctctttattggtgcttccaaggtgctggtgcagagcccttggctgaagggcctggactgtgggggagggtggcagccccagagacagcaggggagaggaagcgttctggcataaaaaaagagttcctgggtaaggctcctgtttccgagcattcgggcagcaaggggagtggcgcacacttctcagccgaagacactcttggtgggtccggctttgggcttctcaaagacagtctcggtacctgtgcgggtgcggctgaacaccgacggggcggccgagcagcttgctcacactctcgcatgacctggtaggtcttggacttgatttcctggt

SEQ ID NO: 2275 - DNA, 346 bp, Homo sapiens; identical to SEQ ID NO: 1835

SEQ ID NO: 2276 - DNA, 403 bp, Homo sapiens; identical to SEQ ID NO: 1838

SEQ ID NO: 2277 - DNA, 296 bp, Homo sapiens
gttttataaacctttattggaaaggctacaaactttatattgccaccacatttcttatgtttaaagtggttgtggggaagtaaccttggatacaaaactactatgctgttgaatcttacccaggcttgttgtaaaatattttttgtacaatggaggtagagtggataggtcaataatttaaacctcacaggacttgattagtgtcagcacaccttttttcattcaggttttcaggttctagcagaccttagaataaactgtggaatttgtttgcaagagttactggtggggacact

SEQ ID NO: 2278 - DNA, 348 bp, Homo sapiens
ttttttaggttttcaaagattttattaaaaaaaccaaagatatataacactaggacgggaccagcggacttgggggcagctcccagtctgctgatcagtaccctctgtcccagggctccacctggatggtcctgaggcccaaaccctgcctctcagctgcctcctgccctacaaactggtgactgctctcatccagcttctgatctgtttcatttaagatgattaaaatactcccctccccaattcgcttaaaaataattttcaaagattaaaaatttcatttgtgtgtgtgtgtttttttaaataagaactttaaatgtgggatatctccttcttcccctaggtcca

SEQ ID NO: 2279 - DNA, 504 bp, Homo sapiens; identical to SEQ ID NO: 1839

SEQ ID NO: 2280 - DNA, 338 bp, Homo sapiens
tgacttcttattgaatattttactgtgttaacgctcattatttatacagacattaggtttacagaatattctgttttacatcaccaaaattcacagtccgagaataacaacataaccaggtcccaattcctccatgcaccccacaagcttctgtccaccctattttctggacagaaattagcacaacccacaggtttttcctgggccaagtcttcctttgctgccactgtcttggcttctaatcaagctctgacaggccaacattgtgaagtcctcaccctttcccattcacttctggtctcctagtctagctaatccccctcccccagaaggttaag

SEQ ID NO: 2281 - DNA, 458 bp, Homo sapiens
gcgaccgccgtcagacatccacgacagcgatggcagttccagcagcagccaccagagcctcaagagcacagccaaatgggcggcatccctggagaatctgctggaagacccagaaggcgtgaaaagatttagggaatttttaaaaaaggaattcagtgaagaaaatgttttgttttggctagcatgtgaagattttaagaaaatgcaagataagacgcagatgcaggaaaaggcaaaggagatctacatgacctttctgtccagcaaggcctcatcacaggtcaacgtggaggggcagtctcggctcaacgagaagatcctggaagaaccgcaccctctgatgttccagaaactccaggaccagatctttaatctcatgaagtacgacagctacagccgcttcttaaagtctgacttgtttttaaaacacaagcgaaccgaggaagaggaagaagatt

SEQ ID NO: 2282 - DNA, 486 bp, Homo sapiens; identical to SEQ ID NO: 1844

SEQ ID NO: 2283 - DNA, 408 bp, Homo sapiens
cagcaacaaaaacctgtatttaagcggctaattccagagatgagtagtggagagagcaaatgagcctggttagagctcactctgggaggagtatgtggacgacacttggctgtctcttcagggggccaggctgggccctagcactcccggcagtggaaaggcagagctggctgccagctctggcctccgcctgggattcactcccatcctggctcagatctgtggctgtgcttcacccagtgggtcctccctcaaggagccaggcgggatctggaagggtctgcttatccccaccacagaacgcagactgttgctgtagtaacagaggagaaactcatcttcagtggtagggatattgctgatgtcgatgtaaacctggttcagattgtcgctgcaggagaccttgct

SEQ ID NO: 2284 - DNA, 249 bp, Homo sapiens
ttgagcaggagtgggctcaagttttatttggaatcatttaaaaaaaaaattcacagcagcataagtggggtcagaaggaccagagggtgggtggggccgagggagggcagtgaggttggtgcagcagcacaggtggacaggccaagggtggccaggaagacgagggcaggagcgtgggcagccgcatgtcactcaaggcgggcactccttgtgctaggaggggatggtgtccaaggcagaggagcgctc

SEQ ID NO: 2285 - DNA, 218 bp, Homo sapiens
ttaaaggttgagacacgtctaaccagtttaatgacttcgaaaccgtgcaaatgccaaactatggagcactagggatacaagaggcaccaaggcctggggggtgggggtgggggacactacaacattgtcatggggaaaacgggatcacctaatattggtaggggaaaagggcggtccactggcagctcagaactatgacatattcctcaggggagcct

SEQ ID NO: 2286 - DNA, 347 bp, Homo sapiens
tttttacaaagaaagaacagcggacgaaggtggccattttattttctcaaagccacactacctgctgctacacaggacataaaagtgcaaaattccaccaggaagggaaacaaaacagtcttgagacagccatgtctcagaggtgaagattggaggagattttaatatagggtgtgaattccaattcacatctcttccaacgggacctctttccgaagtcccgggaactaacattcatcaacacctctgacatcccagaggatcgcaacattcctgccaagggttattactcccatttcccagatgaagagattgagtccctgcagcacgcaattagacagtagcag

SEQ ID NO: 2287 - DNA, 396 bp, Homo sapiens
tttcagatcacgacaacaggtaacctttagtcagaactcaccacccactgtgttaagccttacatgacaatcaccatgaagatttacatacacatgttatatcatagtctcctcacaacatgtctaagaggtaggcacgtcattgttcccattttgcagatgaggaaactgaggttcagagagggcacttggcttgcccaaagtcacacagcagggagtggcagaggaagtcaggttgggtgaccccagtaactgctctcagaggctgggtgatgaccggcttcctggcttctctggaataaacctttgccaccacttcctgcatttcagcttcagtacaggcagagaatggggataggtgggggaatgaggtgagaggggagatgtttagaggtg

SEQ ID NO: 2288 - DNA, 339 bp, Homo sapiens; identical to SEQ ID NO: 1854

SEQ ID NO: 2289 - DNA, 368 bp, Homo sapiens; identical to SEQ ID NO: 1855

SEQ ID NO: 2290 - DNA, 337 bp, Homo sapiens; identical to SEQ ID NO: 1856

SEQ ID NO: 2291 - DNA, 437 bp, Homo sapiens
ttttttttttttttttttttttttttgtaatttaaactttatttcatatctattgttaaattacacaaaatcagtgaatggtttgtaaagctacaccaatggacagatgtttacagttgaaatcatgggatttacataatggcaaaaatgtatatgtatatttataacatcctctatatacaataatcagtatagacagagaaaatgcacttaatctttgcaaatcatgcacaccacagcaataacacaaaatgttttttctgtaacaagcttttccactggctcaggcttcatcctgctttccaacaatacctatcagttttaaaagcaaacattttcaattaaaactaaagaaaattgaaataccatagtgatctactaactattttaaaaacacaattgtacacaaaatagttttactctaaaacactgtgact

SEQ ID NO: 2292 - DNA, 291 bp, Homo sapiens
tttttttttttgtttttgttttttttgagaaagagggtttatttagcacatctcagagttacagctcttacagaaagacacttgtctaggcacagcaggtgtgttcaaatttatatgaatgactacttgagttcagacgggattacgtttttcttgcttttgacttatattatttcacacatcttgaattttagagtctaggcttacacatcgtccagtttcttggcatggcttgcttaatctgagctttcaaacttcagattaacctggactgaggctaagagtttataa

SEQ ID NO: 2293 - DNA, 452 bp, Homo sapiens
tttttcctgttacgccgtcaatgcagcaggcaatgaggggaatgacacagccctctcattcccggaacgtagtcaatctcggctctgcggatttcacagaacacactttgcctattgccggctccaacaagaagtaactttccaggaagctgccggccccggacgcgccaggatcgctgcctgcgctgcgctggccgccggggattcacccggggaggcggggccgcgggggaaggctcgcggggaatacagcacactttcccctaaatccctcgtccgcgccgagtgcagggctctcagagttcacctagtcccacctctcacccacaacagtttataaatggggaaggtcagacaagttagtagcagagctgggtctagaacccaggagttcgaatgcaatccgaggctcatatcgagactttaagttgtccgattccgaagtttatttg

SEQ ID NO: 2294 - DNA, 443 bp, Homo sapiens; identical to SEQ ID NO: 1859

SEQ ID NO: 2295 - DNA, 453 bp, Homo sapiens; identical to SEQ ID NO: 1860

SEQ ID NO: 2296 - DNA, 541 bp, Homo sapiens
ttttttgagtgaaacacatactttatttctgtataaagattctttccaggagaccaggctggaaaacacggaaacctcaggaatggcccctctccacttatactcctctcctcacaaatcaggccaatgaggtcagttcctgagtcccctttctccaggattccactcagtccttgtctcttagtgtcctgttgggggataaggaggagaaggactcttgttctctagcttctccgataaaggcccccccaccgcccctcaattactgtggtctaggaactgtgagttcatgatatacatcagggctcctccctgagaaagcatgaggaggaagaggaggaagagattcacacaatacaaatatcacagtgacagcaatgagatctcacattttggaagtcacgtaacaaagatggttccttgatatttcatattctattactactggacattacaccaagtaaacacacttggataaacacagggtgatgcatttctagaataagaatgtgacccatgcacagtacaaatcatggtgttt

SEQ ID NO: 2297 - DNA, 422 bp, Homo sapiens; identical to SEQ ID NO: 1861

SEQ ID NO: 2298 - DNA, 211 bp, Homo sapiens
gagaagtgtcagtttaatgaagccagcttatcagcagggcggcggagacacctgccccctcgcaggtgtgcctggctcgggctaaagtgcctgtgcagaacgaggctgcctggcggggttaggagtcggcgccctcgtcctcctcctcgggcaggatctccaggctgctgtcgggctgcggggctgtgtccgtcgagggcggcggggtggg

SEQ ID NO: 2299 - DNA, 306 bp, Homo sapiens
tttttttttcagtgacttatcaaaaatttatttcatataataaattatataatttattttcatctttaaacagtctacaccgaaaacatttttggaaacatcttttccttttggtaaaacaggttagcaggctgacatcagcttcatattctcatggctaaaatcccccacggttatacagttaagcatagcctttctttgtatttctcaagttgacaccacttgatataaactcagacaatataaacatttctagattttgcctaaggccttagctttaactgcagagtagtgagtaggaaatta

SEQ ID NO: 2300 - DNA, 589 bp, Homo sapiens
ttttttttttttttttttaatcagttaactttagttaaatgagtttatttgttcctttttaagaacctgttctaaaacactgcttcttaaagttcaatgagcatacaaatcacctgaggattttgttaaactgcagattgatttagtaaatctggggcaggcctaaagttttgcatttcttttttttttcttttttttgacccaggatccaaagcagtagagattttgcatttctaaaaaagttcccgggtgatgctgatggttctttaaggttctaaagggtgttaaattagccatgactcgaattagcagaaaaagggatgaaccaactgtacacataatccaaaagcccaggggtagacctcaggcatggctggatccagagggccacataatgttatcaggaaatatatttggccatttctcaggttggacttcctttgtgttaatttcattcccaagcaggctctccccaggtggtggcaagatgatcgcattagctcaggctacatctagcagctcacaggaactcattccaagtgctagaagcggctgcatcactgacaatactgtgccgggggaactcttt

SEQ ID NO: 2301 - DNA, 408 bp, Homo sapiens; identical to SEQ ID NO: 1864

SEQ ID NO: 2302 - DNA, 439 bp, Homo sapiens
ttttttttatagaatctagcaattaccaagacatttattagttgtcaaaaagctttacaatcagtttcatgatcagaaaatagagcaaaatttcaatattgttttctttataaaattgatgaatttctgaaaagataaaggatcatttgatttttaaaaatgtcagcttcatcacatgatgttccagagatctgaccccaaaagcttctcaagttttactatccatagtgtccttatttgtaactgagacccatccgttattttccatctgaagcttcttcagcagtttataacaaagtgaaagaagttggactaagagagccatcatggatcttgtcttcgtaatacacttgtcaacctttagaaatactttattctgcaaagaagtcttagttactgtctggagctggtggcatagaggaattagcttgtttatttc

SEQ ID NO: 2303 - DNA, 110 bp, Homo sapiens; identical to SEQ ID NO: 1868

SEQ ID NO: 2304 - DNA, 293 bp, Homo sapiens
gatcaaattattttcttttttgttgtttaccctatcctcaacaacatttttagtttaaattattgtagagattttttttgtggtggttattttttattttgctccaaaataataaggtgcaaagctattttatgcttaactgttgctctgtcaaaacagctatgcagtggagttgcatttgatgttctagagtttgattacatgcagagttgtatatagccaaaacttctcttatcaaactctgttatgtaggcatatttatatatacattaaagactgttgtactgtgtctc

SEQ ID NO: 2305 - DNA, 229 bp, Homo sapiens; identical to SEQ ID NO: 1872

SEQ ID NO: 2306 - DNA, 286 bp, Homo sapiens
ccactccattgttttattatgtacaaacgttacagaacgggggggacagacacgsgtggggtaagavgggcctggggggaggggttcacagagcagacggtgcactgggaccaggggagcagaacacaggccataactatagggcaggtggggcaggaacgggttaaaaacgggatccaagccagccagatcgaaggaggtgcgggggcgtcgtccccttctgttctccccccaaggtcacagtgcatgcaataaaatatatatacaggggctagacccgtcctct

SEQ ID NO: 2307 - DNA, 294 bp, Homo sapiens
  misc_feature (1)..(294): n=a,t,g or c
tttttttttacantaaangtgattttaatttttgacattcctggggtgatattccttaggtaagnaagtagnactgtgttaaattcgcataccatgggcactgcttcctgaggcagtaattnctttcaaagcctttccttccgtgttcaatactttccacatttgtgcgtttgaatggatccatgtgtttagaccattattttactaaacacaaaatcatttggcacaaaaaaaaaaaaaaaaaaacctnttaccatacttntctggtcatacaganttttaggcaccncagta

SEQ ID NO: 2308 - DNA, 468 bp, Homo sapiens
  misc_feature (1)..(468): n=a,t,g or c
ccctttcntannaaatatctttaataaaaataggtttctgcagaacaggttataaaacaggaatagcaaactcaaattcctgccacccaggcagagacgagtggagcaggtggaggggggctaacggagagcccagagcagcaaccaacacagagggacctggtcattgacttgtgggttgcgtgcatctttttttttttttttttttgggacagagtctcactctgtcgccaggctggagtgcantggcacgattcttggctcanttcaacctccacctntcgggttcaagtgattctcctgcctcagcctcccaagcagctgggactacaggtgcatgccagtacgcccagctaatttttttgtatttgttagtagacatgggggtttcaccatnttggccaggggtggtttnccatcttttggaccccgngacccgcccgttngggctcccaaagtgctggggtg

SEQ ID NO: 2309 - DNA, 515 bp, Homo sapiens
  misc_feature (1)..(515): n=a,t,g or c
gncnnancngatggagtcttcctctgtcacccaggctggagtgcagtggtgcaaccctggctcactgcaacctctgctccctaggttcaagcgattctcctgtctcagcttccaaattttataaaacaattttacattttaatccctgttaaagggtgaaaggactcagaactttgacgcctgagaaagagttgcaggttttggggtgatggctcagagaagttttcggaaggagatgaggtctccttttacatgtttaagcactagggcacgaaagaggccacaaatttgttctgtgtgaccccatgggggccggggaaggaaatctaggactnactgggtgggaagtcatggggcagtcagatgtgggactcaatttagtgtaaagagggacttttgaatagctnggagcttttccacagaggtcatcncggggnacggtnaccctcagcacttggaagccatcaagcaccaggttacagaactcaaccgggcttttttaaaacggttttaag

SEQ ID NO: 2310 - DNA, 478 bp, Homo sapiens
  misc_feature (1)..(478): n=a,t,g or c
agaacaataacattctttttaattatgaatctgcatattagagcattgggggacagctagtctctgctctacttggcttcagctgaggtggcttggaggttgggagtcggaatcatctgaaggcttgctcgttttcacgcgtggtggttgatgttggctgttggctggagcttcantgactacagctggaatatctagttgtggcctttctatgtagctgcttggattcctcacagcatgatggctggattccatggggggcatctcttgaaggggttagtggcaaagtttggaagagcatgcaggaccagaaatggtgttattgggtctcactggaatttatggtctctgatcattcctgatgccattcatgcagttctggtgtggatggtgtcatccctttgcaaccctccccgatttttggaagctgagaggcacatctcatctcatgggcagttttccttcccccagctcttgc

SEQ ID NO: 2311 - DNA, 510 bp, Homo sapiens
taaggaaaacaccatccagtttatttttctcctgattcatctcatgccaacacacagacttcaatggacagcaggcaaaatggggaggcatccccagagcaagccgattctctacacactgccttcccttcctgtaagactcatcaaaaaggcaccccaactttgcatggatctgctgttggtattccttggggtgaagccagaagtcaggctttccacagagagacgggactacatggccacctgggaaggctagggagtcaaagggcctgaggaatgactacttccctccacaagggcattccctgccctgctctgcttcctgggggcttcagcaagccttccttctagagctcctagaaccctcccatggtcaacacaacagcagcccagacaatgagatgcaagaggcctgagctcacaggccattcaggtaagccagggtgagctgggcagctagatgacccaattttcagtccagaaagctctatctgctggactaatacttcc

SEQ ID NO: 2312 - DNA, 407 bp, Homo sapiens
  misc_feature (1)..(407): n=a,t,g or c
gtttgtttatttttactttattatttttttgaatactgacaatacacagttggttgaatccatggatgtggaacctgtggatggaaagagccaatttctgagggtaacaaatgggaaaatgatttcgtttgagtctaagaggttggcagcnttccaattcccctctngctgagtgtagccaaaagaagtgaatggttagcacagggcttggaatacccaagtcctcaaaaatgttggagggtatgagagaaggggtaatcccaagatgaggtccctggagaaaggancctacagttaagggccacagcaggccttccagccaaagatggccagctattacccacttcctttttaatccagggtangtagatggtccatncctaatgntaataaggnggggaaaaaag

SEQ ID NO: 2313 - DNA, 355 bp, Homo sapiens; identical to SEQ ID NO: 1896

SEQ ID NO: 2314 - DNA, 448 bp, Homo sapiens
  misc_feature (1)..(448): n=a,t,g or c
caagccatgaaaagccttttaatgacaattggcatcacaggtataaataaatatcttcttctttccatctataatatgtgctacaaatatatttttcaaaggtccaacccaggttaggaggcttcaaggaccctttcttagctactgattttagtaattaaaaaaataaacacaataaacacccctggcatctttgtgagcgcccccctgcggagagcatcgagggctgtcaggcatcttcctcctgcagccgcagccaatggagcacacggagaactggagtcaggtgatcacgaaggggcttatttcactgggcgtggtctacgttgccacatgtgtcgctttgggatgaatgcattttttncaatgtgctgcttacacaattatgctggttccaaaaacacagttggattggacaatctaacataggattttaatccttagaggt

SEQ ID NO: 2315 - DNA, 253 bp, Homo sapiens
  misc_feature (1)..(253): n=a,t,g or c
gcagggtgggatgctttatttcactgtggcggggagggaacctggacagggggcggcaggcggggtggggggctggnactcaggcggggactaggcaggggaagggctgccccagnctgttgaggagaaactgaggccagccctgnggaaganctagcccagcngggtaaggagggtgggggaaaactgggtctgaaggaatgagggccccctccctctgggctttcctcctagagggcctcagtccctcctg

SEQ ID NO: 2316 - DNA, 476 bp, Homo sapiens
  misc_feature (1)..(476): n=a,t,g or c
gttttctcaactttattgtggacaggagaagggtaagtagacttgaaggttttttattttttaatgaagaaacaatttatcctgtgtttgataccagatgagactgtaagggtcacatactccttaagcctacacatcaattccaggtgaagtgcttcaggcttggctcattcngacacctangaaccgaanaangggcccntgnnggncangggttgggaagncctgtttttgccttagngccgtgcaggtttggggcattatataaacttttacaggcttgctgaagggaatggtgccctcgatgctggtttccacctgtggtgacatctcaccaccctccatccaggggcattttggaatgcgagcactggagttgtaggccagcagcagcctcacttccacctgggcatgcctctggtccaagcggtgtgggatagataaacctgagtgatgaagccggtgccgccctgggc

SEQ ID NO: 2317 - DNA, 416 bp, Homo sapiens; identical to SEQ ID NO: 1898

SEQ ID NO: 2318 - DNA, 144 bp, Homo sapiens
catttcttataaatttattacataataatattataataattattatcaataataataatataagaaacatagatctctgtggggcgtatcacaacgtcagggtcaggaggcctcaggactggagcagggggtgaaaccccggga

SEQ ID NO: 2319 - DNA, 473 bp, Homo sapiens; identical to SEQ ID NO: 1899
  misc_feature (1)..(473): n=a,t,g or c

SEQ ID NO: 2320 - DNA, 409 bp, Homo sapiens; identical to SEQ ID NO: 744
  misc_feature (1)..(409): n=a,t,g or c

SEQ ID NO: 2321 - DNA, 423 bp, Homo sapiens
  misc_feature (1)..(423): n=a,t,g or c
ctgattcaggatgttcactcctgtgttatttattatatagaaagatcaaggggactggttaaactagacatatcacatccagccgctgctaaaaactaaagggaaatagtaggtgacaaaagcaggggtcctgaacagtggtgggctcaggggattggagttttttcctttatgtttttctgtattttccacaatccacgcttttcattgccattccatcagatgatgttaaggaggaacacagatccagtcacctgaggggatacttcctcactgccaccttctcagggtttagaccaacatgtgggttctagtttcccccagncccaaagctnttccctngcaaggaagagatcagtcttttgagcaaattttggctcaagactaaagacacagaaggcgaggctcctgcatgcacagcac

SEQ ID NO: 2322 - DNA, 452 bp, Homo sapiens
  misc_feature (1)..(452): n=a,t,g or c
ttttttttttcttcttcccttttctttccccctttaaactaagatagcagtaatgcatctggacgtttgacttctaatagcttcctgccacgaaccaattgacacaaaacagaatagcttgttaaaggacagattttttcccccttcagggagncaaagcattaacatgtcatttcctgaccaggatattaaatagtttatttagaagaaatgagttgaagtgagcgattaagagacacaaactggacttttgttttcttttactgtagcacccaggtttcatgtcagtctgtgtgcaccgaattttttttttaagtgaacctcattaattaccagctaggtggttggcttgtttaaaagaaaaaaaattcttgggccaactgttccttccctggaatcctaacaagaagttaaatgctaacagtgcgatgccggggtgtgtgtttgaggca

SEQ ID NO: 2323 - DNA, 289 bp, Homo sapiens; identical to SEQ ID NO: 1905
  misc_feature (1)..(289): n=a,t,g or c

SEQ ID NO: 2324 - DNA, 111 bp, Homo sapiens
ctattttttgtataaacaaaattgcacaggtttatttgccacctccgcctcctccctgcctgctgctgtgtgcccttccacctgcagctcaggggagggcttctctggcct

SEQ ID NO: 2325 - DNA, 399 bp, Homo sapiens; identical to SEQ ID NO: 1906
  misc_feature (1)..(399): n=a,t,g or c

SEQ ID NO: 2326 - DNA, 423 bp, Homo sapiens; identical to SEQ ID NO: 1907
  misc_feature (1)..(423): n=a,t,g or c

SEQ ID NO: 2327 - DNA, 440 bp, Homo sapiens; identical to SEQ ID NO: 1908
  misc_feature (1)..(440): n=a,t,g or c

SEQ ID NO: 2328 - DNA, 211 bp, Homo sapiens; identical to SEQ ID NO: 1909

SEQ ID NO: 2329 - DNA, 341 bp, Homo sapiens
ttttttttttaccccagagtatttttattagggattcctgccaccatattaacatataaaacaatctggatgttgacatagaaatgcaaatttcactatacaaaggtaaggctccaatcacagtaacatggcccccatatctctagtatttcaatgaaataaactcattgtgaattcaccccgagttgtgtttataaatattagacaaaccacaaaatatattccaaatacataacattttacaatatttttcaagcacagacaaatacatactttactttacctacattgttttcatgatccaacttgcattagcactaaaggcaatattgtgtgtgtat

SEQ ID NO: 2330 - DNA, 342 bp, Homo sapiens
  misc_feature (1)..(342): n=a,t,g or c
gaccagtccccccaccattttaatgcaggggtaaactgaggctctgagcaggccagggtggagtggaaacacctagaggaagttgataagtcagcaagtcggcagcagagctgacaagctgggaccaggggctgtctcctttatgtcaaatgggccagcgtgacacagactgccccgggaaagcctcggaacttctcggattgggacagagtgctggggcagggaggaaatgtctcctcttgcttattcccttggccaactcaagggaagacgcttctcggggcctccaaaaccctngtgggtngattccatgtaactcaaggccccagggctcactgggca

SEQ ID NO: 2331 - DNA, 510 bp, Homo sapiens; identical to SEQ ID NO: 1910
  misc_feature (1)..(510): n=a,t,g or c

SEQ ID NO: 2332 - DNA, 396 bp, Homo sapiens; identical to SEQ ID NO: 1912
  misc_feature (1)..(396): n=a,t,g or c

SEQ ID NO: 2333 - DNA, 586 bp, Homo sapiens; identical to SEQ ID NO: 1916
  misc_feature (1)..(586): n=a,t,g or c

SEQ ID NO: 2334 - DNA, 363 bp, Homo sapiens; identical to SEQ ID NO: 1919
  misc_feature (1)..(363): n=a,t,g or c

SEQ ID NO: 2335 - DNA, 479 bp, Homo sapiens
  misc_feature (1)..(479): n=a,t,g or c
tgtagttcaataatattttattgtcaatagcataggagaaattcaatattgaatctcagaacaagaagaacctatttacaatgcatgtcaaggaagagatgggagaaggaatgtcacaaaattttttggtaaatacatattttttatagagaagtaatccatgaacctgcaacatggatagcttatccaaccaactttacaaattactattaatataagttacatgcttgccatctaaagtaactaaacccatagactgaaaaactatgtgtcaaggtaacgtgagcactttaatcactttacttatattttctaaaggcagtagtttcctctccttttcccgctatccatattaggatgaagagacaagttcctttccaacaccaaattctggatatcgggctattggtggaggaatccctggtggcgagtcagctagaagcccctggccacccaggnccaggtggccaacccaatgg

SEQ ID NO: 2336 - DNA, 513 bp, Homo sapiens
  misc_feature (1)..(513): n=a,t,g or c
ttttttttgaaagccgtaacatttattgaagagcggacatatgtttgcaaatcacagtgtgcatgggcatgcattacatggttcataatgctattccaattaggcttttcatagtgccttctcataacgtcctttaaaaaaaataataactgaaagggaaaagaaagtgtcaattgcaattacatttacaaaaccaaactgctgctttcaattagagtgaatctgtgcttcgctactcagatatacacatgtagattttccaaggcccatgcacacacttctgtaggggcagaaattttctatgaataatggctttagcaacccgaatagtatctctaaacattgacaagcttggggaacagggcaacaagtgcaatgaacaatacaatttctaacgtttgtcccagtcaacataccactttgccctggagatatttaacacagcatttcatttttggaatgataagggntaattcntccaatttanggggattatacngaatataccnataa

SEQ ID NO: 2337 - DNA, 386 bp, Homo sapiens
  misc_feature (1)..(386): n=a,t,g or c
agcggcacaaaacaacaattcattttatttctatcagttccataggttgattgggctcagctagttggttctttattagagtctcacaaggatgtagtaagataatagctgtggctgaagtcctctgaaggcttgttaaggctggacatccaggatggctcccacacatggctggaaatgatgttggctgtcagttgggagcttagcttgggatttcagctggagcatctacacaggacacctccatgtggcctggacttcacagcatggtatctgcaaggagatggagaatgcccgtggaaatgggtgggatataagcttccggcaaattgcaagcacaaaattccgatcnaaagcccccaaaagcaccatcaaaaccttaaacc

SEQ ID NO: 2338 - DNA, 403 bp, Homo sapiens; identical to SEQ ID NO: 1925

SEQ ID NO: 2339 - DNA, 410 bp, Homo sapiens; identical to SEQ ID NO: 1927

SEQ ID NO: 2340 - DNA, 434 bp, Homo sapiens
  misc_feature (1)..(434): n=a,t,g or c
ttggtgggtagctaatatggtatatttatttcacagtttcacatctttatcattgtttttatataaaaacaatgcttaagtggggtttcagaacagatatttccttttaaactttttttaaaaaatcacaaatatgattggctcatacaaccacatttcacctcttttcaccagcactcccacccattcccgttagaaatattttgttaaaaaaatcaggtgatcaaactcatagaaactgaattgtgagaagtataatggggaaaaggaatgagaacctgtggctctaggggagttacagaagggaaatcatcttttagagcccttggtttatttctgacaggaaaggtaaagccgtgcatttattagacccgggangctanggaatttaaagatggcgagattgtctaaaataactgaggctgaactgggaa

SEQ ID NO: 2341 - DNA, 408 bp, Homo sapiens
  misc_feature (1)..(408): n=a,t,g or c
ttctggtcataatgaaacactttatacagacaggaatagacaagggatttctgacacactcatgctttggatgtgtcagtacaagacagtatgtgagactgtgattctgccaggcagaggggaacgggcatgatttatctgctggcaaataagtctccactataccctaatcattcttttatcctaagtgcatcatgatctccttagtcctgggacgtcaaaatagtcaattatgggctccttggtaatttcctggtaaattactgctcccaggatcctggtctgacngangtcggtnatggggaatcgntggtggaggccgtgctgnatttccctttcaagcanacctgtcagcgtggtaggnggccaaanggatttccccctgatggcagtgaccaccacattgcg

SEQ ID NO: 2342 - DNA, 613 bp, Homo sapiens
  misc_feature (1)..(613): n=a,t,g or c
tagggggtctgttttataaatattttcttatcatacttttattataaacttttttagtatgaaatttgcttcaactgttacaaacagaatcatttcctatggggtcccctccacataaggaagttattcctgtaattactatttttaaatagtcttcttaactgtgggaaaactttaccctcccccagcacgcacacacatactctcctgtgatgaggctgaatgctatccagtgcactggttcagtcagcaatctgcccatgttcctgggagaaatcagtcccagtccttttgctgtcatggtgtctccagagccacccctttctgtaacaagcattttgaaattcatccatgctcatctcatttggatttcaatgtttcctcccactcaacagccgattcggagttcttgggaattgttggaaatattgattgcattttacttcgaaagtcgttcatactgtgaactcccaaagcnttccagactgcgacgaaatcacaccaaccccacaccatgcatacagggagncccagcccagagctcgcaaggcaagggnagaccgcnttccgggaatgcagccgtgggcaacttcccctaatggaccattcnggg

SEQ ID NO: 2343 - DNA, 484 bp, Homo sapiens
  misc_feature (1)..(484): n=a,t,g or c
gcgtcgacttgagtctttgtaccagaaagcaatagtngctgcccatatagcgctgatgcggaggaagtgcttgatggcctggacttcctctccctgaagtagactggaagcgtgacacattccgagccatccacggaagtgctgcagacctcgtacacgaaaatgtcatcccgaggcatgatgtggtttaaaccttcatccatttggaaaattttgtggaatcggtgattatacacatctgcgaccaccatattttctgcagcaatgccagacagcctggagagagcctcgcacaggtcggacacagcccccgtcagcggcacagtcacacggtactgagtaggtctgcagtgagggtcagcaggaaccaggaaaacctcataactcgatctttcttcaagggcagtggnagcgttagatagcaaaatgggtcaaaggtnccggaaacctnngcaanttttgggnaaaccaagtngatttnaaa

SEQ ID NO: 2344 - DNA, 512 bp, Homo sapiens; identical to SEQ ID NO: 1934
  misc_feature (1)..(512): n=a,t,g or c

SEQ ID NO: 2345 - DNA, 456 bp, Homo sapiens
taagagagagggtctcgctgtgtcgcccaggcttgggtgcagaggtgcaatcatagctcactgcagcctcgaattcctaggatcaagcaatcctcctgcctaagtctcctgagtaactaggaccataagtgtacaccaccatgactggctaattttttacttttccgtagagatggagtcttgtgatattgcccagcctggtcttgaacttttggcctccgacaaccttcccatcatggcttcccaaagcattgggactacagacatggactagctccatttcttgatgtgaggccataagcagaaccaagcagactcaaggcccttggttgcttggacacaattagctattaataacatccaggaaaaagctcagtcttctgagtcaggaaaacctgggctggagtcctggctacactggtcaccagcagcagaagcctgggcaagatgcttcac

SEQ ID NO: 2346 - DNA, 410 bp, Homo sapiens
ggtatttagaaatttttttaattgaaattttgaaaattttttgactctaaaaaggtattaatgaaacataaaacttaacaatgaaggcagaagaagaacatagtagaaacaattactacaaacattttagcttccaatttcatataatgttatacagtttagaaggagatagtctattcgttaatagaaatagtaagtgtacttttttagcttctgctgtgggagcatggcatacaccagcttgggtggtggggaaagcgggtctgtaatgttccagcctctggttggctccatcggctgcttttgggcaacacccagctttagagatcttttttgttactttctgactttgcttattctttttcttttccaaccaagaacatgctaattctttgaaaattagtttgcca

SEQ ID NO: 2347 - DNA, 434 bp, Homo sapiens; identical to SEQ ID NO: 1937

SEQ ID NO: 2348 - DNA, 314 bp, Homo sapiens
gtgtttctgggtcacttcctccatcactatttttatttttttccttaaactttatttttggcttttctgtctctgtagagacccctccttcttctgcttcctgttccccatcagaatcactatgcgaatctgatgatttggattcatctagggtgccaagtgaattttcattgaccttactagaaggcagatcactagtgtgtggaatgaaatcatcaggtttctcccatccgggatcccccggttcctgaataaaagtaatagggaaaaccatcttcacttaaaccttctacccaaacggtcttcactgctgt

SEQ ID NO: 2349 - DNA, 442 bp, Homo sapiens; identical to SEQ ID NO: 1939

SEQ ID NO: 2350 - DNA, 350 bp, Homo sapiens; identical to SEQ ID NO: 1940
  misc_feature (1)..(350): n=a,t,g or c

SEQ ID NO: 2351 - DNA, 420 bp, Homo sapiens
aaaacttttaaagaagttgtttattgccaataattaaagagctcaaagggaagtcatttaaccatgagattgccaaatagaactctacaacagctgattcaacctttttaaaattttccctggggagagacttcactactatctctgctgatggactccatagttctcatactttacctgaaagttcttcctaacatctgatctcaacctttcttgccggggcattggcctgttttcccagccaagccttgtttttgtttttgaggaacgaacagcttttttgggtacagaccaggagtccatgggtcttgaggacctctgtgtatttatcagttttcttctccacattctttttggcctgtctccatagacttgtgagccccatgccttgtttaagggggaaaaatggcatttccctac

SEQ ID NO: 2352 - DNA, 239 bp, Homo sapiens; identical to SEQ ID NO: 1942
  misc_feature (1)..(239): n=a,t,g or c

SEQ ID NO: 2353 - DNA, 160 bp, Homo sapiens
  misc_feature (1)..(160): n=a,t,g or c
ccgctcaccctgatagcctgggtgttgatattcactttacccgcactcagacacaggcgaccttgaagcagttctcggtgtgtagagtccacgtgacagtccccacagcctccccagatagctgtgtgcctgtncgctactgctgtgccattttcccaac

SEQ ID NO: 2354 - DNA, 310 bp, Homo sapiens
  misc_feature (1)..(310): n=a,t,g or c
cagtgttgtaccatattgaatttatttnatgttaaagaaagaaatgacacatcgttatttgtttttcatccagcccccagtctatgttggtctgtgtcagggattggcaaactacaacccatgggccaaatcccatgcctatggtggtaaataaagtttcactggaatatagctctgcccaatgcatttatgtactgtctgtggctccctctactacaactagagggttgagtagtgcatcagagaccatacagtgccctgctatgctgagaaatgtttttaaataaaatgaatgggtaaaatcgttatt

SEQ ID NO: 2355 - DNA, 340 bp, Homo sapiens
  misc_feature (1)..(340): n=a,t,g or c
atactaaaagctatttaattgtatacttttaagtgggtgactgtatggtatgtacattatatatatcaataagctgtcttaaaaaagtgaactcaggggttgcaaatgaccacacatctgagctttagtccccattcatcaggggcataacctgtggagaaaaatcagggaattatgcagtatatgggttagacaggnaaacattctaggaagancgagattctatgtataancttaagggcaataaagcatcatggaaggttttaagcagtatataatcagatctacactttagaaaccccccaaatcactgaattgtacatttcaaacaagtgaattt

SEQ ID NO: 2356 - DNA, 265 bp, Homo sapiens
  misc_feature (1)..(265): n=a,t,g or c
gatgtttgtcatttttatttgcaatactttaggtccaagtttcaaactgcaatatttttacactcaagacacagtcatgcacaatccatatttcaattttctattgcttcaaccacaatttaaaataacaatattgaaaacaaaaatccttaaaaagnttggntgctgaggtcagaaggntggnaccataccatcagcaggnctacaaaagnaataacttacttaaaaatcaaacaaacaaaaagnccntaaatacctttaatcc

SEQ ID NO: 2357 - DNA, 381 bp, Homo sapiens
tttaccagtttttaaacttttaatgttctgaagtataagtaaacacatctcaacagctttacatattttcatatattttattttttaaactctcataactttgcaagctagcagtaaaatattgccttcaatattttactaattagcaccgtataccttttaaagctaactggaacattgattcattataaatgattgtaaaataaaatgatcatttcaaatgccaaattaatctcaaataacaagtgaactattattaattttatctctttttttggctctacgcacaaagatgtatttcaaagatgaacttaattatattagtatcagttttgtcaatctagcaaatcatagtatcacagtttaaagcaatatttaatc

SEQ ID NO: 2358 - DNA, 384 bp, Homo sapiens; identical to SEQ ID NO: 1944

SEQ ID NO: 2359 - DNA, 223 bp, Homo sapiens; identical to SEQ ID NO: 1945

SEQ ID NO: 2360 - DNA, 541 bp, Homo sapiens; identical to SEQ ID NO: 1946
  misc_feature (1)..(541): n=a,t,g or c

SEQ ID NO: 2361 - DNA, 445 bp, Homo sapiens; identical to SEQ ID NO: 1948

SEQ ID NO: 2362 - DNA, 445 bp, Homo sapiens
ttttttttttttagaggtttccaacacactttattttgcagaccactggtttgtagcttttgaggaccaacatctctatcaattcctataaaatgtccaatcactttcagttccgtagcaggctcttccatactgcacaccatgcttatggctggaggtccagttacacatgcatgaaggctgccctgcccactggttcctggaggagggcgcgtccgagttaaagcctcttccaggagcttgaacttcccaggggtcatttcctttggcaagaagtcagtttacatgtgcagctttggtgcctgtgagcagaaagcaccagaaatgggcaggatgtgctgctttttctctcacgaagatgggcacttgaggatccagcgcccttgtgcttaatgacaggaatccctcctcattgcttagtaggttaaaatataaggaagcctcc

SEQ ID NO: 2363 - DNA, 442 bp, Homo sapiens
gcggccgctccacatgcacagaatctactaggatttgtcacggccgggtggcaccgatttgttttgactatacaacaaacttttttttcaaaagtatttgttcagataacttaaaaataatataaaaataaacaatgaatttgacttttcctcaaaataaaaaaaaaaaggatggaaagtctaaacaatagcatatttttgaagtacaaatgaaatgtaaagacactggttcagcttaacgaaacagatcaaagagacaagttcttggctaatgctcttcccagtatcacaacaccaggccgtgatcaaaaaccaatacagacaagaaagaagaaaaaggaaaaggtgggaaaagcaatgtacaaaatttcaaagataaatacaatatttataattgatatgttacaaaataaagtcccttagcaactgcaagtgttcatgg

SEQ ID NO: 2364 - DNA, 385 bp, Homo sapiens
ttttttttaaattaaatcatctctcttatatatgcatccatcttttgttgaatacaagaggctccttttaaatatatacattcagtacttctacatttatgtattcatttaatctctgtactgtagtaaaatatgcattgttttaattcataaggatttcctggcaacaatcaggttgatactcactgcgtttgctgattaagagcttagtgagccactccagggaccaattctcccttctggatgcggagaagcccatgagctattttaggactataatgagactctactgtgaaagcaaaatctgtctaatcttattcttatcacttacatttgtgtaatctgtctatttaagctacctttgggagtaggggtaaaatgttac

SEQ ID NO: 2365 - DNA, 501 bp, Homo sapiens; identical to SEQ ID NO: 1952

SEQ ID NO: 2366 - DNA, 566 bp, Homo sapiens; identical to SEQ ID NO: 604

SEQ ID NO: 2367 - DNA, 392 bp, Homo sapiens
ttttttttttttaatcttgccttttttttattcaaaaggatcacaagcttcacatcaatttggcttcaaaaagacctcatgtcttaaaactaagtaccgtgacatttattttgccatctgtgacagtttcacgtcgaaaaagcctcaacataaaaaaattaccttcaaaacccactgagacattctcacataaactaggatactgcacaaacaataaagttctttcttcaatagtcaatcttttcaatttcatccatgtcttcagcgttgagttgcttaatactgctgttaaagtggtcctggattttcatgagcgagggcagctcatctacttcaatcatgttgaaggcaaggctctttttcccaaagcgccccgtccgccctatgcggtg

SEQ ID NO: 2368 - DNA, 318 bp, Homo sapiens; identical to SEQ ID NO: 1957

SEQ ID NO: 2369 - DNA, 451 bp, Homo sapiens; identical to SEQ ID NO: 1958

SEQ ID NO: 2370 - DNA, 389 bp, Homo sapiens
tttgatttacaatgaagaaatttattagttcacagttctggacgctgggaatttcaatatggaggtgccaacatgtgttgagaggcttcttgccgtcttcttcaaatcatggaaaaggttccccaaattctctctcctttctgaagcgtctcttcgaagataaccctttctaaacatctcccttgagtacacataaaagtttactccaaatttgtgaaatgtactggcctagggagatgctcagtcaatgctgattaattttaggtagaatagaaatgtcaggcacagtgagcacctttgctgtgattgattgggtgtcgattctctgctatgaagcgaaggggtgtgctggatcaaacacatccctctggtgactagctctctgcttt

SEQ ID NO: 2371 - DNA, 292 bp, Homo sapiens
tttttttttaggataacaccatttaatgaacaatactggataacattaagtactattatcactttaaaattcaaacaatcttccaaacatcaatacatacacagttagtttaaaatcacagacaaatcggacttgagggtaaaagtgaaatcctcacctcttgcccatgtttgactttgggatggaattcagcaaagctctcccactgcagattgggagaatcaggtatttctcccacatggggggctgccagggaaggaggaccctatagggtggccagcaaggggccact

SEQ ID NO: 2372 - DNA, 335 bp, Homo sapiens; identical to SEQ ID NO: 1962

SEQ ID NO: 2373 - DNA, 408 bp, Homo sapiens
aaagtttaccataattttattgtaatatcagaatcacataagatatagagttaagcagaaaactgatgaattttcttcagatgatctttaagaatctcaaaagccttgaagtttgctatcttctactgtcttattagaaggataaaaaactttgaatgaaaatccacttcttggaaaagagccagggtttatgcagaggcattcggtatttgtcgtagtgaaaggatcatatttgtctgcaatgacaagtagatcgggcacaggatacactctcaaagcatagtcatatgcccaatacactgggcagacataaagaggtaggggagtcagatgtccttgggataagatagtctttacaaagtgattaggaatagccaaattgctgctaggaaaacggacgcagtttct

SEQ ID NO: 2374 - DNA, 406 bp, Homo sapiens; identical to SEQ ID NO: 1963

SEQ ID NO: 2375 - DNA, 455 bp, Homo sapiens
tttgccacagggtaaacttttattttagaatccaatcttttccccacacatacacaataaattaaacagaatccacagtaaatgtacattttttaacataaaaagtcagttactgttacttcatgatcacatgaggatcgtcacagctccgtgtccattagcacattaccctccttgtccttaactcttatccgaccggatctgtacttcgtttcttgatgaccgtttgcatatacggttttaacagtgccatctgggtattcccgtctcttgaactgggcagtatgtagttctctttggccattattaaactctatgagtttgttgccatcacgttgtactctgacaattgtaccatctgggaaaatgctttcttcttgtccatcaggaaataagtttttaacagtctggtcagggaacgtgaatttctttcttccatctgggtaatgtttttc

SEQ ID NO: 2376 - DNA, 419 bp, Homo sapiens
tttacaaatttaatctgtattaactttatttaaataaatgaccaatctgtcacccaacatgtcatgtggcttctctgcactgatcttgctttgttttcaaacttgtcacttgcaaatattataagaaaaaaaggtcatctaaaatgagttaaactggttacaattggtctcaacttttaagaatttacattcaaatggaataggacgcagtgtttttaaagtgcaagatatactcttttggctcaacatgaaacattatagaactggaaattaccgcagtcatttctcctacaacaaacttagttaaaagctgttttgaaagttagttagccatcagattataaactatgaaaaacactgaaaagtcatttaaaatgagtatataaatgcaaattacaaataaaaccagtgtgggagag

SEQ ID NO: 2377 - DNA, 265 bp, Homo sapiens; identical to SEQ ID NO: 1964

SEQ ID NO: 2378 - DNA, 352 bp, Homo sapiens
tgatattacaagttctttaatgaataccttggtaacttgctgacaacttaaaagataataccactgatattcaaatacagtttataatcaagtccagtggcagatactgaaccgcccacctccacctcaatttgtgaaaacctgtcttttgtagggttggctaccatgggtaattacgcagcactgaataaaaaatagaatatttttctaatacttctacaaatataataaacacagtaacagtttgctgcagcgattttctttacaaagaatatttgggcccagtgctacagaaaaacatgaactacatcttatcgtcacaaaatagccattataaaatgaattttgcagc

SEQ ID NO: 2379 - DNA, 425 bp, Homo sapiens; identical to SEQ ID NO: 1966

SEQ ID NO: 2380 - DNA, 443 bp, Homo sapiens
cggccgcggaggacctgtcggacgcgctgtgcgagtttgacgcggtgctggccgacttcgcgtcgcccttccacgagcgccacttccactacgaggagcacctggagcgcatgaagcggcgcacagcgcagtgtcagcgacacgagcggcttcagcgactcggagagtgcagattcactttataggaacagcttcagcttcagtgatgaaaaactgaattctccaacagactctaccccagctcttctctctgccactgtcactcctcagaaagctaaattaggagacacaaaagagctagaagccttcattgctgatcttgacaaaactttagcaagtatgtgaaacaagaagttctgggtcctttcatcataagggagaagcttcagaaagttccgaggacctgctaaaatcagctactagaatctgctgccagaggggac

SEQ ID NO: 2381 - DNA, 116 bp, Homo sapiens; identical to SEQ ID NO: 1968

SEQ ID NO: 2382 - DNA, 164 bp, Homo sapiens
cagagaaataagcttttaatggcgcaatgttgcatatacgggtaacttgttctttgagaaatataaactcaaactcacaagttgtcatgataacatatgcagtaatatgaccattctacaacagagtcacccacaggtaaaacacatgactgggctttgagctc

SEQ ID NO: 2383 - DNA, 386 bp, Homo sapiens
ttttttgagacagtcttgctctatcacccaggctggagtgcagtggcacatctcggcttactgcaatctccacctcccgagttcaagcaattctcctgcctcagcctcccgagtagctgggattacaggcatgcaccataacacccaactaatttttgtatatttagtagagacagggtttcatcatgttggccaggctggtcctgaactcctgacctcaagtgatccatccactcaggcctcccaaagtgccgggattacaggcatgagccaccgcacgtggcctagatgaaagtttttaaaagcctgggctaataaaatcatccaccaatcatttttcttatggttaaagcagccaaaaagctgtcacagcatttttgagatga

SEQ ID NO: 2384 - DNA, 513 bp, Homo sapiens; identical to SEQ ID NO: 1974

SEQ ID NO: 2385 - DNA, 166 bp, Homo sapiens
ttttggtagctattgaatcagggccacacatttaattgatattatgatcaagatgttcaaggcaaaaaatactattacttatttaatgtggaacaagtctagtctttctcttgagctcccacctgctggttaggaggcaacaatgttatttggatcctgtttagag

SEQ ID NO: 2386 - DNA, 497 bp, Homo sapiens
aattttaatttacaatgaaatgaaatgtgacacatgaagcataagaacacaactgaagactgcaaacaacctaaatcaattaccgagtttgctcaagcctccaagcaccagtcaaatatcgaagtcgtataaaaagtaggactttacacatttgtagccagctccagaatggaactaatttagaaccttcaaattctgtccagttgacagcaatttctgctattggaattttaaagaactgtgctatgtacagtagttctacatcaaatgccctgagcaattgattctttttctaaatgagctcgagatccacatgctatagccaattgattaggccaaggctgtagatcatttagccccttttctaatttctcaacatctggaaactttgtggctccatcagcatctgccataaggatcttttctcctcgagaactgaatatacccattctaatcgctccaccttttccacgattcttcaccagggttatcacacg

SEQ ID NO: 2387 - DNA, 233 bp, Homo sapiens
gaggtgaagttcttgtttattgttgcagcaactcttatacagacattagcgttcagttaaataaaggaagatagatagcacagtaaatacatcacaaccccaaactggatgatgtsgccacgggacggaggavsghasgsagggagggaccagtsaccgactgtcaaggaagtacattcagtgggtgtgcsggtgtccacattccaggctcacgtgtagatattccccbccat

SEQ ID NO: 2388 - DNA, 231 bp, Homo sapiens; identical to SEQ ID NO: 1978
  misc_feature (1)..(231): n=a,t,g or c

SEQ ID NO: 2389 - DNA, 272 bp, Homo sapiens
  misc_feature (1)..(272): n=a,t,g or c
catgtttttatatttttatatatttttttgaaaaattacattaacagcataaaattcaaaagttatacagaagaaacaataagangtaaatctttcgtcctgtcctgtgccccatctagtaccttaagacaatcagtgatagtagtttcttggctgtaccttcacaaatattctaggtatttatattatttatttncccgtacacaacaacagcgtattatagacaacattctctcctggcttttttcacttactctttatccatattgata

SEQ ID NO: 2390 - DNA, 268 bp, Homo sapiens
  misc_feature (1)..(268): n=a,t,g or c
aataaaactgtttatttatggnacacattagaaaagaaaggttcgaaaacnncacaaaaacaacgggatgcatttaaaatcggtatgcagaggcatctaaaggattatacaaatctaaaattgcctaaaagattctttacaaaacgcaaatgaaaggctcatgcagcacatgancctggnttgcccctnctctgtctctcctttgcctcgatgctttgagtacagtaacccttttnctcagttacctttnctccttgaggctaatgaa

SEQ ID NO: 2391 - DNA, 442 bp, Homo sapiens; identical to SEQ ID NO: 1981
  misc_feature (1)..(442): n=a,t,g or c

SEQ ID NO: 2392 - DNA, 470 bp, Homo sapiens
  misc_feature (1)..(470): n=a,t,g or c
ctgggaatatttatttatttatttggnctattaacaccaaganctgcaaaaaacaacctctaaacacaagataagaaaactcgaacattaacattctncaattttgtgtaagcnctgcagtacgganaatatacaaacttnaaacagctgcaaaaatagtgtctntgggagaanatagagtctctacatcgatacaagaaaaatagggcatttttctaatccatccagccctggggcgggncggagcngtntagagtcgccatttgccacctgggggggattgccagctctcctccccactacccacctgggggctgggcgggctgggctgctacttaaggacaatctttaggtcaggggtgaaagcgagatgaaaatggccacttggggaaaacacttgtttcctcccnctgccagcagctggattgggncaaggtgttatgggcccttaggggnctttttgggtcagt

SEQ ID NO: 2393 - DNA, 391 bp, Homo sapiens
  misc_feature (1)..(391): n=a,t,g or c
ggcttaggaaaaacatgtactttattggcaaattgttttagctgtagacggatggatgattctacagccacactcccctttccgggtgtacatccggggcctgtgcacctgcgcggaatcaggcaactttgtttttcccggtccccaaaaagctcacctttgacacaccctctatatgcacaggaaaactgctcttcttattcagggtctctttttgtggtggaattcagagaaactgggttgcaacatctttttagggagaggtcgagtatgttttttcattcgagtgactctgcatgcttaagggaatctgagtcggtataaaggggctagaccnctgaatttggcgtacagcgttcccngggtngcccgcagccccagggtacaactg

SEQ ID NO: 2394 - DNA, 471 bp, Homo sapiens
  misc_feature (1)..(471): n=a,t,g or c
cgcatatccagtgtaaatttatttttttacagcatccaataaatcccagtaaaggagctaaatgaagatcttaacatgaaaagtggtgtcagagctctttaggcaatgctgaaatgcacttgattttatgcccgtgggtggtcggcagcaagttttatttgcaaagcagcattagcaaacagaagcaattgcaccgtaaatgagtaacctctaaagtatcagtaattatatttaatgaaatgtccctcaaagtccctttgttatttgcaagtgacacattgtaaggaacttgcccatcccgctaagctgacttctcagccgcttcagtctcctgctccggacagcttctcttctggacagaactggacatccaggggggatacggagccccttgantgccctgccttgggccaaggttgtaagngggttaaggacnggggggaaaaanttccccccngggaactggagtct

SEQ ID NO: 2395 - DNA, 446 bp, Homo sapiens; identical to SEQ ID NO: 1985

SEQ ID NO: 2396 - DNA, 432 bp, Homo sapiens
caaacaattgatttttattgcagtaagagtaacaaggaatcccacccctcacatgccctttgctttatgtaaaaacctgtccagcagaataagcaacagtcaccctcaggaggcgatttagccccaagtgcccatagaacagcctcaggcacgacttctgtgctccctcgctgttcccagagccatctgccaagaccaggaattcacctttggagtctaacttgttttctctttttttcacctctcaaaaaataaaaagccttcagtaatacagcccaaggattacccgtgtgtctaaaagaaggatagattcccataaacaatgttgtcagcttgagtgagggtaaacacagaaaggcacacaataaattaaagcagaccttgactcttcagagggcctggcggtgacgtctggggggggccagatctgcc

SEQ ID NO: 2397 - DNA, 440 bp, Homo sapiens
  misc_feature (1)..(440): n=a,t,g or c
agactgcatagggctcggcggggaggtgggccccagcagctgctaagagagtgaaggagctggaccaagccccgggggaggaaggcatcacggcaagggaagggtcgcagtcacaaccacacctcgagagggagacctgtggccaaagccggggggnacacactacagctgttcccgtgcccactttggtcctgagagactcagggccaggggtccagaacagttcagcataggaatggggcggggaaggcagagagggagaaggggctggctccgaccaagaagcagaancatggggatagctttgaatcttgccttcacaccctccggcctaactctatggagccacagttccaattgcttccaaccccttggggaaacccccccggccccggccttcctttggggacaacagagggcattaaagggattgggcttac

SEQ ID NO: 2398 - DNA, 471 bp, Homo sapiens; identical to SEQ ID NO: 1993
  misc_feature (1)..(471): n=a,t,g or c

SEQ ID NO: 2399 - DNA, 418 bp, Homo sapiens
  misc_feature (1)..(418): n=a,t,g or c
gtagaaggaaagcattttattgcaaataactaatagttacaaaagcactttttaaatgttattattagatgttaagccgaaaatctagaaactaacatttacccaggttacaaaataagagcttcacatttttcaaagtctctaagggtaaggtacatccccagataaaatgagtataggccagtctcctttggntttgggggatccttnccaaanattttccagactatttagctttccttgtgtagttacagctcaaattagaaactgaagaaacagcaagtggccaggcagggtagaaagcaaataaactgagctacctgtgcctttttccaaattcagtatatgtgcttggctcctgaaaaaaaaaattctgatattgtaggcattccgattacttngtgagatattagtgaag

SEQ ID NO: 2400 - DNA, 383 bp, Homo sapiens; identical to SEQ ID NO: 2001
  misc_feature (1)..(383): n=a,t,g or c

SEQ ID NO: 2401 - DNA, 260 bp, Homo sapiens; identical to SEQ ID NO: 2005
  misc_feature (1)..(260): n=a,t,g or c

SEQ ID NO: 2402 - DNA, 277 bp, Homo sapiens; identical to SEQ ID NO: 2008
  misc_feature (1)..(277): n=a,t,g or c

SEQ ID NO: 2403 - DNA, 309 bp, Homo sapiens
  misc_feature (1)..(309): n=a,t,g or c
ttnggtatgtggttcagctntttattntctccatggggtgggtgaagaggagtggcccagctgagctgaggaaggtgaccactgagaacccattcaacctgctgagcagcttgggcagaaaggagcaggacttgggacagacgactgaagatgcagagaccccatgggccccacccctgggccttcctcccatntggctgcaggcatcctntntnatcantgctgggttgcttcctggttaaagggccanaaggtnaaggagatgggnttttcangcatcagaatgaggttnaatttggtgcccacatc

SEQ ID NO: 2404 - DNA, 405 bp, Homo sapiens; identical to SEQ ID NO: 2009
  misc_feature (1)..(405): n=a,t,g or c

SEQ ID NO: 2405 - DNA, 493 bp, Homo sapiens; identical to SEQ ID NO: 221
  misc_feature (1)..(493): n=a,t,g or c

SEQ ID NO: 2406 - DNA, 326 bp, Homo sapiens
  misc_feature (1)..(326): n=a,t,g or c
gtggtcacagtggcaacggttagattggtgggcagggagaagttggacccattagagggagagggtggcatgctggagcccatgctggtcacgatgctcccgatgccaatccagaaggccatgacgagcccagccaacaggccacaacagcaccaggagggttagcacatggaaagaacattccaaggcagaagagtcccagcagcggtcccccaaccatgccaaagatgctgattgctgcctgcaacnaggtcccatntgggaggaaatataggccattcctagacaaagcagcccatagccaaaggaaaggncttctgggaaag

SEQ ID NO: 2407 - DNA, 424 bp, Homo sapiens; identical to SEQ ID NO: 2011
  misc_feature (1)..(424): n=a,t,g or c

SEQ ID NO: 2408 - DNA, 429 bp, Homo sapiens; identical to SEQ ID NO: 2013
  misc_feature (1)..(429): n=a,t,g or c

SEQ ID NO: 2409 - DNA, 246 bp, Homo sapiens
  misc_feature (1)..(246): n=a,t,g or c
gaaaatgctttaataagtgttgacaacactgttttgcannntgtaaaggtactatacaaatncttaatacaaaaagaataaattaaaagcagatttctttttttaattctgcaactttgtctacaacgtacatctttttcattgattacagttgaacagaatccagtaaaatcattttacatgctctacagtcagtttcaggggcancctaatctttttncccccattattaaactagagtccatt

SEQ ID NO: 2410 - DNA, 852 bp, Homo sapiens; identical to SEQ ID NO: 2015

SEQ ID NO: 2411 - DNA, 1258 bp, Homo sapiens
ggctctggactggggacacagggatagctgagccccagctgggggtggaagctgagccagggacagtcacggaggaacaagatcaagatgcgctgtaactgagaagcccccaaggcggaggctgagaatcagagacatttcagcagacatctacaaatctgaaagacaaaacatggttcaagcatccgggcacaggcggtccacccgtggctccaaaatggtctcctggtccgtgatagcaaagatccaggaaatactgcagaggaagatggtgcgagagttcctggccgagttcatgagcacatatgtcatgatggtattcggccttggttccgtggcccatatggttctaaataaaaaatatgggagctaccttggtgtcaacttgggttttggcttcggagtcaccatgggagtgcacgtggcaggccgcatctctggagcccacatgaacgcagctgtgacctttgctaactgtgcgctgggccgcgtgccctggaggaagtttccggtctatgtgctggggcagttcctgggctccttcctggcggctgccaccatctacagtctcttctacacggccattctccacttttcgggtggacagctgatggtgaccggtcccgtcgctacagctggcatttttgccacctaccttcctgatcacatgacattgtggcggggcttcctgaatgaggcgtggctgaccgggatgctccagctgtgtctcttcgccatcacggaccaggagaacaacccagcactgccaggaacagaggcgctggtgataggcatcctcgtggtcatcatcggggtgtcccttggcatgaacacaggatatgccatcaacccgtcccgggacctgcccccccgcatcttcaccttcattgctggttggggcaaacaggtcttcagcaatggggagaactggtggtgggtgccagtggtggcaccacttctgggtgcctatctaggtggcatcatctacctggtcttcattggctccaccatcccacgggagcccctgaaattggaggattctgtggcgtatgaagaccacgggataaccgtattgcccaagatgggatctcatgaacccacgatctctcccctcacccccgtctctgtgagccctgccaacagatcttcagtccaccctgccccacccttacatgaatccatggccctagagcacttctaagcagagattatttgtgatcccatccattccccaataaagcaaggcttgtccgacaaa

SEQ ID NO: 2412 - DNA, 1364 bp, Homo sapiens; identical to SEQ ID NO: 2016

SEQ ID NO: 2413 - DNA, 3635 bp, Homo sapiens
agatggctgccgacagtgagcccgaatccgaggtatttgagatcacggacttcaccactgcctcggaatgggaaaggtttatttccaaagttgaagaagtcttgaatgactggaaactgattggaaactctttgggaaagccactcgaaaagggtatatttacttctggcacatgggaagagaaatcagatgaaatttcctttgctgacttcaagttctcagtcactcatcattatcttgtacaagagtccactgataaagaaggaaaggatgagttattagaggatgttgttccacaatctatgcaagatttgctgggtatgaataatgactttcctccaagagcacattgcctggtaagatggtatgggctacgtgagttcgtggtgattgcccctgctgcacacagtgacgctgttctcagcgaatctaagtgcaaccttcttctgagttctgtttctattgccttgggaaacactggctgtcaggtgccactctttgtgcaaattcaccacaaatggcgaagaatgtatgtaggagaatgtcaaggtcctggtgtacgaactgatttcgaaatggttcatcttagaaaagtgccaaatcagtacactcacttatcaggtctgctggatatcttcaaatcaaagattggatgtcctttaactccattgcctccagttagtattgctattcgatttacctatgtacttcaagattggcagcagtatttttggcctcagcaacctccagacatagatgcccttgtaggaggagaagttggaggcttggagtttggcaagttaccatttggtgcctgcgaagatcctattagtgaactccatttagctactacatggcctcatctgaccgaagggatcattgtggataatgatgtttattctgatttggatcctattcaagctccacattggtctgttagagttcgaaaagctgagaatcctcagtgtttgctaggtgattttgtcactgaattttttaaaatttgccgtcgaaaggagtcaactgatgagattcttggacgatctgcatttgaggaagaaggcaaagaaactgctgatataactcatgctttgtcaaaattgacagagccggcatcagttccaattcataaattatcagtttcaaatatggtacacactgcaaagaagaaaatccgaaaacacagaggtgtagaggagtcaccgctaaataatgatgttcttaatactattctcctgttcttattccctgatgctgtttctgagaaaccattagatggaactacttcaacagataataataatcctccatcagagagtgaagactataatctctacaatcagttcaagtctgcaccatctgacagtttaacatacaaactggctttgtgtctctgtatgatcaatttttaccatggagggttgaaaggagtggcacacctctggcaggaatttgttcttgaaatgcgtttccgatgggaaaacaactttctgattccaggattagcaagtggacccccagatctgaggtgttgtttactgcatcagaaactacagatgttaaattgttgtattgaaagaaagaaggcacgtgatgaggggaaaaagacaagtgcttcagatgtcactaatatatatccaggggatgctggaaaagcaggagaccagttggtgccagataatctaaaagaaacagataaggaaaagggagaggtaggaaaatcttgggattcctggagtgacagcgaagaagaattttttgaatgcctaagtgatactgaagaacttaaaggaaatggacaagagagtggcaagaaaggaggacctaaggagatggcaaatttaaggccggaaggacggctctatcagcatgggaaacttacactgctgcataatggagaacctctctacattccagtaacccaggaaccagcacctatgacagaagatctgctagaagagcagtctgaagttttagctaaattaggtacatcggcagagggggctcaccttcgagcacgcatgcagagtgcctgtctgctctcagatatggagtcttttaaggcagctaatccaggttgctccctggaagattttgtgaggtggtattcaccccgggattatattgaagaggaggtgattgatgaaaagggcaatgtggtgctgaaaggagaactgagtgcccggatgaagattccaagcaatatgtgggtagaagcctgggaaacagctaagccaattcctgctagaaggcaaaggagactctttgatgatacacgggaagcagaaaaggtgctgcactatctggcaatccagaaacctgcagaccttgctcggcacctgttaccttgtgtgattcatgcagctgtactcaaggtaaaggaagaagaaagtctcgaaaacatttcttcagttaagaagatcataaagcagataatatcccattccagtaaagttttgcacttccccaatccagaagacaagaaattggaagaaatcattcaccagattactaatgtggaagctctcattgccagagctcggtcactaaaagccaagtttggaactgagaaatgtgaacaggaggaggaaaaggaagatcttgaaaggtttgtgagttgcctgctggagcagcctgaagtgttagtcaccggtgcaggaagaggacatgctggcaggatcattcacaagctgtttgtgaatgcccagagggctgcagctatgactccaccagaggaggaattgaagagaatgggctccccagaggaaagaaggcagaactccgtgtcagacttcccaccccctgctggccgggaattcattttgcgcaccactgtgccgcgccctgctccctactccaaagctctgcctcagcggatgtacagtgttctcaccaaagaggactttagacttgcaggtgccttttcatcagatacttccttcttctgattcttctagcattactcgttggtggcttcagagacagtgctgcctcctcctgagggagggaaggtaccagggagaacctgggaggtcctggagagggccctgtccagttgggtgatcaggaatcaaaccagcatcggaaagacttcccagcaccaagcttgagctgtgtcgtttcgtggagggggcagcgaggatgggcttgagctgttgagagatttctgccctagagatggcctttgtatatgggggggtggtggggggacacaaacacatcagacactccgtcctcacactggcaggacggtgttcatcgcattctcttctgtgaccagcctctaggctagcggctgcattcgtggtctgtgcaaacacttcgtggttctatatatcagcagcaagtgtgcaaaataaaggacctgttaactcagatttctggatattttggtggtagcttctagtcccagaatctgtgtttttaaaatactacatgacattctgtctattcaatcacctggtggtcatctttcttgtactaattaactgttgatgagcattttggatattctaggagaaagcctataatttcacatagtttctctttttcatgtaactgtaacctaaatgtattacttctgataaaactatatatcaaatgtcactgcaaattagttttatatctgtcatgtg

SEQ ID NO: 2414 - DNA, 2103 bp, Homo sapiens
ctcgagatccattgtgctctaaagagtctccaccgccgtccaggacccacttgcagcatggagtcgcccgcctcgagccagcccgccagcatgccccagtccaaaggaaaatccaagaggaagaaggatctacggatatcctgcatgtccaagccacccgcacccaaccccacacccccccggaacctggactcccggaccttcatcaccattggagacagaaactttgaggtggaggctgatgacttggtgaccatctcagaactgggccgtggagcctatggggtggtagagaaggtgcggcacgcccagagcggcaccatcatggccgtgaagcggatccgggccaccgtgaactcacaggagcagaagcggctgctcatggacctggacatcaacatgcgcacggtcgactgtttctacactgtcaccttctacggggcactattcagagagggagacgtgtggatctgcatggagctcatggacacatccttggacaagttctaccggaaggtgctggataaaaacatgacaattccagaggacatccttggggagattgctgtgtctatcgtgcgggccctggagcatctgcacagcaagctgtcggtgatccacagagatgtgaagccctccaatgtccttatcaacaaggagggccatgtgaagatgtgtgactttggcatcagtggctacttggtggactctgtggccaagacgatggatgccggctgcaagccctacatggcccctgagaggatcaacccagagctgaaccagaagggctacaatgtcaagtccgacgtctggagcctgggcatcaccatgattgagatggccatcctgcggttcccttacgagtcctgggggaccccgttccagcagctgaagcaggtggtggaggagccgtccccccagctcccagccgaccgtttctcccccgagtttgtggacttcactgctcagtgcctgaggaagaaccccgcagagcgtatgagctacctggagctgatggagcaccccttcttcaccttgcacaaaaccaagaagacggacattgctgccttcgtgaaggagatcctgggagaagactcataggggctgggcctcggaccccactccggccctccagagccccacagccccatctgcgggggcagtgctcacccacaccataagctactgccatcctggcccagggcatctgggaggaaccgagggggctgctcccacctggctctgtggcgagccatttgtcccaagtgccaaagaagcagaccattggggctcccagccaggcccttgtcggccccaccagtgcctctccctgctgctcctaggacccgtctccagctgctgagatcctggactgagggggcctggatgccccctgtggatgctgctgcccctgcacagcaggctgccagtgcctgggtggatgggccaccgccttgcccagcctggatgccatccaagttgtatatttttttaatctctcgactgaatggactttgcacactttggcccagggtggccacacctctatcccggctttggtgcggggtacacaagaggggatgagttgtgtgaataccccaagactcccatgagggagatgccatgagccgcccaaggccttcccctggcactggcaaacagggcctctgcggagcacactggctcacccagtcctgcccgccaccgttatcggtgtcattcacctttcgtgttttttttaatttatcctctgttgattttttcttttgctttatgggtttggcttgtttttcttgcatggtttggagctgatcgcttctcccccaccccctagggtaccagcaggcagagccttgccctctgctcaggctggggtccagtgggaggggcccaaaatctctgctcagagaagtgcagggggagccttccagctcactctccctgaggactggcgtgacaggggctatgggtgttgtttttaaaaaaagaaaatatatttttttgaaaaaacgactgcccatcccgggtcctttccctgatgggttggggcagttacctggttgctgttttaattaaaaactttagagcacaatggatctcgag

SEQ ID NO: 2415 - DNA, 2136 bp, Homo sapiens
gccctggaggcccggcctggccgctcccggccctggggtgcacatcggccctgagtcccgtcccaggctctgggctcgggcagccgccgccaccgctgcccaggacgtcgggcctcctgccttcctcccaggcccccacgttgctggccgcctggccgagtggccgccatgctcctgccttgggccacctctgcccccggcctggcctgggggcctctggtgctgggcctcttcgggctcctggcagcatcgcagccccaggcggtgcctccatatgcgtcggagaaccagacctgcagggaccaggaaaaggaatactatgagccccagcaccgcatctgctgctcccgctgcccgccaggcacctatgtctcagctaaatgtagccgcatccgggacacagtttgtgccacatgtgccgagaattcctacaacgagcactggaactacctgaccatctgccagctgtgccgcccctgtgacccagtgatgggcctcgaggagattgccccctgcacaagcaaacggaagacccagtgccgctgccagccgggaatgttctgtgctgcctgggccctcgagtgtacacactgcgagctactttctgactgcccgcctggcactgaagccgagctcaaagatgaagttgggaagggtaacaaccactgcgtcccctgcaaggcagggcacttccagaatacctcctcccccagcgcccgctgccagccccacaccaggtgtgagaaccaaggtctggtggaggcagctccaggcactgcccagtccgacacaacctgcaaaaatccattagagccactgcccccagagatgtcaggaaccatgctgatgctggccgttctgctgccactggccttctttctgctccttgccaccgtcttctcctgcatctggaagagccacccttctctctgcaggaaactgggatcgctgctcaagaggcgtccgcagggagagggacccaatcctgtagctggaagctgggagcctccgaaggcccatccatacttccctgacttggtacagccactgctacccatttctggagatgtttccccagtatccactgggctccccgcagccccagttttggaggcaggggtgccgcaacagcagagtcctctggacctgaccagggagccgcagttggaacccggggagcagagccaggtggcccacggtaccaatggcattcatgtcaccggcgggtctatgactatcactggcaacatctacatctacaatggaccagtactggggggaccaccgggtcctggagacctcccagctacccccgaacctccataccccattcccgaagagggggaccctggccctcccgggctctctacaccccaccaggaagatggcaaggcttggcacctagcggagacagagcactgtggtgccacaccctctaacaggggcccaaggaaccaatttatcacccatgactgacggagtctgagaaaaggcagaagaaggggggcacaagggcactttctcccttgaggctgccctgcccacgtgggattcacaggggcctgagtagggcccggggaagcagagccctaagggattaaggctcagacacctctgagagcaggtgggcactggctgggtacggtgccctccacaggactctccctactgcctgagcaaacctgaggcctcccggcagacccacccaccccctggggctgctcagcctcaggcacggacagggcacatgataccaactgctgcccactacggcacgccgcaccggagcacggcaccgagggagccgccacacggtcacctgcaaggacgtcacgggcccctctaaaggattcgtggtgctcatccccaagcttcagagaccctttggggttccacacttcacgtggactgaggtagaccctgcatgaagatgaaattatagggaggacgctccttccctcccctcctagaggagaggaaagggagtcattaacaactagggggttgggtaggattcctaggtatggggaagagttttggaaggggaggaaaatggcaagtgtatttatattgtaaccacatgcaaataaaaagaatgggacctaaactcgtgccgctcgtgccgaattcctgcag

SEQ ID NO: 2416 - DNA, 1792 bp, Homo sapiens; identical to SEQ ID NO: 138

SEQ ID NO: 2417 - DNA, 2689 bp, Homo sapiens; identical to SEQ ID NO: 2026

SEQ ID NO: 2418 - DNA, 8841 bp, Homo sapiens
aggctctgccgttcagctgccgcgggcggggccggggcctgcggcgtcgtgcgccgtgcgggaccagttccaggcgggcgagaccgcgcagggcggggcggggcgaggcggccgcagggcggggagggcggggagaggcggccgcagggcggggagggcggggcgcgaagccgggggcgggggccacgcgtggggcaggcggtgctcggctcggctgacgtcggcccgccggcgccccaccacgtccgcgcgggcccgggttgccaccgccggcccccgcccctcccccggcggtgtcccggccggaaccgatcgtggctggtttgagctggtgcgtctccatggcgacccgccggtgctataagtagggagcggcgtgccgtggggctttgtcagtccctcctgtagccgccgccgccgccgccgcccgccgcccctctgccagcagctccggcgccacctcgggccggcgtctccggcgggcgggagccaggcgctgacgggcgcggcgggggcggccgagcgctcctgcggctgcgactcaggctccggcgtctgcgcttccccatggggctggcctgcggcgcctgggcgctctgaggtgagggactccccggccgcggaggaagggagggagcgagggcgggagcggggcgggctgcgggcccgggcccgggcacgtgtgcggcgcgcctcgccggcctgcggagacacgtggtcgccgagcgggccacgaccttgaggcgccgcttcctcccggcccggggttctcccgcggctggataagggtgatccgggcgcctcgttctgcccccgtcttcacagctcggggctggaggggcctaggggagacccacccggagaccctgcggccccgcgccggcctctttcccaacccttcggcggccgcgcgctggccggggagccgttggggaggccctggcggccgcgcagcaggtgcaggggcgcagagcctgggctcgccttggtacagacgagcgggccccggccttggcgccttcagtttccttccagtttttattttcgctgtgtctacagagcagatgacaccaatttggaaacccgcgagagtgggtagagctaagatagtcttgctgtagtagctgtgatattagatgctcggccatgacttagaggtgtttatttaaggactgtgaatgactcggtgatttcggaaaagcttggcttagatgaacggacatacacaggggagacagccctaaggtttgcagaaaaggctgattgtgctgtttgcgaagtcgaaataattggtgaaagtgtagaaggcagaacctctcaggaatgtctggggaggacaaagaatgtgttggctgactttgtttaaacataaaattgggcagactttaattgatttgtgaaatttttttcaaagtttgtttgaattagcccctatctcttctaacattatcctcttgtgctaattgattgaccattttaaataacttagctgttacagaaagaccgaaaggtgttcttcagtaaaatatattcaagtaagttacttaagtaacgccttaaaagatacagaaaagcaaaaaagtattggcgtattaaaaagaaatcaaaactttccaagtttaggcctgaacattgccttaaaaatatttaataaggcctcaaatgacccagtccgagactgcatgagcctatttattattaaattgtaaatattcttcatataaacaaaaatatataaccatgtctgtaacaaaaatggttttgctagcgttgttactctcttcccttctccgaggggtgatttaggcaacttcggaggttgacaatgccaagcagtcacaatagatagagctttaaagcaaattctatgcatgggtttggatttatgacaggcccgtcaccctgggcctgtcatagtaccccatgccagagcaaactgtgtccccgaaccattgcctggcctctgtgcccgtaggctgctggcactgaagtgggttgcacagtggaaaagaagaaagctctacctggcagaaatttttaaaggttaaaataaataattttaagaaagctggttcacaaggtgccacatttgatgaaagcaaaatacagtggcttttattgttactagagtgatgttcttgcttgtttttcttttttggtgaagttagccccaaattattctcatagctaagcaaatacgagagtgactgtaaggacagttggcattcccggaattgctaaacttggtaggcaacgctggtttaagaatactgagttctagccgggcgtggtggctcacgcctgtaatcccaacactttgggaggctgaggcaggcggatcacctgaggtcgggagttggagaccagcctgactaacatggagaaacgccatctccactaaaaatataaaattagccaggccccgggtgtggtggcacatgccggtaatcccagctactcgggagactgaggcaggagaatcgcttgaacccaggaggcggaggttgaggtgagccgagatcatgccattgcactccagcctgggcaacaagagtaaaactctgtctcaaaaaaaaaaaaaaaaaatactgaattctgatcaggtaacagcaactgtaatacaatgtgataagttgacttgaagattacagtttttaagaagtatatacccagctaatacatgaaaattaactcgtaaaatctcaaatgctccagacatttccatgatgcctgttggtcagtaaaaatcattctaagacttagtggaagtaggaaatgtttgtatggcaacgtggtgaaatcctgtctctactaaaaatgtgtataaaggctataatgtaatcccagcactttggaagaccgaggcgggtggatcacctggggtcaggagtttgagacccacctggaccacaaaaattagccgggcatggtggcaggcgcctgtaatcccagctgctggggaggctgaggcaggagaatcgcttgaacccgggaggcagaggttgcagtgagccaagattgcaccgctgcactccagcctgggtgacagcgtgagactctgtctcaaaaaaaataaaaaagtctataatgctattttaagtttctaaggaactgaaactgctctgaaataaatcagaccattataagacttttttccatatcagtgagctaagtgcagataagcttctgaaacttgcatgctagatttttttggtacaaatatttgaaatgcttagtgtgctgccttggaaaaacctggtattttttgttgtgtccttatactgccaaggtttatggaatcatgtaccttatgcctagtaataattaggatgaccaggccagtgagtggttcatatccggggcatgattagctctgcgtgtgctcagccagtgccccatcttcaactcgatgtgttcctaaggtagacagcaaattccctattttatttctcagattgtcactgctgttccaagggcacacgcagagggatttggaattcctggagagttgcctttgtgagaagctggaaatatttctttcaattccatctcttagttttccatgtaagtattcagtttacatttatgttgcaggttaatcttaagaattgtattgctaaggcttctaagtgaatttctccactctatttgcattttgttgcatttcagaggaacatcaagaaatcatgaacaactttggtaatgaagagtttgactgccacttcctcgatgaaggttttactgccaaggacattctggaccagaaaattaatgaagtttcttcttctgtaagtatatgaggcccatgctggcagtgcagctgagagtgccaggcaagtggaaaactttggcaaggtctaaggaagagcaatgaggcttacatgtcttgttatggaatgtagaaattaattcactggtggtaaattaatagtgataatggtgatactcatatcagtggctagactcaaaagagcaggattcattgtgactgatgggaatgaaggtcgctggctattggtgtggtgtgtggtgaggctgctagtgagtcacctgtgaccactcttgtttcaggatgataaggatgccttctatgtggcagacctgggagacattctaaagaaacatctgaggtggttaaaagctctccctcgtgtcacccccttttatgcagtcaaatgtaatgatagcaaagccatcgtgaagacccttgctgctaccgggacaggatttgactgtgctagcaaggtaagcgatagcagcaggcctcaaaagcgttgtataaaatgggcctggtattccccacgaggcagatacaagttgtgttttttgggcaataaatgctcactaaaggcaaatggggcgggggggtacatgacaacttcccatgcttttctgtttattccacgtgttaagccacatatggatagcatgacaccactcttctttttcagactgaaatacagttggtgcagagtctgggggtgcctccagagaggattatctatgcaaatccttgtaaacaagtatctcaaattaagtatgctgctaataatggagtccagatgatgacttttgatagtgaagttgagttgatgaaagttgccagagcacatcccaaagcaaagtgagttattcccccatctgagggcaagatcgggagcataagatatgtggattcttatcaaacaaacttaaatttctgattattatatttctatactttagtagaaagtagttgaaacccccattgagtcatgaagcctgggactcaaactacagaatatatcagcgacagtatttagaacaggattgtttttattttaattgtggctataagtgaacatctatcatgagacatttgctgcactttccttgcttgtaggttggttttgcggattgccactgatgattccaaagcagtctgtcgtctcagtgtgaaattcggtgccacgctcagaaccagcaggctccttttggaacgggcgaaagagctaaatatcgatgttgttggtgtcaggtgagattttggtgggatagctagaggtcaagacattgaacagtttgagttttacaggctttctcctagtgtttgctattattttaagaaatactaagacacagtgtctcgtctctttattttaccccagcttccatgtaggaagcggctgtaccgatcctgagaccttcgtgcaggcaatctctgatgcccgctgtgtttttgacatgggggtgagtatacgtgaccctgttagggaagggcgggacacaactgacaataactagtcttaattctagagttaactttttatggcagttggttctgtattacatgggtttcagcctatctgctgcatacatttttgttattagctgtggatctggctgacttattttcttgattctaggctgaggttggtttcagcatgtatctgcttgatattggcggtggctttcctggatctgaggatgtgaaacttaaatttgaagaggtaatttagaacaaaactgtaatactcagtagccgttctaataaattcctttttggaatatttcaaaatttaagtgtcttaactaataccacaatgggctgaagtgtcttggtgtgatatttttgagtgatttctttgtgctgtctgacattacacttgataccatttggttttctaaagtgtgaatcagctttcccagaagtcttggataattggttacattggaaatcatggctcacacctgtaatccagcacttggggaggccaaggtggtaggatcacttgagcccaggagtttgagaccagcctgggcaacacagtgagaccccatctctacaaaaaaaattttaaaattagcctggtgtggtggcgggcacctgtaatcccagctacttggaaggctgaggtgggaggatcacttgagcccaggaggttgaggctgcagtgagccatgatcatgccactgcactcagcctgggctacagagtgagaccctgtctcaaaaaaaaaaaagaaaaagcatgttgctgtgggcttcctagagaatatgctgactgtagcacatcatcaccccaaatgtgctttgctagacctatgcttcctctccttaaaatacttgaaatgtttagtcacttaggaagttaagccattatattggtgcttgaatttataaaatatatccacatggtttgttaaaatcatgacgtaggcagaataggatttttatcctgttggcatgtatttgttaaaatgttttgacatcttgatgccttcctaggtagtagttagttgcgtactgttctttgataaaaatcatacccataacatcctaaaggagatagggtgcctggaggggaatgaaaacgagccacctgggatatgtagcctggttttcagggagatgttgatgtttttttgcttttgttactttaatgataaacctgtctgttgatgcctggtctcatgatgtcatgtcacaaggccctgtgatgttactcccccatgtgaatttcccacaatgaaggctgctctttcttttctgtttcactctcttagatcaccggcgtaatcaacccagcgttggacaaatactttccgtcagactctggagtgagaatcatagctgagcccggcagatactatgttgcatcagctttcacgcttgcagttaatatcattgccaagaaaattgtattaaaggaacagacgggctctgatggtatgtataaaggacgaatcacttcatgtataactgaaagctgatgcaaaaagtcattaagattgttgatctgcctttctagacgaagatgagtcgagtgagcagacctttatgtattatgtgaatgatggcgtctatggatcatttaattgcatactctatgaccacgcacatgtaaagccccttctgcaaaaggtaatttctgagcatactgtataaaacaattaagaggactggtcacaacacgtgtaattaagtagtacttcctctctccgtctctttatatagagacctaaaccagatgagaagtattattcatccagcatatggggaccaacatgtgatggcctcgatcggattgttgagcgctgtgacctgcctgaaatgcatgtgggtgattggatgctctttgaaaacatgggcgcttacactgttgctgctgcctctacgttcaatggcttccagaggccgacgatctactatgtgatgtcagggcctgcgtggtaagtaagccatgcatgttgatggtgctgccaagaataggcaccttcttggatgtgtgcttcttgtctagacgaataagaaattgtcttgcctaagattaaatatatatggatatttttcctaagaaaagttttagaaaagactgatgagtgtatttctatgtaattggaatatatttaagttcatgccatgtgtcttgtggtttccttattaccaaaacggtgactgaagaaacgcttgctttagaaatacattgaattggccaggtgtgctggctcacacctgaaatcacaacacattgggaggccaaggcagaaggatcacttgagcccaggagttcgagcctgggcaacatagtgagaccctgtctctacaaaaaattaaaaaattagttggccatggtagtgggcgcctgtagtcccagctgcttggctaaggtgagaggtttgcttgagcctgggaggttgaggctgcggtgagctatgatagcaccattgtattccagcctgagtaacagagaaagaccctgtctcagaaaaaaaaaaaatacattgaattgtttcctgatggaagtaaatactctcatgcccagttaggagtgagtcagggtttttaatatgccactttttctttctcaggcaactcatgcagcaattccagaaccccgacttcccacccgaagtagaggaacaggatgccagcaccctgcctgtgtcttgtgcctgggagagtgggatgaaacgccacagagcagcctgtgcttcggctagtattaatgtgtagatagcactctggtagctgttaactgcaagtttagcttgaattaagggatttggggggaccatgtaacttaattactgctagttttgaaatgtctttgtaagagtagggtcgccatgatgcagccatatggaagactaggatatgggtcacacttatctgtgttcctatggaaactatttgaatatttgttttatatggatttttattcactcttcagacacgctactcaagagtgcccctcagctgctgaacaagcatttgtagcttgtacaatggcagaatgggccaaaagcttagtgttgtgacctgtttttaaaataaagtatcttgaaataattaggcattgggacgtttttatggtgtgttcattccagacagttcacgaatcccgtatagctcgctctgattctcagagaacaatgagtgggtccacccacacacaggtaggaggacaggtgagacggaagccccatcctcccatgtggacggtgcacatctgctcagcccaccccacatgtccagagttggctgcaaactccttgtccagagcctctggtggtgggacctacttaagtctgacggacctgtcctgtccaggccagtgcccagggaaggtgtgggaggccctttgagcctggcctgcagagaccatccgtgtcccctcccaccttcatgcctgtgagaagttaggaatgtatacggtaccacatttggcagtcagcttattttaataaattcagcaacagcaagtccctaccatgttgtgtatcttcaccatcttgtctgaccatgaccactggccttgtgtgttcttttactcaacgtgtacccccgctctcccccaaa

SEQ ID NO: 2419 - DNA, 4270 bp, Homo sapiens
agagtcctggatgagacggctcgagagcgtgcccggctgcagatagagattgggaagctgagggcagagttggacgaggtcaacaagagcgccaagaagagggagggcgagcttacggtggcccagggccgtgtgaaggacctggagtccctgttccaccggagcgaggtggagctggcagctgccctcagcgacaagcgcggcctggagagtgacgtggctgagctgcgggcccagctggccaaggccgaggacggtcatgcagtggccaaaaagcagctggagaaggagacgctgatgcgtgtggacctggagaaccgctgccagagcctgcaggaggagctggacttccggaagagtgtgttcgaggaggaggtgcgggagacgcggcggcggcacgagcggcgcctggtggaggtggacagcagccggcagcaggagtacgacttcaagatggcacaggcgctggaggagctgcggagccagcacgacgagcaagtgcggctctacaagctggagctggagcagacctaccaggccaagctggacagcgccaagctgagctctgaccagaacgacaaggcggccagtgcggctcgcgaggagctgaaggaggcccgcatgcgcctggagtccctcagctaccagctctccggcctccagaagcaggccagtgccgctgaagatcgcattcgggagctggaggaggccatggccggggagcgggacaagttccggaagatgctggacgccaaggagcaggagatgacggagatgcgggacgtgatgcagcagcagctggccgagtaccaggagctgctggacgtgaagctggccctggacatggagatcaacgcctaccggaagctcctggagggcgaggaggagagcctgaagctgtcccccagcccatcttcgcgcgtcaccgtctcacgagccacctcgagcagcagcggcagcttgtccgccaccgggcgcctgggccgcagtaagcggaagcgctggaggtggaggagcccttggcagcggcccaagcgtcctgggcacgggcacgggtggcagcggtggcttccacctggcccagcaggcctcggcctcgggcagcgtcacatcgaggagatcgacctggagggcaagtttgtgcagctcaagaacaactcggacaaggatcagtctctggggaactggagaatcaagaggcaggtcttggagggggaggagatcgcctacaagttcacgcccaagtacatcctgcgggccggccagatggtcacggtgtgggcagctggtgcgggggtggcccacagccccccctcgacgctggtgtggaagggccagagcagctggggcacgggcgagagcttccgcaccgtcctggttaacgcggatggcgaggaagtggccatgaggactgtgaagaagtcctcggtgatgcgtgagaatgagaatggggaggaagaggaggaggaagccgagtttggcgaggaggatcttttccaccaacagggggacccgaggaccacctcaagaggctgctacgtgatgtgaacccacactcctcatccacacacctttctttacccagagccactgaaaactattttttatcattggctttctttagttcttgatacatttctagagaatttctaagcgaactgccagaacgtgtgggtgggtctcccccagccctccctcctggcgggtctcctccagcctcacttcgctgccacttcgccgctgccccggagacttttcaatcccaccccactcctcatctcaccatttggtcaaattggaagcccagggccaggacccggaggtttagaagatgcttgggcttggagggaggagggccggcgaggctagcgaggggacaggagacggccctgctgcggacggagcgcggaaactgcgtaggaattcagtggtggtgggtttttttaaggctttctacaaaaccaaattcagaatccaggcgtcgacctggtggggcccggggcaagcctgcattctggctgcccagcttcggacagcgggaactcctcaggcagccacgcagcgggtgtgggccagcatggggatggcgtggccccaggggggttttcactccgctgcctgggcttccagattcccgttctggcagcgaccggccgggtttctcggaccgttgactttatttgggggagttttcccgcagttcagttcctgactgtgcaaggccaacagggcaggggaggggaagacctggggaaggaagaatgaggacacagtcccgtcgtaagacctgtcacaacaataagcagggaggggagatgtggaggggacacatctggttgccttggaggcagaagctgtgagtttcagaacagctgtctgcagggaacgccaccatgttgaccctctggaggagagcgctgtggagcccctcccgtgttccagctccgtctgccctgtgcctatatatcacatgcgtctatcatactgtgtctttatctgtgatttttctcgctgaaacatgtttctcagacagccaaggccacctgactcctatcacgacgcacccaagcccctcagtccagcttcccaatgcctggcacccccttcggcaatagctcaccgtttacaccctccctcatagatacacagaagttatttttttaatggatatttatttttttacattggtcagtacacaggtcagggagctcacgccagggccttgaggacaggctgaccctcctccccggggtggcgtggggctggggcacccccgacggcagagcctccttcagaaagtgcagctcaagtcttaaagacaccaaaactgagccatgggcacgcgccgtctccgggccatggcgttcactgcagggcgggggcggcaccgctcccctgtgactgcatcccgcctccctggggacctgcctgtggcaggaaggaatggggggccccagcccaggccgggaaggagccagcggccgacaaagcagaaacaccgctgctccacgtagcccctgctggctgtccttgctctcagaagtcccggtcccatgtagatagagcccggcggatcttaccaaagcatttcctcctggaggctacgccgcttggtgctcccagtgaggcggctggtagggagctttgcctgccccggggataccctctaccagccgctggaagtgggaatgctggcgacagactgtgtctgtttcccaccttcatagcaggaatcacccggacccgactggctgggcttcgtgctagcgagggttttctgggggtgggtcttggtgatcttgtcctatggggatctctgcagtggtctcagccacatcctagtatattttggctctggaggagcaaagctgtatcctggagttggtctgtgatttgccgacagacttgcaggctgggctcagcaaagtcccccccaaaacccgcaggtcctcatgtccagacgctgccagtcctgtcctgaaaacagcacgccccaggcccacagaaccccccaccctacatttgccttgggtggagctgggggtggtcctaggactgcgggtgcccttagctgaagggggcccgcagaagcgtgagctgggccgcctgtgggtcattggaggttcattgagaattgagtcctttggaaagactaagaaaatcaaatttttaaaagttatttatggcctgggaaacaatttgcatttgtccccaaatacgcttagctgtgtgccgcttagaacgatgagaaaccatccctctgtgtaagcccgtgccgtgtgactcgaagcctagcgccctccctgcgaagcatcagacgccacccagccctgggggaggcccacgcctgctggaccaacgcgggttctggggtgcacagcgccaggttaacgctgaagcctgccccgctgagcccaagagccgggaggcctgcgggctgacccagaatccgatcatgcacctgtcctcatgccagcggctttggctggggttggtctgaagcctgcacgcggcagttctttgttaaagatctgagggactcgtcagtcctagcgtcgccgcctgcagcctcttccaagccctgcgtccagcgagcgtcacagcacaacctgcaaaaacggagctgggctgcagctggggctggcatggactttcatttcagagattcggtttttaagaagatgcatgcctagcgtgttcttttttttttccaatgatttgtaatatacattttatgactggaaacttttttgtacaacactccaataaa

SEQ ID NO: 2420 - DNA, 1375 bp, Homo sapiens
tcgaattccggaagccgctcccgacaccctttgcctggctctgtccatattagttcccaggcggccgtcgcgttccagcagcggcacgcagcgcaggcggagcggcagcggggcctcggctctatagagccgagccgctggtacccgcccggtaccgcgcgagccagtgcccctggatcttgcctctgctccgacgccgttccccaccagttagcgacagcgcccgcccctctgaggagacacgaaggtggttccccagccgctcaaatttccggaccaccgcgctttcccctcctcagcctgggctgtgctctctctagaatcctcgggcccccactttcttcccaaactcatcctaaatctctcacacacgcgagtgttcccagccctcaagccagctgctcctcctccgttcattttctgcccctcttcgcaaagcacccccgggatcatcctccgagggcgactttttgagaaatctcggtggagtagtggaccagagcaggggagtttttaaaagccggggcgcgagaaacaggaaggtactatggcttcctcgtctggcaacgatgatgatctcactatccccagagctgctatcaataaaatgatcaaagagactcttcctaatgtccgggtggccaacgatgctcgagagctggtggtgaactgctgcactgaattcattcaccttatatcttctgaagccaatgagatttgtaacaaatcggaaaagaagaccatctcaccagagcatgtcatacaagcactagaaagtttgggatttggctcttacatcagtgaagtaaaagaagtcttgcaagagtgtaaaacagtagcattaaaaagaagaaaggccagttctcgtttggaaaaccttggcattcctgaagaagagttattgagacagcaacaagaattatttgcaaaagctagacagcaacaagcagaattggcccaacaggaatggcttcaaatgcagcaagctgcccaacaagcccagcttgctgctgcctcagccagtgcatctaatcaggcgggatcttctcaggatgaagaagatgatgatgatatctgaaattcaccagctgagtttctatttcttctataaatgtttttccctgcacaacaaaaacagtgaaagaaatgcttatctgtaattttgtatgcatcttggtggacttgtcattggtattctagagatgtctgctataagtttcatctgttgtgtgctatacatgtaaaaactgtctctttgaactattgaaaatttaaggttcagtataatatcaattttgaatttttcctggtgtttatgaaattttagatagcagcaagtcttcgtttgatcataaacagtgtacagataactcaa

SEQ ID NO: 2421 - DNA, 3358 bp, Homo sapiens
gagctggagcagccgccaccgccgccgccgagggagccccgggacggcagcccctgggcgcagggtgcgctgttctcggagtccgacccagggcgactcacgcccactggtgcgacccggacagcctgggactgacccgccggcccaggcgaggctgcagccagagggctgggaagggatcgcgctcgcggcatccagaggcggccaggcggaggcgagggagcaggttagagggacaaagagctttgcagacgtccccggcgtcctgcgagcgccagcggccgggacgaggcggccgggagcccgggaagagcccgtggatgttctgcgcgcggcctgggagccgccgccgccgccgcctcagcgagaggaggaatgcaccggccgcgccgccgcgggacgcgcccgccgctcctggcgctgctggccgcgctgctgctggccgcacgcggggctgctgcccaagaaacagagctgtcagtcagtgctgaattagtgcctacctcatcatggaacatctcaagtgaactcaacaaagattcttacctgacccttgatgaaccaatgaataacatcaccacgtctctgggccagacagcagaactgcactgcaaagtctctgggaatccacctcccaccatccgctggttcaaaaatgatgctcctgtggtccaggagccccggaggctctcctttcggtccaccatctatggctctcggctgcggattagaaacctcgacaccacagacacaggctacttccagtgcgtggcaacaaacggcaaggaggtggtttcttccactggagtcttgtttgtcaagtttggcccccctcccactgcaagtccaggatactcagatgagtatgaagaagatggattctgtcagccatacagagggattgcatgtgcaagatttattggcaaccgcaccgtctatatggagtctttgcacatgcaaggggaaatagaaaatcagatcacagctgccttcactatgattggcacttccagtcacttatctgataagtgttctcagttcgccattccttccctgtgccactatgccttcccgtactgcgatgaaacttcatccgtcccaaagccccgtgacttgtgtcgcgatgaatgtgaaatcctggagaatgtcctgtgtcaaacagagtacatttttgcaagatcaaatcccatgattctgatgaggctgaaactgccaaactgtgaagatctcccccagccagagagcccagaagctgcgaactgtatccggattggaattcccatggcagatcctataaataaaaatcacaagtgttataacagcacaggtgtggactaccgggggaccgtcagtgtgaccaaatcagggcgccagtgccagccatggaattcccagtatccccacacacacactttcaccgcccttcgtttcccagagctgaatggaggccattcctactgccgcaacccagggaatcaaaaggaagctccctggtgcttcaccttggatgaaaactttaagtctgatctgtgtgacatcccagcttgcgattcaaaggattccaaggagaagaataaaatggaaatcctgtacatactagtgccaagtgtggccattcccctggccattgctttactcttcttcttcatttgcgtctgtcggaataaccagaagtcatcgtcggcaccagtccagaggcaaccaaaacacgtcagaggtcaaaatgtggagatgtcaatgctgaatgcatataaacccaagagcaaggctaaagagctacctctttctgctgtacgctttatggaagaattgggtgagtgtgcctttggaaaaatctataaaggccatctctatctcccaggcatggaccatgctcagctggttgctatcaagaccttgaaagactataacaacccccagcaatggatggaatttcaacaagaagcctccctaatggcagaactgcaccaccccaatattgtctgccttctaggtgccgtcactcaggaacaacctgtgtgcatgctttttgagtatattaatcagggggatctccatgagttcctcatcatgagatccccacactctgatgttggctgcagcagtgatgaagatgggactgtgaaatccagcctggaccacggagattttctgcacattgcaattcagattgcagctggcatggaatacctgtctagtcacttctttgtccacaaggaccttgcagctcgcaatattttaatcggagagcaacttcatgtaaagatttcagacttggggctttccagagaaatttactccgctgattactacagggtccagagtaagtccttgctgcccattcgctggatgccccctgaagccatcatgtatggcaaattctcttctgattcagatatctggtcctttggggttgtcttgtgggagattttcagttttggactccagccatattatggattcagtaaccaggaagtgattgagatggtgagaaaacggcagctcttaccatgctctgaagactgcccacccagaatgtacagcctcatgacagagtgctggaatgagattccttctaggagaccaagatttaaagatattcacgtccggcttcggtcctgggagggactctcaagtcacacaagctctactactccttcagggggaaatgccaccacacagacaacctccctcagtgccagcccagtgagtaatctcagtaaccccagatatcctaattacatgttcccgagccagggtattacaccacagggccagattgctggtttcattggcccgccaatacctcagaaccagcgattcattcccatcaatggatacccaatacctcctggatatgcagcgtttccagctgcccactaccagccaacaggtcctcccagagtgattcagcactgcccacctcccaagagtcggtccccaagcagtgccagtgggtcgactagcactggccatgtgactagcttgccctcatcaggatccaatcaggaagcaaatattcctttactaccacacatgtcaattccaaatcatcctggtggaatgggtatcaccgtttttggcaacaaatctcaaaaaccctacaaaattgactcaaagcaagcatctttactaggagacgccaatattcatggacacaccgaatctatgatttctgcagaactgtaaaatgcacaacttttgtaaatgtggtatacaggacaaactagacggccgtagaaaagatttatattcaaatgtttttattaaagtaaggttctcatttagcagacatcgcaacaagtaccttctgtgaagtttcactgtgtcttaccaagcaggacagacactcggccag

SEQ ID NO: 2422 - DNA, 450 bp, Homo sapiens; identical to SEQ ID NO: 2029

SEQ ID NO: 2423 - DNA, 735 bp, Homo sapiens
gagtctgcccttgcgagctcagagtgtgcccgtgcgccgccgccgtcgtacctgccgccgccgccaccgccaccatgcccaacttcgccggcacctggaagatgcgcagcagcgagaatttcgacgagctgctgaaggcactgggtgtgaacgccatgctgaggaaagtggccgtagcggctgcgtccaagccgcacgtggagatccgccaggacggggatcagttctacatcaagacatccaccaccgtgcgcaccactgagatcaacttcaaggtcggagaaggctttgaggaggagaccgtggacggacgcaagtgcaggagtttagccacttgggagaatgagaacaagatccactgcacccaaactcttcttgaaggggacggccccaaaacctactggacccgtgagctggccaacgatgaacttatcctgacgtttggcgccgatgacgtggtctgcaccagaatttatgtccgggaatgaaggcagctggcttgctcctactttcaggaagggatgcaggtccccgaggaatatgtcatagttctgagctgccagtggaccgcccttttcccctaccaatattaggtgatcccgttttccccatgacaatgttgtagtgtcccccacccccacccccctggccttggtgcctcttgtatccctagtgctgcatagcccggcatttgcacggtttcgaagtcattaaactggttagacgtgtctcaaa

SEQ ID NO: 2424 - DNA, 833 bp, Homo sapiens
cagaaattatccagcaaatctatcatggatcctaatcagaacgtgaaatgcaagatagttgtggtgggagacagtcagtgtggaaaaactgcgctgctccatgtcttcgccaaggactgcttccccgagaattacgttcctacagtgtttgagaattacacggccagttttgaaatcgacacacaaagaatagagttgagcctgtgggacacttcgggttctccttactatgacaatgtccgccccctctcttaccctgattcggatgctgtgctgatttgctttgacatcagtagaccagagaccctggacagtgtcctcaaaaagtggaaaggtgaaatccaggaattttgtccaaataccaaaatgctcttggtcggctgcaagtctgatctgcggacagatgttagtacattagtagagctctccaatcacaggcagacgccagtgtcctatgaccagggggcaaatatggccaaacagattggagcagctacttatatcgaatgctcagctttacagtcggaaaatagcgtcagagacatttttcacgttgccaccttggcatgtgtaaataagacaaataaaaacgttaagcggaacaaatcacagagagccacaaagcggatttcacacatgcctagcagaccagaactctcggcagttgctacggacttacgaaaggacaaagcgaagagctgcactgtgatgtgaatctttcattatctttaatgaagacaaaggaatctagtgtaaaaaacaacagcaaacaaaaaggtgagtctaaatgaagtgcacagccaaagtcatgtataccagaggcttaggaggcg

SEQ ID NO: 2425 - DNA, 2512 bp, Homo sapiens
caatgcactgacggatatgagtgggatcctgtgagacagcaatgcaaagatattgatgaatgtgacattgtcccagacgcttgtaaaggtggaatgaagtgtgtcaaccactatggaggatacctctgccttccgaaaacagcccagattattgtcaataatgaacagcctcagcaggaaacacaaccagcagaaggaacctcaggggcaaccaccggggttgtagctgccagcagcatggcaaccagtggagtgttgcccgggggtggttttgtggccagtgctgctgcagtcgcaggccctgaaatgcagactggccgaaataactttgtcatccggcggaacccagctgaccctcagcgcattccctccaacccttcccaccgtatccagtgtgcagcaggctacgagcaaagtgaacacaacgtgtgccaagacatagacgagtgcactgcagggacgcacaactgtagagcagaccaagtgtgcatcaatttacggggatcctttgcatgtcagtgccctcctggatatcagaagcgaggggagcagtgcgtagacatagatgaatgtaccatccctccatattgccaccaaagatgcgtgaatacaccaggctcattttattgccagtgcagtcctgggtttcaattggcagcaaacaactatacctgcgtagatataaatgaatgtgatgccagcaatcaatgtgctcagcagtgctacaacattcttggttcattcatctgtcagtgcaatcaaggatatgagctaagcagtgacaggctcaactgtgaagacattgatgaatgcagaacctcaagctacctgtgtcaatatcaatgtgtcaatgaacctgggaaattctcatgtatgtgcccccagggataccaagtggtgagaagtagaacatgtcaagatataaatgagtgtgagaccacaaatgaatgccgggaggatgaaatgtgttggaattatcatggcggcttccgttgttatccacgaaatccttgtcaagatccctacattctaacaccagagaaccgatgtgtttgcccagtctcaaatgccatgtgccgagaactgccccagtcaatagtctacaaatacatgagcatccgatctgataggtctgtgccatcagacatcttccagatacaggccacaactatttatgccaacaccatcaatacttttcggattaaatctggaaatgaaaatggagagttctacctacgacaaacaagtcctgtaagtgcaatgcttgtgctcgtgaagtcattatcaggaccaagagaacatatcgtggacctggagatgctgacagtcagcagtatagggaccttccgcacaagctctgtgttaagattgacaataatagtggggccattttcattttagtcttttctaagagtcaaccacaggcatttaagtcagccaaagaatattgttaccttaaagcactattttatttatagatatatctagtgcatctacatctctatactgtacactcacccataacaaacaattacaccatggtataaagtgggcatttaatatgtaaagattcaaagtttgtctttattactatatgtaaattagacattaatccactaaactggtcttcttcaagagagctaagtatacactatctggtgaaacttggattctttcctataaaagtgggaccaagcaatgatgatcttctgtggtgcttaaggaaacttactagagctccactaacagtctcataaggaggcagccatcataaccattgaatagcatgcaagggtaagaatgagtttttaactgctttgtaagaaaatggaaaaggtcaataaagatatatttctttagaaaatggggatctgccatatttgtgttggtttttattttcatatccagcctaaaggtggttgtttattatatagtaataaatcattgctgtacaacatgctggtttctgtagggtatttttaattttgtcagaaattttagattgtgaatattttgtaaaaaacagtaagcaaaattttccagaattcccaaaatgaaccagataccccctagaaaattatactattgagaaatctatggggaggatatgagaaaataaattccttctaaaccacattggaactgacctgaagaagcaaactcggaaaatataataacatccctgaattcaggcattcacaagatgcagaacaaaatggataaaaggtatttcactggagaagttttaatttctaagtaaaatttaaatcctaacacttcactaatttataactaaaatttctcatcttcgtacttgatgctcacagaggaagaaaatgatgatggtttttattcctggcatccagagtgacagtgaacttaagcaaattaccctcctacccaattctatggaatattttatacgtctccttgtttaaaatctgactgctttactttgatgtatcatatttttaaataaaaataaatattcctttagaagatcactctaaaa

SEQ ID NO: 2426 - DNA, 1673 bp, Homo sapiens
attcccccgcaggccgggcatgggtgggggcgccgggccgtcacgatgagcgccctgggcagcccggtccgggcctacgactttctgctcaagttcctgctggtgggcgacagcgacgtgggcaagggcgagatcctggcgagcctgcaggatggcgcggccgagtccccgtacggccacccggcgggcatcgactacaagacgaccaccatcctgctggacgggcggcgggtgaagctgcagctctgggatacttcaggccagggaagattttgtaccatattccgctcctactcccggggcgcacagggtgtgatcctggtctatgacattgcgaaccgctggtcttttgacggcattgatcgatggattaaggagatcgatgagcatgcccccggagtccccaagatcctggtggggaaccgcctgcacctggcgttcaagcggcaggtgcccacggagcaggcccaggcctacgccgagcgcctgggcgtgaccttctttgaggtcagccctctgtgcaatttcaacatcacagagtcgttcacggagctggccaggatcgtgctgctgcggcatgggatggaccggctctggcggccgagcaaggtgctgagcttgcaagacctctgctgccgggcggtcgtgtcctgcacgccggtgcacctggtggacaagctcccgctccccattgccttaagaagccacctcaagtccttctcgatggccaacggcctgaatgccaggatgatgcacggcggttcctactccctcaccaccagctccacccacaaaaggagcagcctccgcaaagtgaagctcgtccgccccccccagagcccccccaaaaactgcaccagaaacagctgcaaaatttcttaaggaaggcactgaaagaaacacggcggaatctctccaggagaagctcggcgttacccccggcagctggtggatgcatctcagatcccggttcctctcggcgaatgctgcttgcgaatgtgtgcgacgccttccgtgtgatggaaacacactaccccgtcggacttcgaatttctacgtggatgtgcatgaagctcttgttttcgatgtgtgtttgtaaagggaaaattagtactctgctcgactcttggtaacatgaaattctgaatgttactttatcatgattgcactgcaacttttttccttaaaataactgcttttgtaagaacggtgatattggagtgattagtataaattcaatggaatttgagaagcaatggcagcgggataatttagagtcactgatattacgagaggggtctttttgtaaacctccttttcaatgtcaaagcaccaatttataaaacgctgcagatgtagaggttatgtgcaactgatctgtccagtttgtgtatgaaatggatttgataaagtttttgctagttatttactacattttgggattaataagtgatttatatgcatatttttctgtaaatctacagttttttgtacaagatattctacaagttatgaagctaagggaagaaaatgccaaagatacctctagttatgttgaacacagccagcacagtttcgacaggtcaaggaagagctgtttcagtaaagaatgaagtgaaaacacttatttaggaaaatgtttctcaacaataaaatgtatagttgtttctctc

SEQ ID NO: 2427 - DNA, 3505 bp, Homo sapiens
cgccgcctgcccgcccgcccgctcgcccccggtccggactcctcctcctcctcttctcgcattgcagttgaacccagcagcccgccccaccggtggcttttgggggcagaccccggcggctgtggcaggagggcggcggcggcggctgcggtcgaagaaggggacgccgacaagagttgaagtattgataacaccaaggaactctatcacaatttgaaaagataagcaaaagtttgatttccagacactacagaagaagtaaaaatgcgtccaatgcgaatttttgtgaatgatgaccgccatgtgatggcaaagcattcttccgtttatccaacacaagaggagctggaggcagtccagaacatggtgtcccacacggagcgggcgctcaaagctgtgtccgactggatacacgagcaggaaaagggtagcagcgagcaggcagagtccgataacatggatgtgcccccagaggacgacagtaaagaaggggctggggaacagaagacggagcacatgaccagaacctgtcggggagtgatgcgggctgggcctggtggccaaagtgcctcctactcaagggggacttggatctggagctggtgctgctgtgtaaggagaagcccacaaccggccctcctggacaaggtggccgacaacctggccatccagcttgctgctgtaacagaagacaagtacgaaatactgcaatctgtcgacgatgctgcgattgtgataaaaaacacaaaagagcctccattgtccctgaccatccacctgacatcccctgttgtcagagaagaaatggagaaagtattagctggagaaacgctatcagtcaacgaccccccggacgttctggacaggcagaaatgctttgctgccttggcgtccctccgacacgccaagtggttccaggccagagccaacgggctgaagtcttgtgtcattgtgatccgggtcttgagggacctgtgcactcgcgtgcccacctggggtcccctccgaggctggcctctcgagctcctgtgtgagaaatccattggcacggccaacagaccgatgggtgctggcgaggccctgcggagagtgctggagtgcctggcgtcgggcatcgtgatgccagatggttctggcatttatgacccttgtgaaaaagaagccactgatgctattgggcatctagacagacagcaacgggaagatatcacacagagtgcgcagcacgcactgcggctcgccgcgttcggccagctccataaagtcctaggcatggaccctctgccttccaagatgcccaagaaaccaaagaatgaaaacccagtggactacaccgttcagatcccaccaagcaccacctatgccattacgcccatgaaacgcccaatggaggaggacggggaggagaagtcgcccagcaaaaagaagaagaagattcagaagaaagaggagaaggcagagcccccccaggctatgaatgccctgatgcggttgaaccagctgaagccagggctgcagtacaagctggtgtcccagactgggcccgtccatgcccccatctttaccatgtctgtggaggttgatggcaattcattcgaggcctctgggccctccaaaaagacggccaagctgcacgtggccgttaaggtgttacaggacatgggcttgccgacgggtgctgaaggcagggactcgagcaagggggaggactcggctgaggagaccgaggcgaagccagcagtggtggcccctgccccagtggtagaagctgtctccacccctagtgcggcctttccctcagatgccactgccgagaacgtaaaacagcaggggccgatcctgacaaagcacggcaagaacccagtcatggagctgaacgagaagaggcgtgggctcaagtacgagctcatctccgagaccgggggcagccacgacaagcgcttcgtcatggaggtcgaagtggatggacagaagttccaaggtgctggttccaacaaaaaggtggcgaaggcctacgctgctcttgctgccctagaaaagcttttccctgacacccctctctcgcccttgatgccaacaaaaagaagagagccccagtacccgtcagagggggaccgaaatttgctgctaagccacataaccctggcttcggcatgggaggccccatgcacaacgaagtgcccccaccccccaaccttcgagggcggggaagaggcgggacgatccggggacgagggcgcgggcgaggatttggtggcgccaaccatggaggctacatgaatgccggtgctgggtatggaagctatgggtacggaggcaactctgcgacagcaggctacagtcagttctacagcaacggagggcattctgggaatgccagtggcggtggcggcgggggcggtggtggctcctccggctatggctcctactaccaaggtgacaactacaactcaccggtgcccccaaaacacgctgggaagaagcagccgcacgggggccagcagaagccctcctacggctcgggctaccagtcccaccagggccagcagcagtcctacaaccagagcccctacagcaactatggccctccacagggcaagcagaaaggctataaccatggacaaggcagctactcctactcgaactcctacaactctcccgggggcgggcgcggatccgactacaactacgagagcaaattcaactacagtggtagtggaggccgaagcggcgggaacagctacggctcaggcggggcatcctacaacccagggtcacacgggggctacggcggaggttctgggggcggctcctcataccaaggcaaacaaggaggctgctcacagtcgaactacagctcccggggtccggccagaactacagtggccctcccagctcctaccagtcctcacaaggcggctatggcagaaacgcagaccacagcatgaactaccagtacagataagccccgcgcggagatttctaccttctgcacttactccccatcagaagatcgagttttatgcatcacagttaacatgtcagctgcctgcgctccaggcccccgcccccatcccgtccacgttgctgtgtcgtgaggtgcagcgggtcaccctgtggcccgtcctgtgacccatatttagccgtgtttgggactccgtgtcttcaatggtttgttagttgccattacaactttgtctgggtagagtttttgagtttttgcagttcagtatccctctgtctattcacacttcgtgttagtggtaactcagtttgtctttaaatagttacagaagggatacgtcatttgttaatgctttttgttgaagtgagttaaacgagcttttctgtattttaatgctttagtgtttcagttttataagtgaagattttattttaaaaaccagtgggaaagagtggggggtttctttttatgtctgggtcattcaggcagtacatctgaattaagctgaatgtagacaaataaagaaaaacaaaactgaaa

SEQ ID NO: 2428 - DNA, 2330 bp, Homo sapiens; identical to SEQ ID NO: 2031

SEQ ID NO: 2429 - DNA, 2156 bp, Homo sapiens
ttcgtgctttgcggcgggcgccggcgctggcggccgtgccgggaggaaaaccaattctgtgtcctcggaggaccacagcccagttgggccccaggcgaaacccagcctggagcttgcaggcaggacgactgttcagcacgcagaccgccgaggacaaggaggaacccctgcactcgattatcagcagcacagagagcgtgcagggttccacttccaaacatgagttccaggccgagacaaagaagcttttggacattgttgcccggtccctgtactcagaaaaagaggtgtttatacgggagctgatctccaatgccagcgatgccttggaaaaactgcgtcacaaactggtgtctgacggccaagcactgccagaaatggagattcacttgcagaccaatgccgagaaaggcaccatcaccatccaggatactggtatcgggatgacacaggaagagctggtgtccaacctggggacgattgccagatcggggtcaaaggccttcctggatgctctgcagaaccaggctgaggccagcagcaagatcatcggccagtttggagtgggtttctactcagctttcatggtggctgacagagtggaggtctattcccgctcggcagccccggggagcctgggttaccagtggctttcagatggttctggagtgtttgaaatcgccgaagcttcgggagttagaaccgggacaaaaatcatcatccacctgaaatccgactgcaaggagttttccagcgaggcccgggtgcgagatgtggtaacgaagtacagcaacttcgtcagcttccccttgtacttgaatggaaggcggatgaacaccttgcaggccatctggatgatggaccccaaggatgtcggtgagtggcaacatgaggagttctaccgctacgtcgcgcaggctcacgacaagccccgctacaccctgcactataagacggacgcaccgctcaacatccgcagcatcttctacgtgcccgacatgaaaccgtccatgtttgatgtgagccgggagctgggctccagcgttgcactgtacagccgcaaagtcctcatccagaccaaggccacggacatcctgcccaagtggctgcgcttcatccgaggtgtggtggacagtgaggacattcccctgaacctcagccgggagctgctgcaggagagcgcactcatcaggaaactccgggacgttttacagcagaggctgatcaaattcttcattgaccagagtaaaaaagatgctgagaagtatgcaaagttttttgaagattacggcctgttcatgcgggagggcattgtgaccgccaccgagcaggaggtcaaggaggacatagcaaagctgctgcgctacgagtcctcggcgctgccctccgggcagctaaccagcctctcagaatacgccagccgcatgcgggccggcacccgcaacatctactacctgtgcgcccccaaccgtcacctggcagagcactcaccctactatgaggccatgaagaagaaagacacagaggttctcttctgctttgagcagtttgatgagctcaccctgctgcaccttcgtgagtttgacaagaagaagctgatctctgtggagacggacatagtcgtggatcactacaaggaggagaagtttgaggacaggtccccagccgccgagtgcctatcagagaaggagacggaggagctcatggcctggatgagaaatgtgctggggtcgcgtgtcaccaacgtgaaggtgaccctccgactggacacccaccctgccatggtcaccgtgctggagatgggggctgcccgccacttcctgcgcatgcagcagctggccaagacccaggaggagcgcgcacagctcctgcagcccacgctggagatcaaccccaggcacgcgctcatcaagaagctgaatcactgcgcgcaagcgagcctggcctggctcagctgctggtggatcagatatacgagaacgccatgattgctgctggacttgttgacgaccctagggccatggtgggccgcttgaatgagctgcttgtcaaggccctggagcgacactgacagccagggggccagaaggactgacaccacagatgacagccccacctccttgagctttatttacctaaatttaaaggtatttctt

SEQ ID NO: 2430 - DNA, 1592 bp, Homo sapiens; identical to SEQ ID NO: 240

SEQ ID NO: 2431 - DNA, 1303 bp, Homo sapiens; identical to SEQ ID NO: 2033

SEQ ID NO: 2432 - DNA, 662 bp, Homo sapiens
ccccagccatggagcaagacaacagcccccgaaagatccagttcacggtcccgctgctggagccgcaccttgaccccgaggcggcggagcagattcggaggcgccgccccacccctgccaccctcgtgctgaccagtgaccagtcatccccagagatagatgaagaccggatccccaacccacatctcaagtccactttggcaatgtcgccacggcaacggaagaagatgacaaggatcacacccacaatgaaagagctccagatgatggttgaacatcacctggggcaacagcagcaaggagaggaacctgagggggccgctgagagcacaggaacccaggagtcccgcccacctgggatcccagacacagaagtggagtcaaggctgggcacctctgggacagcaaaaaaaactgcagaatgcatccctaaaactcacgagagaggcagtaaggaacccagcacaaaagaaccctcaacccatataccaccactggattccaagggagccaactcggtctgagagaggaggaggtatcttgggatcaagactgcagtttgggaatgcatggacaccggatttgtttcttattccttcacttttggggaaaatctcttgtttttaaaaagtgataaatttggtgttaggtcaaaaaaaaaa

SEQ ID NO: 2433 - DNA, 1234 bp, Homo sapiens
cgctgctcttggttctggttctggaggctgggttgagaggtcgccggtccgactgtcctcggcggttggtcagtgtgaatttgtgacagctgcagttgctccccgcccccgagcagccgaggagtctaccatggctcaagaatctcccaaaaattcagcagcagaaattccagtgactagtaatggagaagttgatgactctcgtgaacatagctttaatagggatttgaagcattcattaccatctggacttggtctctcagaaacccaaattacatctcatggctttgacaataccaaagagggtgttattgaagcaggagcatttcaaggtggccagagaacacagacaaaaagtggaccagttattctagcagatgaaattaaaaatcctgcaatggaaaagttagaacttgttagaaaatggagtctaaacacctataagtgtactcgacagattatctctgagaagctaggccgtggctcaagaactgtggaccttgaacttgaagctcagattgatatattaagggataacaagaaaaaatatgaaaatattttaaaactggctcaaacattgtcgacccagcttttccagatggtacatacccaaaggcaacttggagatgcatttgctgacctgagtttgaagtcactagaacttcatgaagaatttggctataatgccgatacccagaaactgctggctaaaaatggagagactcttcttggggccattaattttttcattgctagtgtgaacactttggtgaataaaaccattgaagatacattaatgactgtgaaacagtatgaaagtgccaggattgaatatgatgcatatcgcactgatttggaagaactgaatcttggaccacgtgacgcaaacactctgccaaagattgagcagtcacagcatctcttccaagcacataaggaaaaatatgataaaatgcgcaatgatgtttctgtcaaattgaaatttctagaagaaaataaggttaaagtattgcacaatcagctggtccttttccacaatgccattgccgcttactttgctgggaatcagaagcagcttgaacagacacttaaacagttccatatcaaattgaaaacccctggagtggatgccccatcttggcttgaagaacagtaaaatcacagcggaaaataaaaagaaagtcgcgttgttatatttctaaaccaacctaacaagaattaagcagagttgggc

SEQ ID NO: 2434 - DNA, 853 bp, Homo sapiens; identical to SEQ ID NO: 2037

SEQ ID NO: 2435 - DNA, 1842 bp, Homo sapiens
tacctcatccacctcttccatacctttacaggcctctcaattgcttattttaactttggaaaccagctctaccactccctgctgtgtattgtgcttcagttcctcatccttcgactaatgggccgcaccatcactgccgtcctcactaccttttgcttccagatggcctaccttctggctggatactattacactgccaccggcaactacgatatcaagtggacaatgccacattgtgttctgactttgaagctgattggtttggctgttgactactttgacggagggaaagatcagaattccttgtcctctgagcaacagaaatatgccatacgtggtgttccttccctgctggaagttgctggtttctcctacttctatggggccttcttggtagggccccagttctcaatgaatcactacatgaagctggtgcagggagagctgattgacataccaggaaagataccaaacagcatcattcctgctctcaagcgcctgagtctgggccttttctacctagtgggctacacactgctcagcccccacatcacagaagactatctcctcactgaagactatgacaaccaccccttctggttccgctgcatgtacatgctgatctggggcaagtttgtgctgtacaaatatgtcacctgttggctggtcacagaaggagtatgcattttgacgggcctgggcttcaatggctttgaagaaaagggcaaggcaaagtgggatgcctgtgccaacatgaaggtgtggctctttgaaacaaacccccgcttcactggcaccattgcctcattcaacatcaacaccaacgcctgggtggcccgctacatcttcaaacgactcaagttccttggaaataaagaactctctcagggtctctcgttgctattcctggccctctggcacggcctgcactcaggatacctggtctgcttccagatggaattcctcattgttattgtggaaagacaggctgccaggctcattcaagagagccccaccctgagcaagctggccgccattactgtcctccagcccttctactatttggtgcaacagaccatccactggctcttcatgggttactccatgactgccttctgcctcttcacgtgggacaaatggcttaaggtgtataaatccatctatttccttggccacatcttcttcctgagcctactattcatattgccttatattcacaaagcaatggtgccaaggaaagagaagttaaagaagatggaataatccatttccctggtggcctgtgcgggactggtgcagaaactactcgtctcccttttcacagcactcctttgccccagagcagagaatggaaaagccagggaggtggaagatcgatgcttccagctgtgcctctgctgccagccaagtcttcatttggggccaaaggggaaacttttttttggagaaggcgtcttgctttgtcacccacgctggaatgcagtggcgggatctcagctcaccgcaacctccacctcctgggttcaagtgattttcctgcctcagcctcccaagtagctgggaatacaggcacgccaccatgcccagctaatttttgtattttcagtagaaacgggatttcaccacgttggccaggctggtctcgaactcctgaccgcaagtgatccacccgcctccgcctcccaaagtgctgggattacaggcgtgagccaccgtgcccggcccaaaggggaaactcttgtgggaggagcagaggggctcacatctcccctctgattcccccatgcacattgccttatctctccccatctagccaggaatctattgtgtttttcttctgcc

SEQ ID NO: 2436 - DNA, 990 bp, Homo sapiens; identical to SEQ ID NO: 2040

SEQ ID NO: 2437 - DNA, 1648 bp, Homo sapiens
tggccgacacccgcagggacgcccgccggacgagcacgcggagggccctcgcctccacggatgcaccatgccggtgtgaggagcatctgttcttcccactctctgcagttaacaaacccaacccaaaccaccacaggtgctcctcctggggagtttcctgtctgacaaatgccaggctcacttcaaggagaatcacgcttctttctaaagatggattcaccatttaaaacagagctctgggagcctttcggcaaatcttgaaagctgcacggtgcagagacatggatgtgacttcccaagcccggggcgtgggcctggagatgtacccaggcaccgcgcagcctgcggcccccaacaccacctcccccgagctcaacctgtcccacccgctcctgggcaccgccctggccaatgggacaggtgagctctcggagcaccagcagtacgtgatcggcctgttcctctcgtgcctctacaccatcttcctcttccccatcggctttgtgggcaacatcctgatcctggtggtgaacatcagcttccgcgagaagatgaccatccccgacctgtacttcatcaacctggcggtggcggacctcatcctggtggccgactccctcattgaggtgttcaacctgcacgagcggtactacgacatcgccgtcctgtgcaccttcatgtcgctcttcctgcaggtcaacatgtacagcagcgtcttcttcctcacctggatgagcttcgaccgctacatcgccctggccagggccatgcgctgcagcctgttccgcaccaagcaccacgcccggctgagctgtggcctcatctggatggcatccgtgtcagccacgctggtgcccttcaccgccgtgcacctgcagcacaccgacgaggcctgcttctgtttcgcggatgtccgggaggtgcagtggctcgaggtcacgctgggcttcatcgtgcccttcgccatcatcggcctgtgctactccctcattgtccgggtgctggtcagggcgcaccggcaccgtgggctgcggccccggcggcagaaggcgctccgcatgatcctcgcggtggtgctggtcttcttcgtctgctggctgccggagaacgtcttcatcagcgtgcacctcctgcagcggacgcagcctggggccgctccctgcaagcagtctttccgccatgcccaccccctcacgggccacattgtcaacctcaccgccttctccaacagctgcctaaaccccctcatctacagctttctcggggagaccttcagggacaagctgaggctgtacattgagcagaaaacaaatttgccggccctgaaccgcttctgtcacgctgccctgaaggccgtcattccagacagcaccgagcagtcggatgtgaggttcagcagtgccgtgtagacagccttggccgcataggcccagccagggtgtgactcgggagctgcacacacctgggtggacacaaggcacggccacgtcatgtctctaaactgcggtcagatgtggcttctggctcctcggggcctcgcgagggtcacgcttgcctggtcaccctggggctgcttaagaaacctcacgactggtcaccttgcactcctcacacagaattgctacaatcccaaagcgctcgccccgca

SEQ ID NO: 2438 - DNA, 1440 bp, Homo sapiens
gtgatgcccatctcatatcagccagggacaaagcaactccttgttcatcccagcttggcttttgatccgtgcccatgcctggttcatgccttggacacataggtttcctttaaagaggtggtattgtagccagcttatatttgcatctatagccatgtttctagtccagcttggtgtgcaatactagatgagttaataactggtccttgtttctgatctggttcccattgtgtaactgtgttgattgggaaggtagtttgtgagccatgaaatgcttggttcattggttgcttattgacctcattaacctaggacttgaatatcccaaagggtatgctctttaccacattcaactcctaatttatttgtttaggttatgatgtgattgctcaagcccaatctgggactgggaaaacggccacatttgccatatcgattctgcagcagattgaattagatctaaaagccacccaggccttggtcctagcacccactcgagaattggctcagcaggtaagagtggcttctattccctccttcagggctgatttagggatgatgagtataatccaaggaccagagaagtcttctctgatcaccaccttgggaggaagacatgggtgccctaacactctcgagacctgctgggttaattaaaagctatttcttacccaaacgtaaccattgcttcctccacccatttcctgagtcaaatgggaaagctgttgggtgaagcctggctggctgggcaagtttgactgtgttctgaataagcaccttcactatgggctaagagatcccttggtgtgggggtgatcttacagtagtcagagcagatggacagtccttttcacccttgcttaatagccagagctgtttcatgcctggggcacacacaattctaatgctggactttttcctgggtcatgctgcaacactgatgtcagagcatgtttttaaatgttctgtggcaggggcagtgattattctgggtgtggataatgtaagaagttacagcagagctccattctaaggcacttggctctcagttttctcagagtgaacatgcctcgtagcttgggtcctatggcaggagtgcaataggacatggatatgcatcacctgttctataaaactggttgctggctgggcgcggtggctcaactcgtataatcccaacactttgggaggccaaggcaggcagatctcttgagatcaggagttggagaccagcctggccaacatagtgaaaccccgcttctactaaaaatacaaaaattagccaggcatggtggcgtgtgccttttatcccagctactcgggaagctcaggcaggagaatttaacccaggaggtggaggttgcagtgagctgagattgtgccattgcactccagcctgggcaacgagcaaagctctgtctcaaaaaaaaaaaaaaaaaa

SEQ ID NO: 2439 - DNA, 1529 bp, Homo sapiens
cgggaagttgacgggcatcagtgaccccgtgactgtcaagacctccggctcgaggttcggatcctggatgacagaccctctcgcccctgaaggcgataaccgggtgtggtacatggacggctatcacaacaaccgcttcgtacgtgagtacaagtccatggttgacttcatgaacacggacaatttcacctcccaccgtctcccccacccctggtcgggcacggggcaggtggtctacaacggttctatctacttcaacaagttccagagccacatcatcatcaggtttgacctgaagacagagaccatcctcaagacccgcagcctggactatgccggttacaacaacatgtaccactacgcctggggtggccactcggacatcgacctcatggtggacgagagcgggctgtgggccgtgtacgccaccaaccagaacgctggcaacatcgtggtcagtaggctggaccccgtgtccctgcagaccctgcagacctggaacacgagctaccccaagcgcagcgccggggaggccttcatcatctgcggcacgctgtacgtcaccaacggctactcagggggtaccaaggtccactatgcataccagaccaatgcctccacctatgaatacatcgacatcccattccagaacaaatactcccacatctccatgctggactacaaccccaaggaccgggccctgtatgcctggaacaacggccaccagatcctctacaacgtgaccctcttccacgtcatccgctccgacgagttgtagctccctcctcctggaagccaagggcccacgtcctcaccacaaaggaactcctgtgaaactgctgccaaaaagataccaataacactaacaataccgatcttgaaaaatcatcagcagtgcggattctgacatcgagggatggcattacctccgtgtttctccctttcgagccggcgggccacagacgtcggaagaaactcccgtatttgcagctggaactgcagcccacggcgccccggttttcctccccgccctgtccctctctggtcaaacaacatactaaagaggcgaggcaatgactgttggccagttctcaccggggaaaaacccactgttaggatggcatgaacatttccttagatcgtggtcagctccgaggaatgtggcatccaggctctttgagagccatgggctgcacccggccgtaggctagtgtaactcgcatcccattgcagtgccgtttcttgactgtgttgctgtctcttagattaaccgtgctgaggctccacatagctcctggacctgtgtctagtacatactgaagcgatggtcagagggtgtagagtgaagttgctgtgcccacattgtttgaactcgcgtaccccgtagatacattgtgcaacgttcttctgttattcccttgaggtggtaacttcgtatgttcagtttatgcgatgattgttgtaaatgcaatgccgtagtttggattaataagtggatggtttttgtttctaaaaaaaaaaaaaaaaaa

SEQ ID NO: 2440 - DNA, 6694 bp, Homo sapiens
aagcttgcatgcaggccacgccccggagagtcacgtagctctgcgacatccgcagcctcatttaccagagggagccagggctgcagctcatctgtttgcggatcaagaacccgagctgtgcttgtggctgcggctgctaactggctgcgcacaggtaaggccaggcaaggcgggaccgactcaacatcttccgcttcatttccttggcctcttcccctgccatcctcgtcctgctacctgggactccgggatgtgccctttcgaccctttcctaacatctttgctcctttccgcgtacttgaaaccccatggctcaacctcttctgttctatccctcttcagctctcccagctggacctcagcttttccaatcccaaatcctcctctacttgttggatttttccttggagtctgtctctcctacccagagcatttccttctcagcctgctccctctcctcctaggctaggtcctctctccagttctcccgccttctctgccccccggtctaggtctctcccgctgactggttagcctgcatcaccactagctcccctcagtctcatctctctctcaggctctctactcctttcagccttggtcctctgccctcccgtctgggtgtctagattgtggggaattgaagtgcttcctattgctatcctcctgccaaacaggtgaagtgcttcctgggcacagagatgacccggaggtgtcactagccctagtctccacacactaacacagctgacccgctgggccctctttcctacatcactgcagccccactggggccaacctctggtactgggtgggaataggcaataggcataggcaggcaggtttggagtacagaaaaggagaagctgcaggagcctgtgactggtatttgtgccactcctactccctacctgttcttccaaccttttcctctagaagctgagagaagagggtggcaataagtacttttgcctcattctgaagccttggaagtaagtacactttcctaggggtcctgtggaggatgagaaaagggaagctggaaaggccaggacttttgcctacctcaacaagggaccaagttcagtgaaagaagggttggcatccttgattgggcagcagatttatcagaagagctgtggcttcagggctgctcacctccccacccccaccctgcatctttccccagggctgggaaggatgcctaccagggacaaaaggagatgtgggaactggagccctaagcttgctagctgtcagaaggactggtgccacttgatgcccaggactcatgccaaggactgctgccctgttcccagccccttgcttgatggggaggccatttggcccatctggccaggagaggcagcagagggtgaggtctggcttttttatcttgtctccactccagggagctgtcaccatgcctcactcgtacccagccctttctgctgagcagaagaaggagttgtctgacattgccctgcggattgtagccccgggcaaaggcattctggctgcggatgagtctgtaggtaagtggacatctgtagccaggtagggtacaggtggctaggggaccctggggatgttctcactgcctctctttgtttgcccctaggcagcatggccaagcggctgagccaaattggggtggaaaacacagaggagaaccgccggctgtaccgccaggtcctgttcagtgctgatgaccgtgtgaaaaagtgcattggaggcgtcattttcttccatgagaccctctaccagaaagatgataatggtgttcccttcgtccgaaccatccaggataagggcatcgtcgtgggcatcaaggtgcagcccctggccctgctctgaatggaagctgggtgtgaaaataagcttgtgtaggaggggtagcaaggagaatcctgcctggattcaaccctctgcttgtacttcctctacaggttgacaagggtgtggtgcctctagctgggactgatggagaaaccaccactcaaggtataggatgggtgggcttgaggaccaaagaggtgttagatagttgatgctggtaaaagaggggcagagtaatgaggttggcactgtgcttgcagggctggatgggctctcagaacgctgtgcccaatacaagaaggatggtgctgactttgccaagtggcgctgtgtgctgaaaatcagtgagcgtacaccctctgcacttgccattctggagaacgccaacgtgctggcccgttatgccagtatctgccagcaggtgtgtgtgttgggagggtggtgagctaggtgccctgtatgcctggtggggagagagtcacaaggctttcttcatctcccctactgcccctcccaagcatctctgctcttgcctgcagaatggcattgtgcctattgtggaacctgaaatattgcctgatggagaccacgacctcaaacgttgtcagtatgttacagagaaggtgagtccacacctgggcacacaaacatactgcagggacagctcggcaggagtgtctgttccccagaacccccagcttagatccaggcacactttcccctagcactttttcacttcatcccggcacaggcctgtgatctgagcctgtactgagccctcacagtctgtgcccatctacccctacatagggagcatcgagcagtaaccagtgggggcccagacccttagtaaacctcctctaatccccacccaggtcttggctgctgtgtacaaggccctgagtgaccatcatgtatacctggaggggaccctgctcaagcccaacatggtgaccccgggccatgcctgtcccatcaagtataccccagaggagattgccatggcaactgtcactgccctgcgtcgcactgtgcccccagctgtcccaggtactacccagctccctaacctgctcctatccctaaggcccatcttcaggtccttcttgtggccttcaggggttccctatcctggaaaaattgggagtgaccagtcagtttgtcttctctcctccacactaggagtgaccttcctgtctgggggtcagagcgaagaagaggcatcattcaacctcaatgccatcaaccgctgcccccttccccgaccctgggcgcttaccttctcctatgggcgtgccctgcaagcctctgcactcaatgcctggcgagggcaacgggacaatgctggggctgccactgaggagttcatcaagcgggctgaggttgggagctacaggtggtggtgggtgggggcagcacccagaggctatagcctgggcagggcttggcacctgtgggctggctcagcctgcttactccacgctcccttttgcaggtgaatgggcttgcagcccagggcaagtatgaaggcagtggagaagatggtggagcagcagcacagtcactctacattgccaaccatgcctactgagtatccactccataccacagcccttggcccagccatctgcacccacttttgcttgtagtcatggccagggccaaatagctatgcagagcagagatgccttcacctggcaccaacttgtcttcctttctctcttcccttcccctctctcattgctgcacctgggaccataggatgggaggatagggagcccctcatgactgagggcagaagaaattgctagaagtcagaacaggatggctgggtctccccctacctcttccagctcccacaattttcccatgatgaggtagcttctccctgggctctccttcttgcctgccctgtctcctgggatcagagggtagtacagaagccctgactcatgccttgagtacataccatacagcaaataaatggtagcaaaacattctactttgcctgtctgttttacacatcaaattcccacctcccagtttctgatctctgctaattctatctctgggccctctgactctggaggtggagagggtgggatttgagtcttactgggcttcaagttatggaggaagggcacatgcagtcaccatccccagctcaggctcttgctctcttgatgtccaagtctggagtggggcaatgaggaagactgcaagtcttctagggactcgcacatcagtggcactgggctgcagctacagaagtatggagtgaggccaaactggcaactcctgaaggcagatttgtgcaaggctcaaagcagggaggcagcaagacaggctgggataagagtgggtgggagtctctcccatctcgcagtgttaagcccagctgggacctggtaccgcccagctgggacctggtaccttccactagggtgagccacaccagtaagggcaagcgagcacctggactcccgcccaaagaggaaaaccaaggctctgcgggctgccagggctgagcagggcatctaggaggttgccaagggctatggccattttcatttggggtagaagtgggcacaaagggagccaattggagggtctgggtaaggacagctctggtgaggcctgatgctgaactttgaccactgggctgggttgtgaggtaggctgagaacctgggtctaagcagataaaaagaagagataacaagctgcgtgtgttctgtgtcaactggggaggctacaaatgctccaccctgtgtggcctgactttataataacaaaaatagcttgcacatagcaccaaccctgttctaatcactttatatgtactgacacatttcatacaactctataaagtaggtactattactatcatccctattttaatagagaaaacaggcacagataggcacagaacgatcttctcacgatcactcacctaataagtgatgaagccaggatttgaaccgcagtgatcagcatctagagtctgggctcatgacttttcaagatttttaagtgaagtattctgagttttccaagttggaaatgaattaaaacgtattttaaaatagcgagagaggccaattgtgctaaaacatactagcttgctacctccgtgtttgaggctttgaggagagggcaccctaagaggagttctacgataaggataataagaccgtgacagttgacgttgagggctttccgtgtgccaggctccttacaagaacggcctcatttatgtaaatatctccattttcagatgagcctcggagctgcctgtagttgcccagctagtatttaaggactgcagaggttgcgctcttgattgcggggctagaagtgtgttctacagggaagcggggaacttcgttccagcagcgccgaaacccgcacggcccctaggctgtccctccgcgcccgggtgacttcctttcagatccccagcgaagctcccagcggagccctcccacccctcgcccgcttgctcccgtctgcgggtctggagtagcgctcgcgattggccccgatcaccgccgcggtcctgccccctcgttgcagagattccgattgggtgaggctcacgaagctctgcccccacggtggccggagcagccggaagctagcatggcggccgccggggctgcggctacacacctaggtgcggtgggcttcgggtggggggcctgcagctagctgatggcaagggaggaatagcaggggtggggattgtggtgtgcgagaggtcccgcggacggggggctcgggggtctcttcagacgagattcccttcaggcttgggccgggtcccttcgcacggagatcccaatgaacgcgggcccctggaggccggtggttggggcttctccgcgtcggggatggggccggtaccctagcccgtttccagcgcctcagtcggttccccatgccctcagaggtggcccggggcaagcgcgccgccctcttcttcgctgcggtggccatcgtgctggggctaccgctctggtggaagaccacggagacctaccgggcctcgttgccttactcccagatcagtggcctgaatgcccttcaggtgagactgctgtgcgggagggtcgggggacagcccccccggcaaggtggagactcagtgacggccctgatgctccttcctgtagctccgcctcatggtgcctgtcactgtcgtgtttacgcgggagtcagtgcccctggacgaccaggagaagctgcccttaccgttgtgcatgaaagagagattcctctgaaatgtgagttactggggatcagggctgcttttcgcctctgagctcagttcagagctgagttgggtgggaggagcgggggtgtaccataaacgcagttaaaaacttactgttgaaagacctctgaatgaacagtgtgtttggtcagaaaaaaaactactttcaattcacagtcactaaatagcaattttactcgtaagacaggctacctaatcggaagcagttgatgcccatcagggtataggggaagaggtgggatatagtggaaagaacacagagtttgaaattaaattggatttgcatataggccctatttagtttgtttgtttatttatttattatattttgagacgacttcgctctgtcgcccaggctggagtgcagtggcgccatcttggctcactgcaacctctgcctcctgggttcaagcgattcttctgcaccagccacccgagtagctgggattacaggcgcgcgacactacgcccagctaatttttgtatttttagtagagacggggttatgccatgttggccatgctgctctcgaactcctgacttcaggtgatccgcatgc

SEQ ID NO: 2441 - DNA, 3881 bp, Homo sapiens; identical to SEQ ID NO: 298

SEQ ID NO: 2442 - DNA, 874 bp, Homo sapiens; identical to SEQ ID NO: 2043

SEQ ID NO: 2443 - DNA, 3573 bp, Homo sapiens; identical to SEQ ID NO: 2047
  misc_feature (1)..(3573): n=a,t,g or c

SEQ ID NO: 2444 - DNA, 14117 bp, Homo sapiens
tttctttcaaaatatttctgctcattgacaatgcatctgatcacccaagagccctgatggagctgtccaaggagattaatgtttttgtgtttgccaacacaacatccattccacagcccatggatcaaaaactaattttgactttcaagtcttattacctaagaaatatatttcataaggctatagctgccatacagatgattcctctgatggatctgggcaaagtaaattgaaaaccttctgaagaggattcactattctatatgtcaatatttgtgattcaagagaggaggtcaaaatatcaacattaacaggagtttggaagaagttgattccaactctcatgtatgatgttgaggggcttaagacttcagcagaggaagtaactatagatgtgttggaaacagcaagagaattaaaattagaatggagcctgaagatgtgactgaattgttgccatgttatggcaaaacgaacggatgaggaactgcttcttattcatgaacaaagaaagtggtttcttgagatggaaactactcctggtgaagatgctgtgaacatcactgaaatggcaacaaaggatttggaatactacatcaatttagttaataaggcagtggcagggtttgagaggactgaccctagttttgaaagaatttctactgttaaaatgctatcaaacagcatcacatgctacagggaaatctttcatgaaaggaagagtcaactgatgcggcaaacttcactgatgtctcattttcagaaattgccacagccacactaacttgcagcaatcatcaccctgatcagtcctcagccatcaacattgaggcaagaccttccaccagcaaaaagattataacttgctgaaggctcagatgatccttagcatttttagcaagaaagcatttttaaaattaagttatatacattgtttttaggccataatgctatggtacacttaatagactatagtatagtgtaaatataatgtttacatacacagaaaaaccaaaaagtttgtgtgactcactttatggttacatttgctttattgtggtggtctagaactgaacatgcactatctctgaggtatgcctgtatcttcctctatcttcagtgggtctccaaaccacctgaaggacatgctaaacacaggctgctgcatcccagccccagcctcagagtttctgattcagccagtctgggatgagcctgaaaaactgccatttcttttttttttacattttatttttatttttatcaaagcagtgtatctacattgtttaaataaaacaacattaaatagcaaatatttaaaaactgcaacatctatgccttctttctttctttattgttattatactttaagttttagggtacatgtgcacaatgtgcaggttagttacatatgtatacatgtgccatgctggtgtgctgcacccactaactcgtcatctagcattaggtatatctcccaatgctatctctcccccgtccccccaccccacaacaaatgagaacacatggacacaggaaggggaacatcacactcttttttttaaaaattttactttaagttctgggatgcatttgcagaatgtgcaggtttgttgcataggtatacatgtgccatggtggtttggctgcacctatcacccatcatctaggttttaagcccgcatgcattaggtatttgttctaatgctctctctccccttgccccccatcccccgacaggccctggtgtgtgatgttcccctccctgtgtccatgtgttctcattgttcaactcccacttatgagtgagaacatgtggtgttcggttttctgttcctgtgttggtttgctaagaatgatggtttccagcttcatccatgtccctgcaaaagacacgaactcattcttttttatggctgcatagtatttcatggtatatatgtgccacattttctttatccagtctgtcattgatgggcatttgggttggttccaagtctttgctattgtaaatagtgctgcaataaacatacttgtgcatgtgtctttatagtagaaagatttataatcctttgggtatatacccagtaatgggattgctgggtcaaatggtatttcttggttttagatcattgaggaatcaccatgctgtcttccacaatggttgaactaatttacactcccaaccaacagtgtaaaagctttcccatttctccacagcctttgccagcatctgttgttaccagacttgttaatgatcaccattctaactggcatgatatggtatctcattgtggttttcatttgcatttctctaatgaccagtgatgatgagctttttttcatatgtttcttggccacataaatgtcttcttttgagaagtgcctgttcatatcctttgcccactttttgatggggttgtttgttattttcttgtaaaattttgtttaagctccttgtagattctggatattagacctttgtcagatgggtagattgcaaaaattttctccaattctataggttgcctgctgactctgataacagtttcttttgctgtgcagaagctctttagttgaattagacccatttgtcaactttggcttttgttgcaattgcttttgctgttttagtcatgaagtctttgcccatgcctatgtcctgaatggtattgcctagactttcttctagggtgaaaactcacatttctaacatgttcctgagtcaggttgatgctgagagtgactgataacaccttattataataattatagtttttgggtgagaggattaaatgggcaaattaatgccaagcactcagcaccatgcctggtatttgtatacattccacaagtgctggctatgattctgaagggtggcctgatgagtctcatcccttgtagttggtattgccatcacacctccttccatctgatgctataatcttctctaaataggtaatccagacaaggtactggaatttgtagttgttgcagagaatcaaattgtgagagtatttgatctgaccccctcgattggcatgaagaaactgaggtctggagagacaaaattactttcccaaggccaaatggcaagtcagaggcagtatatctacgctctccttttcttatgcaatgaatgagctgggtggcattttccctttcctgttcttgtactgacatttctgggaatatgtgaaacataaggcaagtacttataccccaaaattatatcaagaagattactgaataaaaaagtggctatatagcacacacatactaaatgtgaagctcacagcttttgcagccaggactgaaaaccactgctctagcatgttgccttcttaagtgaatgcccagggcttctatagttgggcaaatatgctccctgtctcctggcttagctcattccagggctatagaacatcctttcccaagggagtggattcacactgcttccatagtctgagatcctgaagtgagccttccccatctgccacaacagaaagtaaaagtagaacctgtccaactattctcagtctgttcaacaaacaatttattgagcacttgacaattgtgtatatggtgcagtgataattgaatggatggtccagagggggcaagacagagcagctgccacctggagatgttcatgatatggacttttccaagaggaagagaccaactggaaagatgtacctgattcttaggcttctgtttgggtcttttttttttttttttttttgccttttgaaggggtgcagcattcctggaggtactgcaataccaggtcaacatgtagagtgaacagagcaagctcttattccatctccctgctcccaaaatccatttaatatgttgtcctcagatggaggacgtatcagatattaagacgataagaacagataccacacttgatcttagccaaaaggctgcacaaagaagtgatgctgcctatgtcttgagttcattctctccccactgatattattttcttccccttggcaggaagatgatgtctgttaggaagcctctgaggttcctgttcctttctgctggatttatgccgctgccagcatcggagcagtttctaccacccacacatttccttgttaaatagccaggcctcttcccatggggaatgctttcattaaaagaggcagccactgctgcacagacctgcaggcttctcagggctagagcaggcgggggtgcagtgggcaaagccagtggaggcacaggctgggttgtggcagtctcctggagggccctgccctagtaatgagggcccaggcatgcggctgaccctttgaagatgtgtcctgaagctctctcatggtgatcaatgacaggaacccagactcctgctttagccaaatgataagtttggcctcttttattggaaaccaaattacaaattaattagcagcttcctctggggctgggtgtgaacatcaacaccacccaatgatgaatttctatcatgagccccctcactgcaagggcataaaatggcccgggcggcatggggtctgtagacatccaggtagctgtggctgaggagaaagggcctctccaacatgacatcctcctgctgtgtcaccaacaacttgcaagcctctctcaagagctgcccccggcctgcctcggtctgttccagcggcgtgaactgccggcctgagctgtgcctgggctatgtctgccagcccatggcatgcctgccttcggtctgcctgcccaccaccttccggccagccagctgcctctccaaaacctatctatccagttcctgccaggcagccagtggcatctccggctccatgggccccggcagctggtacagcgaaggggccttcaatggcaatgagaaggaaaccatgcagttccttaacgaccgcctggccagctacctgacgagggtgcggcagctggagcaggagaatgcggagctggagagcaggatccaagaggcctctcactcccaggtgctcaccatgactcctgactaccagtctcatttcaggaccattgaccagctccagcagaaggtgagggcagcggtgaggtgaataggctctctgggaagggaactggactagctggcattccagattggaatctcgttagcttattaagctatgttcaggacaaagagacttccctagggcatagggttattttataatttgagcactcagcctgaggctttcatgtggagagatctgggatctagtctcagttctaccattgcctcattgcatgactttgggggtcccatcccttccccaggcctcagttttctcatctgtaaaacagggataataatggtcgttatctaatggggttgtcaaaaggatttgatgagatgatgcaggtcaagtgcttggaacagcccctggtccacggtaagttttcagtaaatgtcaaagacccttctaactgtcacatgagtgacttcagacatgagattcttcccttccacattgcttggcacatccaaaatggggaatttgaatttacgaagcttcaggttcttaaaaaatacatctcaagttctccaaggactagcaattcgctaaatatctcccagagttccagggaagaggaccttctgcagggatggctgcagggctgctggatcctacctttgctgctgtcttctcttcatttgggttcttcttgcttcgtctcatcctgaactaaccctctccatgtgccttggcctacagattctgtgtaccaaggcagagaatgccaggatggttgtgaacattgataatgccaaactggctgccgatgacttcagggccaagtgagttcagtcggggggctggagctggggaggacctgtcctcataggctctggggcaactttccattagtttcacggagggttggaaagtgccggcagtttaaggccttccctgagttctgcattctgtttcacccttggttgctgaccctgtccttgtgcaggtacgaggcagagctggccatgcggcagctggtggaggccgacatcaatggcctgcgcaggatcctggatgatctcactctgtgcaaggctgacctggaggcccaggttgagtccctgaaggaggagctgatgtgcctcaaaaagaaccatgaggaggtgaggctgggaagtcccgctgaagtggccccgggaagcagagggggaggaacgtggggtatggggttggataggcgtgggttgaaattcccaagcctgccacatgttgttttagtgactttgcccaatttatggaatcttcctgagcctcctcttctgtaaaatggggacaacatgatcacgcagggttattgtgaggatttaatggacaggatatggatcatggaaatccccaaggcatgggtatgaaacacctgccacttggtcaactctcagaagtgtagcccccttcccttctgcatttcctgggctagtgtgactgccaagcactcactagtggcaactgcatttttttctctcgagagccacacagcagaggtagagtggtgcagtggtgccggggtgagttatgttccagatctcacgttgaatggcctgtccatctctgcctggctcaactctcagaagcagtcccatctcttctgagagggagtacagctgcagtggtctcctctttttgcccctatccttattttgtcctcccttctgtttgcatataaaatgctcaagctgaagccctttactttctgatttttccttatctcctgaagtttcttggaggggaagccctctgctttgggcacctgtgtgctgccaagcccacctgagccatggtgtttttcccccctccctccttgactctcaacctcttgacttgggatttgaatgaacaagtgcctctgaatcttggctgggtttcctcagggcttaagtgtaaagtaacaatcagtcaccacgtactcaccgagcaccctcgggctcctgactcatcttgctcaaatcagagaactgggaacggcaccaagaagccactaatgagaagttatcacacatcctggcagactcagtgacaactttccctcttggcagccaagcctgggaggcagctgccctaactcgggcctttaactagtcaagccaggctcctgctaccctcctccaggatgaacacaggtggggagggagactgggaatactaggggtaccggtttcccattttagcccaaatgcatcaaacaaaccagggtgctgctcttggcttctgccaaagtgagaggaagtgttgtgttgcagtgaggttcccatcgcaggggtattcagctggagtttgaagagcactgggatgctgctgagtggactgcagtccttaggggccatctaatgtttcaatctttagcaacttttgttgcatcttttcatgtctccctggggaggtgagccaggatcctatgattgtcacatttttctggaggtcttgtgccttttcaggaagtcggttcccttcgatgccagcttggggaccgccttaacatcgaggtggacgctgcacccccggtggacctgaccagggtgctggaggagatgcggtgtcagtacgaggccatggtggaggccaaccgcagggacgtggaggaatggttcaatatgcaggtgggcctctcacggtggggatggcctcctccatatccctaggaagggactctagccttctccttcccccaactgcagatggaggagcttaaccaacaggtggccacaagctctgagcagcttcagaactaccagtcagacatcattgacctgagacgcacggtcaacacgctggagatcgagctgcaggcccagcacagcctggtgagagctgctgggtgggcacccatccctccggatcctaggcggtactgagcataggtgcaggtccccaggaaagaggaagaggaggctcagatttcagccaccatggatgctcatcctgttgacttttcccggagggaggtttctcccgagatccagctcagagataaaaaagggatgtttcaaatcagacatgggttaggtgacactgtcaaactcaactccactaagaaggcttgttctgtgcttagcctgcccttccaaacctatggatctcaatatcacccatcctgatacccaggttcttttctggaccaactgaaccagagtctctggaggtgggacctgatcacagctattttttttttttttgagatggagtctcactctgttgcccaggctggagagcagtggcatgatctcagctccctgcaacctctgacccgctgggttcaagtgattttccagcctcagcctcccaagtagctggattacaggcgtgcaccactatgccctgctaatgtttgtatttttagtagagagggggtttcaccatgttggccaggctggtctcgaactcctgacctcaggtgatccacctgccttggcctcccagagtgctgggattacaggcatgagctactgtgaccggccagccatgggtattttttgagggctcccatgtggcgctaatgtgcagctaggtttgaaaacccctgttctaaatgatgccggcagggagggtacttgggaaatctcagtccaatcctgaaggcagacaaaggttgcggaagaaaggagggatttaggatcagatttacgaatagaaactgtggttccataatgtaccagctgtttacccttgaacaagtcatttgacctttctgggcttctgtttccaaagtgactggtgtagggagggcttcatttccagcatcaaatggagatttggctcttcttggttctttctgaagcaggccatggtaaacagctcccttcctcatggttatgtcttcctttgccttagagggactccctggaaaacacgctgacggagagtgaggcccgctacagctcccagctggcccagatgcagtgcatgatcaccaatgttgaggcccagctggctgagatccgggctgagctggagcggcagaaccaggagtaccaggtgctgctggacgtccgggcccggctggagggcgagatcaacacgtaccggagcctgctggagagtgaggactgcaagtatgcaggcccagctgaggcttagagagacgtgggcagggattctgggaggttataggaagcaactggatctacccttgagggaccatcagcttagaaccctgtcctgactatggagccattaagaagctggtatgctctgaaggaagtcaggcagtggtgttcatgctgccatcctgaaccaagcccctcggagaccattctatctcattccaagctggcaagctccttctaagtgcccaccatggggcaggtgctatggaggacaccaagatagaggaagacagggcatttgcctcctgtcatttccatatgtttagggagataggcagacaggtgactggaggtcatggcctgtccggagcttaggatgaaaagcagctttattaatagtacctacacatctgctcccactcttacccagcctcacctcatagctccattcctctcagaacggagattttggcatgtcagcaggacaataggtagccttgtgtaattgagccctggtggggagcaggacaggaaagatcagccggggcccatttatggagaacaacacgggtcatactgggaagggagggctttaatttataggtgagtggaaattgttttgaggaggaaatgagagaatttactgtgtgtcttctccactagatggtaaacatctagaatgcagagacattataatacaattttattccctgtacgtggcacatagtagatgctcagtaaatgtctctcaagctcaaagctgttcttcaggaagatggccctgatagcagcaggaagaactgagtagagggaggggaaccaggcagggaaactgtccaggaggccctggccacagcctaggtaagcaatagggagggcctgagttagggcagcagaggcatcagctctagacactgtgcaggtagaatcagcaggacttggtggctgtctgaatgcagggtacctctgggccatggacacccggtgggctgacgactgttgtagctgtttcttattccgcatttggcgttgcttctccatcattcagaatctataacttcagggcaagtgttgtgtcaaacatttgcaaggaccaggccattaacatgcatgaatgacgtgggtcatactgagatggtagaaaagcagaaagctcttgccttgtccaatccaggcaatggcatgccctcagggccactctactgtgtgagaagcaggtccaatattgctgatcttccaatagttccagggaagctgagaatctgggtttttaaaaatgttaaattctcctgattcttaagtattttcaaaaaattaaagaaaatatatagtgccaggcaaatggaacacatttcaggttgcacatgatcctcaggcctcccattggttctctgagctactgggtttccatccagcatccagtgtgttgttcctggttttgagtgcatgcctgtcagtctctgagtcatcctttttcctttcaccatgtattaattcttcattcatttattgttttgtctgatccaaatattcttattaggtgcctattctatgtgaggtatgcagggtgggcatgggtctgtggctgctggcctcactgcttggccggggagacagaccataatagaatgattactactcacgatgaaaggagatacatgtaccatgggggctttgtctcagagaggtgggggaggcttcaaggaggacgtgacagttgagttgagctcttaaacaagagaagaaatgtaggtgagtggagaggggaagagggttccagagatgtacggcacaggcacaagccctgtggcctgagcagtacagtccctgcaggagctggaagaaggtcagagtacctgcagctcccagagtaatggagctatcaggtgaggctggggcaagaggtgggagcaggatcatgcaggtcctattaaggaagcttcttttctttattttattttattttactttaacttctgggatacatgtgcagaacgtgcaggtttgttacataggtgtacatgtgccatggtggtggttttgttgcctatcaacccgtcatgtaggttttaagccctgcatgcattagatatttgttttaattttctccctccctgctcccctcacctctcgacaggccccagtatatgatgttccccggcctgtgtccatgtgttctcattgttcaactctcacttatgagtgagaacatgtagtgtttggttttctgttcctgtgttagtttgctgagaatgatggcttccagaggaagctgcttttcatcctgagctcaaatggaagccactgaaggttttagggaggggagggacataattggatttgtgactgtagaagattgctctggctactaagtggacagtggttaggaggggcccaagtggggttggggagatcagttaggaggccatgaggtgactcaggcaaagatggcggaggttgggaccagggaggctgggcagagaaagcacggaagatggggttgagaggcatccgaggggagaattggcaggacctgtggccgagtgggccttctctactaatcctgtttctctttagactttctcctgcaggctgccctgtaacccatgctccactccttcctgcaccacctgtgtgccctccccatgcgtgacccgcaccgtctgtgtgccacgcactgttggcatgccttgctcaccctgcccccagggccgctactgaagtccctttgtgccagtggatcctggagggcctggggctgggcagcctggtattcagtggccaccagaagagcagggccagccccggtcagcaaggaagaccctgagcaggaccgtggatcacctgcaacaagctctgatactccaggggatacttaagccctcatcacttcaaaactgcctcttttttccatgggtgaactgttctctttggtgatgtttctggttgtctgtgctgcctcaaagagcgtgtgttcttagttaactggcaaatagagctgtactcagtggccttgcaaacatgtctgtctctgtttgtcacttacgctgctgcatccacaagccaatcctactcaattgggcttaagaggaacgtgggcaaattctgtatttatttttatgctccttctgcttccatagaggcttgagaggtgttcactaaaagggcccgcatgccataaaccagttaaaactaatcaattactctagagccaagtaataaaagaataaagagaggagggagataattatgccagaaacctaggccaaattactgtaattgagaatcatatcataataaacccacccctaaatctcattacagctggtacaatgtgatcattcattctttcaaaatatcttcactgagcagctactgggtgcaggttctgcattagaggctggctaatccaaggaagagttcccagacacattgttagtaatgcttcatttaatccttgcaacaatccgtgaaaaatatgccattattgcatccattttgtaaatgaggaaactgaggcccagagaagttaagaaacttgcccaaagtcacacagcttgttagtggcagacccaggactgaaatcgaggcctttgggctctagagatgctcaaccgattcacattcacagtcctcactatttgcaaactacagctgggtgcagggggtattaaaaatgcaagtgatcaccaccattcaaacacttgtaattacaggaggagctaagacccatgtgcataagatgccactcctttcttcataagggccatataatagtaacagtaataatagtaataatggcaacggttactaattcttgagcacttataatgcactgagtactgtgtggagcatattacataaattaacttatgcagttttcatgaccaccttgtaaggtacacatagtatccattttagacatggaaatggaggcatagggtggtcaagttagttgttgaaggttacatgcaaggacaaagacttaaacccaagtctagcttcacagcagtgttattttaaccattctaactgccaaattcctacccagaaagagtaaacactagtcaagatttggagaaagtcttaagctgagaggatcctgaaaggcttcttgtagctggtggcatttgaaataggtcttggaggttgaatagaaggtctacagggcaccagataggcaagtaagtgtgtggggatcttcaggagagcagggggtcatgcttggaaggcctcaaggggtcttgctggctggagcagtgagttcctgtgagaggctgactggggatgaagctcaaatggtagaaaggcatcagagagtaggggggccttgggtaccccacaaaaagcctggattctggactctatcctgaaggcaatgggagggctgctgcaggatttgagcccaaagatgacatgacttgagtggcatcttagaaagtatcaccaagtaacacagacaggatagctaagaggaggggttaggctgtggaagaagctaacagggtctcaggcaagacaatgtcagggaccatggaaaaataaggaatcaatctaagagacactgtgatggacctgacttggcaatggattggccatggcaggtaaagaggagagagctggggacaggaatcttgaacacctttcagaacctcaccctccaaacacacagttcttccttaatgagctgagatgatgtttctattaagtatcctccctctggccttgccaagaaatgatgaaaaatggattggatcctgaagctgcctgcaggctgctctccagacatgatcctgcaggcatccctggcagacaaggtcattagcctgacagcagggacatgaacatactgcttagcaagctgtggttcctggttgatggatgggtaaaatttcaagaagctgaaatgccaagagagaggggttctggctaattgaattttctcataaccgcgtgcaaaccagcaatctttaatttcaaccccggtgcaaaacttttctggaatgtgctcagcttgataaacaacacgcagaacagaccaaagctt

SEQ ID NO: 2445 - DNA, 1296 bp, Homo sapiens; identical to SEQ ID NO: 2050

SEQ ID NO: 2446 - DNA, 3360 bp, Homo sapiens; identical to SEQ ID NO: 2052

SEQ ID NO: 2447 - DNA, 9534 bp, Homo sapiens
cagcgactcctctggctcccgagaagtggatccggtcgcggccactacgatgccgggagccgccggggtcctcctccttctgctgctctccggaggcctcgggggcgtacaggcgcagcggccgcagcagcagcggcagtcacaggcacatcagcaaagaggtttattccctgctgtcctgaatcttgcttctaatgctcttatcacgaccaatgcaacatgtggagaaaaaggacctgaaatgtactgcaaattggtagaacatgtccctgggcagcctgtgaggaacccgcagtgtcgaatctgcaatcaaaacagcagcaatccaaaccagagacacccgattacaaatgctattgatggaaagaacacttggtggcagagtcccagtattaagaatggaatcgaataccattatgtgacaattacactggatttacagcaggtgttccagatcgcgtatgtgattgtgaaggcagctaactccccccggcctggaaactggattttggaacgctctcttgatgatgttgaatacaagccctggcagtatcatgctgtgacagacacggagtgcctaacgctttacaatatttatccccgcactgggccaccgtcatatgccaaagatgatgaggtcatctgcacttcattttactccaagatacaccccttagaaaatggagagattcacatctctttaatcaatgggagaccaagtgccgatgatccttctccagaactgctagaatttacctccgctcgctatattcgcctgagatttcagaggatccgcacactgaatgctgacttgatgatgtttgctcacaaagacccaagagaaattgaccccattgtcaccagaagatattactactcggtcaaggatatttcagttggagggatgtgcatctgctatggtcatgccagggcttgtccacttgatccagcgacaaataaatctcgctgtgagtgtgagcataacacatgtggcgatagctgtgatcagtgctgtccaggattccatcagaaaccctggagagctggaacttttctaactaaaactgaatgtgaagcatgcaattgtcatggaaaagctgaagaatgctattatgatgaaaatgttgccagaagaaatctgagtttgaatatacgtggaaagtacattggagggggtgtctgcattaattgtacccaaaacactgctggtataaactgcgagacatgtacagatggcttcttcagacccaaaggggtatctccaaattatccaaggccatgccagccatgtcattgcgatccaattggttccttaaatgaagtctgtgtcaaggatgagaaacatgctcgacgaggtttggcacctggatcctgtcattgcaaaactggttttggaggtgtgagctgtgatcggtgtgccaggggctacactggctacccggactgcaaagcctgtaactgcagtgggttagggagcaaaaatgaggatccttgttttggcccctgtatctgcaaggaaaatgttgaaggaggagactgtagtcgttgcaaatccggcttcttcaatttgcaagaggataattggaaaggctgcgatgagtgtttctgttcaggggtttcaaacagatgtcagagttcctactggacctatggcaaaatacaagatatgagtggctggtatctgactgaccttcctggccgcattcgagtggctccccagcaggacgacttggactcacctcagcagatcagcatcagtaacgcggaggcccggcaagccctgccgcacagctactactggagcgcgccggctccctatctgggaaacaaactcccagcagtaggaggacagttgacatttaccatatcatatgaccttgaagaagaggaagaagatacagaacgtgttctccagcttatgattatcttagagggtaatgacttgagcatcagcacagcccaagatgaggtgtacctgcacccatctgaagaacatactaatgtattgttacttaaagaagaatcatttaccatacatggcacacattttccagtccgtagaaaggaatttatgacagtgcttgcgaatttgaagagagtcctcctacaaatcacatacagctttgggatggatgccatcttcaggttgagctctgttaaccttgaatccgctgtctcctatcctactgatggaagcattgcagcagctgtagaagtgtgtcagtgcccaccagggtatactggctcctcttgtgaatcttgttggcctaggcacaggcgagttaacggcactatttttggtggcatctgtgagccatgtcagtgctttggtcatgcggagtcctgtgatgacgtcactggagaatgcctgaactgtaaggatcacacaggtggcccatattgtgataaatgtcttcctggtttctatggcgagcctactaaaggaacctctgaagactgtcaaccctgtgcctgtccactcaatatcccatccaataactttagcccaacgtgccatttagaccggagtcttggattgatctgtgatggatgccctgtcgggtacacaggaccacgctgtgagaggtgtgcagaaggctattttggacaaccctctgtacctggaggatcatgtcagccatgccaatgcaatgacaaccttgacttctccatccctggcagctgtgacagcttgtctggctcctgtctgatatgtaaaccaggtacaacaggccggtactgtgagctctgtgctgatggatattttggagatgcagttgatgcgaagaactgtcagccctgtcgctgtaatgccggtggctctttctctgaggtttgccacagtcaaactggacagtgtgagtgcagagccaacgttcagggtcagagatgtgacaaatgcaaggctgggacctttggcctacaatcagcaaggggctgtgttccctgcaactgcaattcttttgggtctaagtcattcgactgtgaagagagtggacaatgttggtgccaacctggagtcacagggaagaaatgtgaccgctgtgcccacggctatttcaacttccaagaaggaggctgcacagcttgtgaatgttctcatctgggtaataattgtgacccaaagactgggcgatgcatttgcccacccaataccattggagagaaatgttctaaatgtgcacccaatacctggggccacagcattaccactggttgtaaggcttgtaactgcagcacagtgggatccttggatttccaatgcaatgtaaatacaggccaatgcaactgtcatccaaaattctctggtgcaaaatgtacagagtgcagtcgaggtcactggaactaccctcgctgcaatctctgtgactgcttcctccctgggacagatgccacaacctgtgattcagagactaaaaaatgctcctgtagtgatcaaactgggcagtgcacttgtaaggtgaatgtggaaggcatccactgtgacagatgccggcctggcaaattcggactcgatgccaagaatccacttggctgcagcagctgctattgcttcggcactactacccagtgctctgaagcaaaaggactgatccggacgtgggtgactctgaaggctgagcagaccattctacccctggtagatgaggctctgcagcacacgaccaccaagggcattgtttttcaacatccagagattgttgcccacatggacctgatgagagaagatctccatttggaacctttttattggaaacttccagaacaatttgaaggaaagaagttgatggcctatgggggcaaactcaagtatgcaatctatttcgaggctcgggaagaaacaggtttctctacatataatcctcaagtgatcattcgaggtgggacacctactcatgctagaattatcgtcaggcatatggctgctcctctgattggccaattgacaaggcatgaaattgaaatgacagagaaagaatggaaatattatggggatgatcctcgagtccatagaactgtgacccgagaagacttcttggatatactatatgatattcattacattcttatcaaagctacttatggaaatttcatgcgacaaagcaggatttctgaaatctcaatggaggtagctgaacaaggacgtggaacaacaatgactcctccagctgacttgattgaaaaatgtgattgtcccctgggctattctggcctgtcctgtgaggcatgcttgccgggattttatcgactgcgttctcaaccaggtggccgcacccctggaccaaccctgggcacctgtgttccatgtcaatgtaatggacacagcagcctgtgtgaccctgaaacatcgatatgccagaattgtcaacatcacactgctggtgacttctgtgaacgatgtgctcttggatactatggaattgtcaagggattgccaaatgactgtcagcaatgtgcctgccctctgatttcttccagtaacaatttcagcccctcttgtgtcgcagaaggacttgacgactaccgctgcacggcttgtccacggggatatgaaggccagtactgtgaaaggtgtgcccctggctatactggcagtccaggcaaccctggaggctcctgccaagaatgtgagtgtgatccctatggctcactgcctgtgccctgtgaccctgtcacaggattctgcacgtgccgacctggagccacgggaaggaagtgtgacggctgcaagcactggcatgcacgcgagggctgggagtgtgttttttgtggagatgagtgcactggccttcttctcggtgacttggctcgcctggagcagatggtcatgagcatcaacctcactggtccgctgcctgcgccatataaaatgctgtatggtcttgaaaatatgactcaggagctaaagcacttgctgtcacctcagcgggccccagagaggcttattcagctggcagagggcaatctgaatacactcgtgaccgaaatgaacgagctgctgaccagggctaccaaagtgacagcagatggcgagcagaccggacaggatgctgagaggaccaacacaagagcaaagtccctgggagaattcattaaggagcttgcccgggatgcagaagctgtaaatgaaaaagctataaaactaaatgaaactctaggaactcgagacgaggcctttgagagaaatttggaagggcttcagaaagagattgaccagatgattaaagaactgaggaggaaaaatctagagacacaaaaggaaattgctgaagatgagttggtagctgcagaagcccttctgaaaaaagtgaagaagctgtttggagagtcccggggggaaaatgaagaaatggagaaggatctccgggaaaaactggctgactacaaaaacaaagttgatgatgcttgggaccttttgagagaagccacagataaaatcagagaagctaatcgcctatttgcagtaaatcagaaaaacatgactgcattggagaaaaagaaggaggctgttgagagcggcaaacgacaaattgagaacactttaaaagaaggcaatgacatactcgatgaagccaaccgtcttgcagatgaaatcaactccatcatagactatgttgaagacatccaaactaaattgccacctatgtctgaggagcttaatgataaaatagatgacctctcccaagaaataaaggacaggaagcttgctgagaaggtgtcccaggctgagagccacgcagctcagttgaatgactcatctgctgtccttgatggaatccttgatgaggctaaaaacatctccttcaatgccactgcagccttcaaagcttacagcaatattaaggactatattgatgaagctgagaaagttgccaaagaagccaaagatcttgcacatgaagctacaaaactggcaacaggtcctcggggtttattaaaggaagatgccaaaggctgtcttcagaaaagcttcaggattcttaacgaagccaagaagttagcaaatgatgtaaaagaaaatgaagaccatctaaatggcttaaaaaccaggatagaaaatgctgatgctagaaatggggatctcttgagaactttgaatgacactttgggaaagttatcagctattccaaatgatacagctgctaaactgcaagctgttaaggacaaagccagacaagccaacgacacagctaaagatgtactggcacagattacagagctccaccagaacctcgatggcctgaagaagaattacaataaactagcagacagcgtcgccaaaacgaatgctgtggttaaagatccttccaagaacaaaatcattgccgatgcagatgccactgtcaaaaatttagaacaggaagctgaccggctaatagataaactcaaacccatcaaggaacttgaggataacctaaagaaaaacatctctgagataaaggaattgataaaccaagctcggaaacaagccaattctatcaaagtatctgtgtcttcaggaggtgactgcattcgaacatacaaaccagaaatcaagaaaggaagttacaataatattgttgtcaacgtaaagacagctgttgctgataacctcctcttttatcttggaagtgccaaatttattgactttctggctatagaaatgcgtaaaggcaaagtcagcttcctctgggatgttggatctggagttggacgtgtagagtacccagatttgactattgatgactcatattggtaccgtatcgtagcatcaagaactgggagaaatggaactatttctgtgagagccctggatggacccaaagccagcattgtgcccagcacacaccattcgacgtctcctccagggtacacgattctagatgtggatgcaaatgcaatgctgtttgttggtggcctgactgggaaattaaagaaggctgatgctgtacgtgtgattacattcactggctgcatgggagaaacatactttgacaacaaacctataggtttgtggaatttccgagaaaaagaaggtgactgcaaaggatgcactgtcagtcctcaggtggaagatagtgaggggactattcaatttgatggagaaggttatgcattggtcagccgtcccattcgctggtaccccaacatctccactgtcatgttcaagttcagaacattttcttcgagtgctcttctgatgtatcttgccacacgagacctgagagatttcatgagtgtggagctcactgatgggcacataaaagtcagttacgatctgggctcaggaatggcttccgttgtcagcaatcaaaaccataatgatgggaaatggaaatcattcactctgtcaagaattcaaaaacaagccaatatatcaattgtagatatagatactaatcaggaggagaatatagcaacttcgtcttctggaaacaactttggtcttgacttgaaagcagatgacaaaatatattttggtggcctgccaacgctgagaaacttgagtatgaaagcaaggccagaagtaaatctgaagaaatattccggctgcctcaaagatattgaaatttcaagaactccgtacaatatactcagtagtcccgattatgttggtgttaccaaaggatgttccctggagaatgtttacacagttagctttcctaagcctggttttgtggagctctcccctgtgccaattgatgtaggaacagaaatcaacctgtcattcagcaccaagaatgagtccggcatcattcttttgggaagtggagggacaccagcaccacctaggagaaaacgaaggcagactggacaggcctattatgtaatactcctcaacaggggccgtctggaagtgcatctctccacaggggcacgaacaatgaggaaaattgtcatcagaccagagccgaatctgtttcatgatggaagagaacattccgttcatgtagagcgaactagaggcatctttacagttcaagtggatgaaaacagaagatacatgcaaaacctgacagttgaacagcctatcgaagttaaaaagcttttcgttgggggtgctccacctgaatttcaaccttccccactcagaaatattcctccttttgaaggctgcatatggaatcttgttattaactctgtccccatggactttgcaaggcctgtgtccttcaaaaatgctgacattggtcgctgtgcccatcagaaactccgtgaagatgaagatggagcagctccagctgaaatagttatccagcctgagccagttcccaccccagcctttcctacgcccaccccagttctgacacatggtccttgtgctgcagaatcagaaccagctcttttgatagggagcaagcagttcgggctttcaagaaacagtcacattgcaattgcatttgatgacaccaaagttaaaaaccgtctcacaattgagttggaagtaagaaccgaagctgaatccggcttgcttttttacatggctgcgatcaatcatgctgattttgcaacagttcagctgagaaatggattgccctacttcagctatgacttggggagtggggacacccacaccatgatccccaccaaaatcaatgatggccagtggcacaagattaagataatgagaagtaagcaagaaggaattctttatgtagatggggcttccaacagaaccatcagtcccaaaaaagccgacatcctggatgtcgtgggaatgctgtatgttggtgggttacccatcaactacactacccgaagaattggtccagtgacctatagcattgatggctgcgtcaggaatctccacatggcagaggcccctgccgatctggaacaacccacctccagcttccatgttgggacatgttttgcaaatgctcagaggggaacatattttgacggaaccggttttgccaaagcagttggtggattcaaagtgggattggaccttcttgtagaatttgaattcgcgacaactacaacgactggagttcttctggggatcagtagtcaaaaaatggatggaatgggtattgaaatgattgatgaaaagttgatgtttcatgtggacaatggtgcgggcagattcactgctgtctatgatgctggggttccagggcatttgtgtgatggacaatggcataaagtcactgccaacaagatcaaacaccgcattgagctcacagtcgatgggaaccaggtggaagcccaaagcccaaacccagcatctacatcagctgacacaaatgaccctgtgtttgttggaggcttcccagatgacctcaagcagtttggcctaacaaccagtattccgttccgaggttgcatcagatccctgaagctcaccaaaggcacagcaagccactggaggttaattttgccaaggccctggaactgaggggcgttcaacctgtatcatgcccagccaactaataaaaataagtgtaaccccaggaagagtctgtcaaaacaagtatatcaagtaaaacaaacaaatatattttacctatatatgttaattaaactaatttgtgcatgtacatagaattc

SEQ ID NO: 2448 - DNA, 806 bp, Homo sapiens; identical to SEQ ID NO: 436

SEQ ID NO: 2449 - DNA, 3388 bp, Homo sapiens; identical to SEQ ID NO: 85

SEQ ID NO: 2450 - DNA, 5084 bp, Homo sapiens
gatcccatcgcagctaccgcgatgagaggcgctcgcggcgcctgggattttctctgcgttctgctcctactgcttcgcgtccagacaggctcttctcaaccatctgtgagtccaggggaaccgtctccaccatccatccatccaggaaaatcagacttaatagtccgcgtgggcgacgagattaggctgttatgcactgatccgggctttgtcaaatggacttttgagatcctggatgaaacgaatgagaataagcagaatgaatggatcacggaaaaggcagaagccaccaacaccggcaaatacacgtgcaccaacaaacacggcttaagcaattccatttatgtgtttgttagagatcctgccaagcttttccttgttgaccgctccttgtatgggaaagaagacaacgacacgctggtccgctgtcctctcacagacccagaagtgaccaattattccctcaaggggtgccaggggaagcctcttcccaaggacttgaggtttattcctgaccccaaggcgggcatcatgatcaaaagtgtgaaacgcgcctaccatcggctctgtctgcattgttctgtggaccaggagggcaagtcagtgctgtcggaaaaattcatcctgaaagtgaggccagccttcaaagctgtgcctgttgtgtctgtgtccaaagcaagctatcttcttagggaaggggaagaattcacagtgacgtgcacaataaaagatgtgtctagttctgtgtactcaacgtggaaaagagaaaacagtcagactaaactacaggagaaatataatagctggcatcacggtgacttcaattatgaacgtcaggcaacgttgactatcagttcagcgagagttaatgattctggagtgttcatgtgttatgccaataatacttttggatcagcaaatgtcacaacaaccttggaagtagtagataaaggattcattaatatcttccccatgataaacactacagtatttgtaaacgatggagaaaatgtagatttgattgttgaatatgaagcattccccaaacctgaacaccagcagtggatctatatgaacagaaccttcactgataaatgggaagattatcccaagtctgagaatgaaagtaatatcagatacgtaagtgaacttcatctaacgagattaaaaggcaccgaaggaggcacttacacattcctagtgtccaattctgacgtcaatgctgccatagcatttaatgtttatgtgaatacaaaaccagaaatcctgacttacgacaggctcgtgaatggcatgctccaatgtgtggcagcaggattcccagagcccacaatagattggtatttttgtccaggaactgagcagagatgctctgcttctgtactgccagtggatgtgcagacactaaactcatctgggccaccgtttggaaagctagtggttcagagttctatagattctagtgcattcaagcacaatggcacggttgaatgtaaggcttacaacgatgtgggcaagacttctgcctattttaactttgcatttaaaggtaacaacaaagagcaaatccatccccacaccctgttcactcctttgctgattggtttcgtaatcgtagctggcatgatgtgcattattgtgatgattctgacctacaaatatttacagaaacccatgtatgaagtacagtggaaggttgttgaggagataaatggaaacaattatgtttacatagacccaacacaacttccttatgatcacaaatgggagtttcccagaaacaggctgagttttgggaaaaccctgggtgctggagctttcgggaaggttgttgaggcaactgcttatggcttaattaagtcagatgcggccatgactgtcgctgtaaagatgctcaagccgagtgcccatttgacagaacgggaagccctcatgtctgaactcaaagtcctgagttaccttggtaatcacatgaatattgtgaatctacttggagcctgcaccattggagggcccaccctggtcattacagaatattgttgctatggtgatcttttgaattttttgagaagaaaacgtgattcatttatttgttcaaagcaggaagatcatgcagaagctgcactttataagaatcttctgcattcaaaggagtcttcctgcagcgatagtactaatgagtacatggacatgaaacctggagtttcttatgttgtcccaaccaaggccgacaaaaggagatctgtgagaataggctcatacatagaaagagatgtgactcccgccatcatggaggatgacgagttggccctagacttagaagacttgctgagcttttcttaccaggtggcaaagggcatggctttcctcgcctccaagaattgtattcacagagacttggcagccagaaatatcctccttactcatggtcggatcacaaagatttgtgattttggtctagccagagacatcaagaatgattctaattatgtggttaaaggaaacgctcgactacctgtgaagtggatggcacctgaaagcattttcaactgtgtatacacgtttgaaagtgacgtctggtcctatgggatttttctttgggagctgttctctttaggaagcagcccctatcctggaatgccggtcgattctaagttctacaagatgatcaaggaaggcttccggatgctcagccctgaacacgcacctgctgaaatgtatgacataatgaagacttgctgggatgcagatcccctaaaaagaccaacattcaagcaaattgttcagctaattgagaagcagatttcagagagcaccaatcatatttactccaacttagcaaactgcagccccaaccgacagaagcccgtggtagaccattctgtgcggatcaattctgtcggcagcaccgcttcctcctcccagcctctgcttgtgcacgacgatgtctgagcagaatcagtgtttgggtcacccctccaggaatgatctcttcttttggcttccatgatggttattttcttttctttcaacttgcatccaactccaggatagtgggcaccccactgcaatcctgtctttctgagcacactttagtggccgatgatttttgtcatcagccaccatcctattgcaaaggttccaactgtatatattcccaatagcaacgtagcttctaccatgaacagaaaacattctgatttggaaaaagagagggaggtatggactgggggccagagtcctttccaaggcttctccaattctgcccaaaaatatggttgatagtttacctgaataaatggtagtaatcacagttggccttcagaaccatccatagtagtatgatgatacaagattagaagctgaaaacctaagtcctttatgtggaaaacagaacatcattagaacaaaggacagagtatgaacacctgggcttaagaaatctagtatttcatgctgggaatgagacataggccatgaaaaaaatgatccccaagtgtgaacaaaagatgctcttctgtggaccactgcatgagcttttatactaccgacctggtttttaaatagagtttgctattagagcattgaattggagagaaggcctccctagccagcacttgtatatacgcatctataaattgtccgtgttcatacatttgaggggaaaacaccataaggtttcgtttctgtatacaaccctggcattatgtccactgtgtatagaagtagattaagagccatataagtttgaaggaaacagttaataccattttttaaggaaacaatataaccacaaagcacagtttgaacaaaatctcctcttttagctgatgaacttattctgtagattctgtggaacaagcctatcagcttcagaatggcattgtactcaatggatttgatgctgtttgacaaagttactgattcactgcatggctcccacaggagtgggaaaacactgccatcttagtttggattcttatgtagcaggaaataaagtataggtttagcctccttcgcaggcatgtcctggacaccgggccagtatctatatatgtgtatgtacgtttgtatgtgtgtagacaaatatttggaggggtatttttgccctgagtccaagagggtcctttagtacctgaaaagtaacttggctttcattattagtactgctcttgtttcttttcacatagctgtctagagtagcttaccagaagcttccatagtggtgcagaggaagtggaaggcatcagtccctatgtatttgcagttcacctgcacttaaggcactctgttatttagactcatcttactgtacctgttccttagaccttccataatgctactgtctcactgaaacatttaaattttaccctttagactgtagcctggatattattcttgtagtttacctctttaaaaacaaaacaaaacaaaacaaaaaactccccttcctcactgcccaatataaaaggcaaatgtgtacatggcagagtttgtgtgttgtcttgaaagattcaggtatgttgcctttatggtttcccccttctacatttcttagactacatttagagaactgtggccgttatctggaagtaaccatttgcactggagttctatgctctcgcacctttccaaagttaacagattttggggttgtgttgtcacccaagagattgttgtttgccatactttgtctgaaaaattcctttgtgtttctattgacttcaatgatagtaagaaaagtggttgttagttatagatgtctaggtacttcaggggcacttcattgagagttttgtcttgccatactttgtctgaaaaattcctttgtgtttctattgacttcaatgatagtaagaaaagtggttgttagttatagatgtctaggtacttcaggggcacttcattgagagttttgtcaatgtcttttgaatattcccaagcccatgagtccttgaaaatattttttatatatacagtaactttatgtgtaaatacataagcggcgtaagtttaaaggatgttggtgttccacgtgttttattcctgtatgttgtccaattgttgacagttctgaagaattc

SEQ ID NO: 2451 - DNA, 655 bp, Homo sapiens; identical to SEQ ID NO: 139

SEQ ID NO: 2452 - DNA, 2130 bp, Homo sapiens; identical to SEQ ID NO: 2059

SEQ ID NO: 2453 - DNA, 2298 bp, Homo sapiens
gggaggtgtcgcagcgccatcaagaaggactgaggctccgcaatcggaggccgccgatttcgacccttcgcctcggcccggcccaatccaggccccggcccgccgcccccggccgcccccgcgtgccctctctcctccctctttgtgcgtctcgcgccgccgccgcccgccgcgtgagaggacgggctccgcgcgctccggcagccgattcgggtcccctccccccgggaggcttgcgaaggagaagccgccgcagaggaaaagcaggtgccggtgcctgtccccggggggcccatggcgaccggagcgaacgccacgccgttggacttcccaagtaagaagcggaagaggagccgctggaaccaagacacaatggaacagaagacagtgattccaggaatgcctacagttattccccctggacttactcgagaacaagaaagagcttatatagtgcaactgcagatagaagacctgactcgtaaactgcgcacaggagacctgggcatcccccctaaccctgaggacaggtccccttcccctgagcccatctacaatagcgaggggaagcggcttaacacccgagagttccgcacccgcaaaaagctggaagaggagcggcacaacctcatcacagagatggttgcactcaatccggatttcaagccacctgcagattacaaacctccagcaacacgtgtgagtgataaagtcatgattccacaagatgagtacccagaaatcaactttgtggggctgctcatcgggcccagagggaacaccctgaagaacatagagaaggagtgcaatgccaagattatgatccgggggaaagggtctgtgaaagaagggaaggttgggcgcaaagatggccagatgttgccaggagaagatgagccacttcatgccctggttactgccaatacaatggagaacgtcaaaaaggcagtggaacagataagaaacatcctgaagcagggtatcgagactccagaggaccagaatgatctacggaagatgcagcttcgggagttggctcgcttaaatgggacccttcgggaagacgataacaggatcttaagaccctggcagagctcagagacccgcagcattaccaacaccacagtgtgtaccaagtgtggaggggctggccacattgcttcagactgtaaattccaaaggcctggtgatcctcagtcagctcaggataaagcacggatggataaagaatatttgtccctcatggctgaactgggtgaagcacctgtcccagcatctgtgggctccacctctgggcctgccaccacacccctggccagcgcacctcgtcctgctgctcccgccaacaacccacctccaccgtctctcatgtctaccacccagagccgcccaccctggatgaattctggcccttcagagagtcggccctaccacggcatgcatggaggtggtcctggtgggcccggaggtggcccccacagcttcccacacccattacccagcctgacaggtgggcatggtggacatcccatgcagcacaaccccaatggacccccacccccttggatgcagccaccaccaccaccgatgaaccagggcccccaccctcctgggcaccatggccctcctccaatggatcagtacctgggaagtacgcctgtgggctctggggtctatcgcctgcatcaaggaaaaggtatgatgccgccaccacctatgggcatgatgccgccgccgccgccgcctcccagtgggcagcccccaccccctccctctggtcctcttcccccatggcaacaacagcagcagcagcctccgccaccccctccgcccagcagcagtatggcttccagtacccccttgccatggcagcaaaatacgacgactaccaccacgagcgctggcacagggtccatcccgccatggcaacagcagcaggcggctgccgcagcttctccaggagcccctcagatgcaaggcaaccccactatggtgcccctgccccccggggtccagccgcctctgccgcctggggcccctccccctccgccgcctccaccgcctggttccgccggcatgatgatccctccccgcggcggcgatggcccgagccatgagagtgaggactttccgcgcccattggtgacccttccaggcagacagcctcagcaacgcccctggtggacaggatggttcggcaaagcagcctgagttatttttgtggacggaatcggaacacgctggctccatatcgtgaaatttttattaatttttttctttttcctttgttacttcttt

SEQ ID NO: 2454 - DNA, 1340 bp, Homo sapiens; identical to SEQ ID NO: 2061

SEQ ID NO: 2455 - DNA, 3128 bp, Homo sapiens; identical to SEQ ID NO: 2063

SEQ ID NO: 2456 - DNA, 1743 bp, Homo sapiens
ctgaaggcggaaccacgacgggcagagagcacggagccgggaagcccctgggcgcccgtcggagggctatggagcagcggccgcggggctgcgcggcggtggcggcggcgctcctcctggtgctgctgggggcccgggcccagggcggcactcgtagccccaggtgtgactgtgccggtgacttccacaagaagattggtctgttttgttgcagaggctgcccagcggggcactacctgaaggccccttgcacggagccctgcggcaactccacctgccttgtgtgtccccaagacaccttcttggcctgggagaaccaccataattctgaatgtgcccgctgccaggcctgtgatgagcaggcctcccaggtggcgctggagaactgttcagcagtggccgacacccgctgtggctgtaagccaggctggtttgtggagtgccaggtcagccaatgtgtcagcagttcacccttctactgccaaccatgcctagactgcggggccctgcaccgccacacacggctactctgttcccgcagagatactgactgtgggacctgcctgcctggcttctatgaacatggcgatggctgcgtgtcctgccccacgagcaccctggggagctgtccagagcgctgtgccgctgtctgtggctggaggcagagtaggtggtgtgctgggaatgcgcgtgggagaactgggatggaccgaggggaggcgggtgaggaggggggcaaccacccaacacccaccagctgctttcagtgttctgggtccaggtgctcctggctggccttgtggtccccctcctgcttggggccaccctgacctacacataccgccactgctggcctcacaagcccctggttactgcagatgaagctgggatggaggctctgaccccaccaccggccacccatctgtcacccttggacagcgcccacacccttctagcacctcctgacagcagtgagaagatctgcaccgtccagttggtgggtaacagctggacccctggctaccccgagacccaggaggcgctctgcccgcaggtgacatggtcctgggaccagttgcccagcagagctcttggccccgctcgtgcgcccacactctcgccagagtccccagccggctcgccagccatgatgctgcagccgggcccgcagctctacgacgtgatggacgcggtcccagcgcggcgctggaaggagttcgtgcgcacgctggggctgcgcgaggcagagatcgaagccgtggaggtggagatcggtctcttccgagaccagcagtacgagatgctcaagcactggcgccagcagcagcccgcgggcctcggagccgtttacgcggccctggagcgcatggggctggacggctgcgtggaagacttgcgcagccgcctgcagcgtggcccgtgacacgcagcccacttgccacctaggcgctctggtggcccttgcagaagccctaagtacggttacttatgcgtgtagacattttatgtcacttattaagccgctggcacggccctgcgtaggcacaccagccggccccacccctgctcgcccctatcgctccagccaaggcgaagaagcacgaacgaatgtcgagagggggtgaagacatttctcaacttctcggccggagtttggctgagatcgcggtattaaatctgtgaaagaaataaagaaaaaaacaaaacaaaacaaaaaaaaaaaaaaaaaaaaaaaaaaaaaaa

SEQ ID NO: 2457 - DNA, 3833 bp, Homo sapiens
gtgaattccgcaccatctctctcctgcctgtggggtttctgtcaactagtcgtggagggaaggagactctttaaagaataacatcttattgtggccatgccagaacccactaagaaagaggaaaatgaagtgccagccccagccccacccccggaagaaccaagtaaagagaaggaggccggaactacaccagcaaaagactggacccttgtcgaaactcctcctggggaggaacaagccaagcagaatgccaactcccagctgtccatcttgttcattgaaaaacctcaaggaggaacagtgaaagttggtgaagatatcaccttcatagccaaagtcaaggctgaagatctttctgagaaacccactatcaatggttcaaggaaatggatggacctggccagcaaagccgggaagcaccttcagctgaaggaaacctttgagaggcacagtcgggtgtacacatttgagatgcagatcatcaaggccaaagataactttgcaggaaattacagatgcgaggtcacctataaggataagtttgacagctgttcatttgatcttgaagtgcacgaatctactgggactactccaaacattgacatcagatctgctttcaagagaagtggagaaggtcaagaggatgcaggagaacttgactttagtggtctcctgaaacgtagggaggtgaagcagcaggaggaagaaccccaggtggacgtatgggagttgctgaagaacaccaaacccagtgagtacgagaagatcgccttccagtatgaatcaccgacctgcagcggcatgctgaagcgactcaagcgcagcatcagagaggagaagaagagcgccgcttttgcaaaaattcttgatcctgtatatcaggttgacaaaggaggcagagtgaggtttgttgtggagctggcagatccaaagttggaggtgaaatggaataaaaatggtcaagaacttcgacccagtaccaaatacatctttgaagacacaagatgccagagcatcctgaatatcgataactgtcagatgacagatgattcagagtattatgtgacagccggtgatgagaaatgttctactgagctcttagtaagagagcctccaattatggtgaccaaacagctggaagatacaactgattattgtggggagagagtggaattagaatgtgaggtgtctgaagatgatgcccaagtaaaatggtttaagaatggtgaagagattatcctggtccaaacaagataccgaattagagttgagggtaaaaaacacatcttgatcatagagggagcaacaaaggctgatgctgcagattattcagtaatgacaacaggaggacaatcatctgctaaacttagtgttgacttgaaacctctgaagattttgacacctctgactgatcagactgtaaatcttggaaaagaaatctgcctgaagtgtgaaatctctgaaaacataccaggaaaatggactaaaaatggcctacctgttcaggagagtgaccgtctaaaggtggttcacaagggaaggatccacaagttagtgatagatcatgccctcactgaagatgaaggtgattatgtatttgcacctgatgcctacaatgttactctgcctgccaaagttcatgttattgatcctcctaagatcatcctggatggtcttgatgctgacaacacagtgacagtgattgcaggaaacaagcttcgtcttgagatccccatcagcggagaaccacctcctaaagccatgtggagccggggagataaggctattatggaaggcagtggccggataagaacagaatcttaccctgatagcagcactctggtcattgatatagctgaaagagatgactctggtgtttaccacatcaatctgaaaaacgaagctggagaggcacatgcaagcatcaaggttaaagttgtggacttccctgatcctccagtggcaccgactgtgacagaggtgggagatgactggtgtatcatgaactgggagcctcctgcctacgacggaggctctccaatcctaggatattttattgagaggaagaagaaacaaagctccaggtggatgaggctgaattttgatctctgcaaagaaacaacttttgagcccaagaagatgattgaaggtgtggcctatgaggtccgcatctttgcagtcaatgccattggcatctccaagcccagtatgccctccaggccttttgttcctttggccgtaacaagccctcctactcttctgactgtggactctgtcactgacacgactgtcacgatgaggtggcgccccccagaccacattggtgcagcaggtttagatggctatgtgctagagtattgctttgaaggaagtacatcagcaaaacagtctgatgaaaatggggaggctgcctatgatctgccagctgaggactggatagttgcaaacaaagatctgattgacaagacgaagttcaccatcacaggtctgccaacagatgcaaagatctttgtgcgtgtgaaggctgttaatgcagctggtgccagcgagcccaagtactattctcagcccattctcgtgaaggaaatcatagaacctccaaagatacacagtcccaagcacctgaagcaaacatatatccgccgagtaggagaccgtgtcattcttgttatccctttccagggaaaaccaagaccagaattaacttggaagaaggatggtgcagaaattgataagaatcaaataaacattcgcaactctgagactgatacaatcatatttattagaaaagcagagaggagccactctgggaaatatgatctgcaagtcaaagtggacaaattcgtggagaccgcatcaattgacatcagaatcattgaccgtccaggtccaccccaaattgtgaagattgaggatgtctgggggagaaatgtcgctctcacatggactccaccaaaggatgatggaaatgctgctatcacaggctataccattcagaaggctgacaagaagagcatggaatggttacgtgtcattgagcatatcatcgaaccagtgccacatactgaattggtcatagggaatgaatattacttccgggtcttttctgaaaacatgtgtggcctcagtgaggatgccaccatgactaaagagagtgcagtgatcgccagggatggtaaaatctacaaaaatccagtgtatgaagactttgatttctcagaggcacccatgtttactcagcctttggttaaccgcctatgccatagcggttacatggccaccctaaactgcagtgtgagaggaaatcctaagcctaaaataacctggatgaaaaacaaagttgctattgtggatgatccaagatacaggatgttcagcaacctgggagtctgtaccctggaaattggcaagcccagcccttatgatggaggcacttactgctgcaaagcagtcaatgaccttgggacagtggagattgaatgcaaactggaggtgaaagtcattgcacaataaggatttttggaatgtataatatcatctaaggtgggctctccttctgcagactcctcttgcaaggcgtacctccaaacataattgattgctatctgcgagacttacactcaagcaatcctgaggaatactgagggagggcctggctactgtctctctgcactctgctgctttgaaatctggttgaaatgagaaaaagcattttctgttttcccaccaggcccccaagtgtggtctttttctttcctcctaatgttgaagagaaaaaaaaaaaaaaaaaagtttgcccagattgcttaattaaaaattgcaaacaaaatctc

SEQ ID NO: 2458 - DNA, 1443 bp, Homo sapiens; identical to SEQ ID NO: 2066

SEQ ID NO: 2459 - DNA, 1309 bp, Homo sapiens; identical to SEQ ID NO: 2067
  misc_feature (1)..(1309): n=a,t,g or c

SEQ ID NO: 2460 - DNA, 432 bp, Homo sapiens
  misc_feature (1)..(432): n=a,t,g or c
aacacactgaatattccgtgtgatctagaacagtgtggcagctttcacagcacaggaccgttcatcgggggcctaaacgtttccctcggctctgtcaccaactcacttctctcggcttcgttgtctgtaaattggatgaaaagagctctaatgcctttcaggctcttagaagccatagatttggacaagcccagcaagatgggtgtccttccaggcctcttcccctttcctccatctctggcaacagttcttggggtttggcaattgtttggantttttttccttcngcacnttgtgtgtangtgtgnttgtgtnaagaaaaacacgactcngtccaggtagaaatggtnaaggaagggggaagagaattacatttccagggtcagaaacttggcaacagttttcccagagtgnctcagncacaccaccgta

SEQ ID NO: 2461 - DNA, 571 bp, Homo sapiens
  misc_feature (1)..(571): n=a,t,g or c
tntgctgaggcgtgagaatggcgtcccgnggccggcgtccggagcatggcggacccccagagctgttttatgacgagacagaagcccggaaatacgttcgcaactcacggatgattgatatccagaccaggatggctgggcgagcattggagcttctttatctgccagagaataagccctgttacctgctggatattggctgtggcactgggctgagtggaagttatctgtcagatgaagggcactattgggtgggcctggatatcagccctgccatgctggatgaggctgtggaccgagagatagagggagacctgctgctgggggatatgggccagggcatcccattcaagccaggcacatttgatggttgcatcagcatttctgctgtgcagtggctctgtaatgctaacaagaagtctgaaaacccctgccaagcgcctgtactgcttttttgcttctcttttttctgttctcgtccggggatccgagctgtctgcagctgtaccctgagaactcagagcagttggaactgatcacaacccaggccanaaaggcaggttctcccggt

SEQ ID NO: 2462 - DNA, 585 bp, Homo sapiens
  misc_feature (1)..(585): n=a,t,g or c
ctgatctctccagaatgatcagcccagaggaatgctgagaaatcacctggaggagggagcagaaagagaaggtttttaaggaggggcttctgaatacttgggagatacggaacggaccaaggaccacactccagggtgcattcgttgctccctggggcaccacttctggattacagtgtgccaggtcctttggaggccctaccccttccccattcattgccaccagtgagaaatgggggtgcccctgtgtaaagaaacctaccaaaggtttacatttgcaccttagcctcaatagctacgaaccctagagaagcagctagctggagctcatgtgcaactcctgattctcaggagaaagatggattttaacccaaaattatgagtgagctgttaactctaaaatgtacttgggagataggccaagcgagaggtcatgggccaactaagtgttatccagtagaagagacagtacactgcttttcttttaagtgtttgccttttcctttgctatatgttttgctattccttgtggcttagaatgtaaattgatngttaaaagttttggtctgaataatattatctntg

SEQ ID NO: 2463 - DNA, 516 bp, Homo sapiens
  misc_feature (1)..(516): n=a,t,g or c
aaaaacctcacatgatggggaaacaaaaaaaagcaacaaagaagccacaccacacctccctggccaggcacagcgctgcccagagcggcacaccgggnacagcaccacacatgttccagaatctgaaatctcaaaagccattcactaacttaaaacaactcaacagagccatgaaacaaatgccctgatgaaaataagacaactgcatgttacatcatcggcactttatacattactgttaccatgaaaaagaaatgaacagcagcaccgtctgataccatcagctgggcagatgcattaaggttaaatctaagtgtcaagaaaaccctatttctttataatatttatgcagctgttaagggtaacatggtggcagcttcacaacaagaaccgtgatcatgcatgcagtcatgtctccagtattctgtgaaaagccaggatacgttaggatgtgagtttagaactgagtccattcggtgcatggnaatccaccgcggagtnacacaatgctcctna

SEQ ID NO: 2464 - DNA, 435 bp, Homo sapiens
aaatattttatagtataatgctatccaaactcatttttaaaaacattttattatggaaattttcacaaatgcacaaaaagaatagcagaatgaagctctgtgtacccatcctccaacagctgtcctgtggtcagtcttgtttacctgcatccccacctatcccctgccccaacccacagggatcagtttgagtcccattaacaggcatagtattttcatgtttgtgtgatcagagacattcaaatataactccaaagatagggtacttttttgaacataaccacaataccattgtgtaagactgctaaaacattttttgatgccaagtaccagtcaatattcaaacttcctgattgtctcgtaagttttttttaacagttggtttattcgagtcaagatccaggcaagatctagatcttgcattttgttaatata

SEQ ID NO: 2465 - DNA, 512 bp, Homo sapiens
gtaaatacctgttctctttcaatggactgttgcctattgagcattgtggatgatgtgttttcagatttccaggtgaagttctgaccctacctgtttggccaaagacgtaaattgagaggaaaggccttggtcttcctgatcaaccagcatttaacgaacagtggcttaatgcagatcactcaagaggcagcatagcaatgtaaaaggaatataagtaggtgttggatgcctttttcctagaccaggaatggggaatatataacacctgtgccaccgctcttttaaggaggcattatgaatgagtgcagcattcctgtcctctgtgccaggatttggtcttagaatccatgtcagattggtgcttccagacatctattcccagtccatcagagtgaaatgaaggctatttgccatccctgccttagacagaggagtgaaagaattaagtgggtagacaccaaccaaaatgactttgaaagcagtgagctgattgagctccagttctgtgggta

SEQ ID NO: 2466 - DNA, 540 bp, Homo sapiens
tttttttttttggggagacgaatcccttactagcagagctgtattgagggttaacggtggtaatgggtctccagggcttggtgcagtttgtactcaacaagtacgtaattctctcctttggttgcccctgaatacaagagtggtcttgtacttccctgcctgaacagtccacagccaatggcactccagtccttgtcacatggttccactcttaggatgtaaattaggaggtaccagcttgagaggcagaggcaaaggtaaggttaagatgcagctgtgaggctgggcacagtggctcacgcctataatcccagcaccttgccgggactgtttttactggaggagggggagaagacacacagtggggaaagcgttctttcaatatgcagatgcttcagggagaaccaaactatttcactggtattcccccgtaccaccggaactggtgcttggagcggaagggaagtgagaaaaagtagaaagtaatgagcctcctgtgtctctggaaggttctagggatagggtagagggaagaagaga

SEQ ID NO: 2467 - DNA, 419 bp, Homo sapiens
  misc_feature (1)..(419): n=a,t,g or c
gggaccctgtgtaccatgtactgtatttaaaaaaaaaaaagttacctattgtcacacttgctgtgttaattaacaaaagatgttgtgtgcggtctcctgtatcggtgtggatccaacagctctccagggagtcacattgcatgggggttgagttgacggttcttgtgatatgtaaacccccgagaccaaacttgagggtttatttagggttttctgtttgtcctttgggtttttgtttcactttgttttggtgccgtttntccatttacagccaaatcagtttcatgatgttcaaaacatttactgatgtcaaatggaggaaaggaacagaaaaaaagatttttacaaagtaataaaatttaaaactgagctgtttaatgttgctgtttttanctgtctgttcttgtccaaaagtggga

SEQ ID NO: 2468 - DNA, 490 bp, Homo sapiens
gaaggtcctccctaagagtctcctgacaaaagtatacttattgaacacctctatgtgccaggctctgtgttgggtactttgatcaatgcccctgtttcagtctcatctgtactcacggcagccctgtggagtacggtgtactggcccagcttacagatgcagaaagcgagacgttctgccatcagataaagtcacgtggctctttagtaacacggacaaggctcctcgccaaggaactcgtggcagaagagggcagcagttggcagtagctgccgatgtctgtccccagctccaccattcctccctgtggctgtgcatgctcgtggtttcagtgtccgtgtgtccatgtgtctgcccttcaggagctcgcagctggtgtgcttggcggtcccaggcctgtgtagtgtctctcccctgctgcgggcgcccccaccccgattcctctccccagaagcggtgggatgggccccatgaactgcagcagcatgct

SEQ ID NO: 2469 - DNA, 415 bp, Homo sapiens
tattgctacaaggcaaatcaagaagacatcaggaaatcagatgcacaggaaataaaggaaagctgtgctttgtcattgaatcctaagttcttagctgctgatgcaagttgtcccccaaggccatcacaaagcagtggggcatgagctgtgtttcaggggccactaaataacagctggtactgaccccagaaaccgccttcatctccattcggaagcaggtgacacaccccttcagaaggtgccctgggttgccgagtgtcagaatatactcaggactccagaggtgtcacacgtggaactgacaggagacccgccaccgtggaggcagggggcaagaaactcaagaacgcatcaagagcaccagccctgggccagggaagacaggctcttcctgcagtttctcgtggacactgct

SEQ ID NO: 2470 - DNA, 499 bp, Homo sapiens
ggatgtccaccactgggtttgtgccttgtcggcgctcttctactagtcagatatcgcttcgaaacttgccatcatccatccaatcccgactgtcgatggtgaaccaaatggaaccctcaggtcagagcggcctggcctgtgtgcagcacggcctgccttcctccagcagctccagccaaagcatcccagcctgcaaacatcacactctcgtgggctttcttgcgacagagggaggtcagagcagtgcactgatgcacagccaggcaacaccttaagtcctgccaacaattcacactccagaaaggcagaagtgatttacagagtccaaattgtggatcccagtcaaattctggaagggatcaacctgtctaaaaggaaagagctacagtggcctgatgaaggaatccggttaaaagctgggagaaatagctggaaagactggagtccgcagggagggcatggaaggcatgtgattcaccgatgggtccctgagcagaga

SEQ ID NO: 2471 - DNA, 531 bp, Homo sapiens
  misc_feature (1)..(531): n=a,t,g or c
ggtgctggtgggttcacttttcaaggccagactaatacagttattttctataaaaatctggaagcaaagaatggtgattgtgagagcttacttggtagtatgtttttattaggagaataatgcaatatatatatgtaatgtcttttttattaagcatataagacaatatattgcatttatgagctcggcaggatctgttcttgtcatagccattgactatacatttgctactggtgattcatgttttaattttttattctcaggaaatttttaactctactgtatatgcatgtctatgcattttctgtgttatggaaatccactgatttttttttttttttcatatggtggtacttgcaatctgttttataattagtgctccattttaatcttatttataatttttattttaagcagctattgttacattaatggcctagtttaatantttgttgtctgattccataatgtacttaggttatgtaatcctctttgattttgttggcctgcatttccttgttaagaaaatgt

SEQ ID NO: 2472 - DNA, 282 bp, Homo sapiens
tgatgggaactggtgctgagcctctgacgtcctgcccaagtgaacagctgcggcacgccctcccagcctacccctcctgcgctgccccagacctggaaggaggccgctatcagggtacactgggaacagagacccacctgagccaccctagccctcacccacctggggagtttactacctggggaccccccttgcccatgcctccagctacaaaacaattcaattgctttttttttttggtccaaaataaaacctcagctagctctgccaaaaaaaaaaaaa

SEQ ID NO: 2473 - DNA, 379 bp, Homo sapiens; identical to SEQ ID NO: 393

SEQ ID NO: 2474 - DNA, 459 bp, Homo sapiens
attcggcacgatgggtagccggagcgatctttggtttcatggccaccttcctctgcatggcaagcatatggctgtcctataagatctcgtgtgtaacccagtccacagatgcagccgtctgatgaggccacaacccctaggcccctcaggagctttgcagagaggaggacgtgtactccaggcgaggcctctggacctgtgttcctgtgccaaagtcctgtcaggctggtgggcaccaggaaaggcctgcaccctcttcctgctctcccaggaagccagctccctgagctcctgagccagccggaaactcttcctccagccttccggggagaacatccctcccattctgggaaaggaaagcagcctccagggaaatgttttctgccttcctgcttctagaaccacctcaggtactgatgaaccccacttagcacagctgaaggggtttgtgaatactcc

SEQ ID NO: 2475 - DNA, 355 bp, Homo sapiens; identical to SEQ ID NO: 1464

SEQ ID NO: 2476 - DNA, 427 bp, Homo sapiens
gcgagtgttctgagggaagcaaggaggcggcggcggcccaagcgagtggcgagtagtgaaacgttgcttctgaggggagcccaagatgacccgttctaacgagttcaagctgaaccagccacccgaggatggcatctcctccgtgaagttcagccccaacacctcccagttcctgcttgtctcctcctgggacacgtgccgtgcgtctctacgatgtgccggccaactccatgcggctcaagtaccagcacaccggcgccgtcctggactgcgccttctacgatccaacgcatgcctgagtggaggactagatcatcaattgaaaatgcatgatttgaacactgatcagaaaatcttgttgggacccacgatgcccctatcagatgtgttgaatactgtccagagtgaatgtgatggtcactgaggt

SEQ ID NO: 2477 - DNA, 465 bp, Homo sapiens
cttttggagtctgaggaccgccccgcagaggactccgaggatgaggtccttgctgagcttcgcaaacggcaggctgagctgaaggacttagtcgcacaaccgcaccaagaagcacgacctgctgaggctggcaaaggaggaggtgaccggcagagctgaggcagcgggtgccatggctgacaacgaggtcatggacgcctttcgcaagatcatggctgcccggcagaagaagcggactcccaccaagaaagaaaaggaccaggcctggaagactctgaaggagcgtgagagcatcctgaagctgctggatgggtagccctcacccctgcctcaggtgattatctggcctagtggttgggaagggaggcccacttccttctttgggcacaggaaacattggcctgtgctgtccctcaaatggcggcagtctctaaagggccgtggcttcccctgaggtcttttggc

SEQ ID NO: 2478 - DNA, 369 bp, Homo sapiens
ggtccctcagcaaccccaggcgtgggtttgaggagacaggtgatttacatcccctttgctgtcctcccccggtaccaaggcagggagcctccggagaccggccctgctggccacgcaggggcagactccagcctgtttccccagccctgcaggtcttccttctgtgggaagcttcctagcaagatggcttggagtcctggtccccctcctccctggccctctcgttcgtttctgtttctgtttacacgttggagtggggtcctccgtgggcggcggcgccctgccccgggtgtcgtccggcctcttgtgctcgagcccctttccgagttggactcgaccatccctcaccccaccaaggaccacactgtg

SEQ ID NO: 2479 - DNA, 1522 bp, Homo sapiens; identical to SEQ ID NO: 1679

SEQ ID NO: 2480 - DNA, 276 bp, Homo sapiens
  misc_feature (1)..(276): n=a,t,g or c
gatctggagaagtaagatggccaaataaaagcctctaccaatcatcctccccacaggaacaccaaatttaagaactatctacacaaaaaagcaccttcataagaaccaaaaatcagagagaacaaggataaagaagtatccaaatacaaagaaaatgttatgcaagtgacctttagagatgttttaaagatgacaaaatattgatgangatgggccaacaagtgttactgttacctctaataaagtttcatcactagtttcaccatggttaattgg

SEQ ID NO: 2481 - DNA, 351 bp, Homo sapiens
  misc_feature (1)..(351): n=a,t,g or c
gatctgaagaagctgaagaaanacaggacagtgagaaaccacttttagaactatgagtactacttttgttaaatgtgaaaaaccctcacagaaagtcatcgaggcaaaaagaggcaggcagtggagtctncntgtcgacagtaaagttgaaatggtgaccgtcnactgctggctttattgaaccanntaataaagatttattnattgtaatacctnacagccgttgcaccatatccatgcacatttagttgcctgcctgtggctggtaaggtaatgtcatgattcatcctctnttcagtgagactgagcctngatgtgttaacaaaataggtgaaggaaagtctttgtgct

SEQ ID NO: 2482 - DNA, 339 bp, Homo sapiens
ccagggcccaaggaggagaatgctgcctccttcagtctggtctacacccactttctggtagcctctctgcttcctgtaattctggctgtttttccagactcagctcaaatagtgcccctccttaagcccaccctcgcccccagcctgaggtgatctttccctcctctgaactattagagcagttactgtctgttcagttcgtttggcaggcacacacagtggcataaattctattgttttgaactctgatttaaaattaaattgcagctgggcgtggtggctcatgcttgtaatcccaacacttagggagtcaggagaatcacttgagctcagggagtt

SEQ ID NO: 2483 - DNA, 287 bp, Homo sapiens
  misc_feature (1)..(287): n=a,t,g or c
gagtctgcccgtgtctcaatggttggccaagtcaaacagtgtgaaggaattacaagtccagaaggctcaaaatctatagtggaaggaatcatagaggaagaagaagaagatgaggaaggaagtgagtctataagcaagaggaaaaaggaagatgacatggagaccaagaaagaccatccatacacctggngaattnaactggcaaaaacagaaaaatactgggacggctngttccgaggcttatccaatctctttcttagttgtcccattcctaaattgctgctctt

SEQ ID NO: 2484 - DNA, 450 bp, Homo sapiens
  misc_feature (1)..(450): n=a,t,g or c
agaatttacacaccaaattccctgaaagctaaagtattgttccataacttacacttgaggcaatctgctcagtgtgtaaccactttataaaaaataacttaccattgataacctggaaggtggactacttgtaagtagctggtgtttattgattaaaccatggaagttttcatgatacccaagcatgttgctgaaactgatgcatttgaaagagctgttgaaataatgcaaaactttggttttataagaatctactcatgttttaaaagtatttaactctgtagaccacaattatagaaagctcagtaatgctgctaatgacatttgtaaactatatctgtaatgtaggtgcaatatttttatatttccactggggagaggccagtaggagacctcatagttgtactttagtgccagtgggggggaacnctcccaataggccnagggttt

SEQ ID NO: 2485 - DNA, 476 bp, Homo sapiens
  misc_feature (1)..(476): n=a,t,g or c
caagggcaggtcttcatatttttgatcatccctttctcccagtgaaatcccatagcccttacctagagtctagggcacaaagacttcggggaagatacactgagattgacctgaggagacatctacacacaccagtggcagctgccccagggcctgcttccccttcctaagtctgtcatcctctggaagggatgggtggtgctccaatctctggtgcctaaaaacccaagtttatttctctcttaacactggcaataaccagtccacaccactgttgccttttaaaacctcttaataatctcatgctgtgtttgttttgattccaatccaattatcaccaggggctgtgtggggtaaatgcttttaaatgctctcttcatcttgttcttccccctncaccccctacttttagggtatgtatgatgctaatcttgtncctaagtaaggtttctttcctggtnccttttgtntttttg

SEQ ID NO: 2486 - DNA, 393 bp, Homo sapiens
  misc_feature (1)..(393): n=a,t,g or c
cttatagaaaggaaatattttgtcaagagctttcatttaaaagctactacctccacaatcacccccaaacccagaaaatccccactggctcttgccagttctggttttcgtattgcagttattccaattgtatttgatctccctgataacgtattttcatgggtttgggtagaagatgctaatcagattagaagcaggaatagttatttgctgtctgtgaaattgagccttttggtgcgccacgttgtgccagatcaacacttctatccctctgcactgaccacgttgtgaactggggagaccaaatgcaagccatttcatgggacataggcaatatnacaacccaaactnctgttccntgggggtttatatttgtnaactctttgcaggttg

SEQ ID NO: 2487 - DNA, 468 bp, Homo sapiens
  misc_feature (1)..(468): n=a,t,g or c
attcggcacaggaaggctttaaattactgattcacctttaaaggaatgttgtgagaattgatgtaatttctgtttctgtttccatctaaacttctttataaaaagagggattagtttttttgttttggggtaagcacctaatttatccagtaaccaacaaccctaaccattggcatatatagtctttcactcagaaataaacaaaaactgtttggtatatctgtatcattgctaatcttgtgcactttactttttgggcagtaccatacatagtctgaggctattgacttaaaccaataactgtactttatgtaatgactcttaaatttggttacctggggttcacagcttgcttggaagagaaaggatggctagaattaaagtaaggcagctggaagagcgagccaaatncaaggacaaaacacagtggttctcaggttttttcgtagtgtggggacngtgggtttg

SEQ ID NO: 2488 - DNA, 2754 bp, Homo sapiens
tgccaggttcttggagctgtgaggaggaacaaccatgtcatcagaatcgagcaaaaaacggaagcccaaagtgatccgaagcgatggagccccagctgaaggaaagcggaatcgatctgacaccgagcaggaaggtaaatactacagtgaggaggccgaggtggatctgcgggaccctggcagagactatgagttatacaagtacacctgccaggagctacagaggctgatggctgagatccaagacctgaagagcaggggtggcaaggatgtggcaatagaaatagaagaacggaggatccagagctgtgtgcatttcatgactctaaagaagcttaaccgattagcccacatcaggttgaagaaaggaagagatcagacccacgaggctaagcagaaagtagatgcctatcatctgcagctccagaacctgttgtatgaggtgatgcacctacagaaggagatcaccaaatgtttggagtttaagtcaaagcatgaagaaattgatctggtcagtttagaggagttttataaggaggctccaccagatatcagcaaggccgaagtcaccatgggagaccctcaccagcaaacactggcacgtctggactgggagctggagcagcggaaaaggctggcagagaagtaccgagagtgcctatctaacaaggagaagattctcaaggagattgaggtgaagaaggagtacctgagcagcctccagccccgcctcaacagcatcatgcaggcttcccttccggtgcaggagtacctgtttatgccattcgaccaggctcacaagcagtatgagacagccagacacctgccgcctcccctctatgtcctctttgttcaggccactgcgtatgggcaggcctgtgataagacgttatctgtggcaatcgaaggcagtgtggatgaagccaaggctctgttcaaacctccagaggactcccaagatgacgaaagtgactcagatgccgaggaggagcagactacgaagcgccggagacccacactgggggttcagttggacgacaaacgcaaggagatgctgaagaggcacccactgtctgtcatgctcgacctgaagtgcaaagatgacagtgtgcttcacctgactttctactacctcatgaacctcaacatcatgacagtaaaagccaaagtgacaactgccatggagctgatcacccccatcagtgcaggtgacttgctgtctcctgactcagtcctgagttgcttgtatcctggggatcatggaaagaaaactccgaatccagccaatcagtatcagtttgataaagttggcatcctgactttgagcgactatgtacttgagctaggtcacccctatttgtgggtgcagaagctgggtggcctccacttccccaaagagcagccccagcaaacagtgattgctgaccactcgctgagcgccagccacatggagaccaccatgaaacttctgaagaccagggtgcagtcccgcctggccctccacaaacagtttgcatccctagaacatggcattgtgccagttaccagtgattgccagtacctcttccctgccaaggttgtctctcgcctggtgaaatgggtgacaattgcccatgaggattacatggagctgcacttcaccaaagacattgtggatgcgggactggctggggacaccaatctctactacatggcgctcatcgaaaggggcacagccaaactgcaggccgctgtggtgttgaaccctggctactcctccatcccacctattttccagctctgtttgaactggaaaggggagaaaaccaacagcaacgatgacaacattcgggccatggagggcgaagtcaatgtgtgctacaaggagctgtgtggcccttggcccagccaccagctgttgaccaaccagctgcagcggctgtgtgtgctgctggatgtttacctggagaccgagagccatgacgacagtgtggaggggcccaaggaatttccccaggagaagatgtgtctgcggctcttcaggggtcctagcaggatgaagccatttaaatacaaccatcctcagggattcttcagccatcgctgatctcccgcgcagaccgttgtttcccccaaggcctcaccctgagcactgggcttctgctttctgctctggcccacatgtgactcttgatattctccaaagacaccagccaattaaaaagcgtcacctgaccagtagcctttgtctgtggttcctggcaaggtggctttgcagtctggaagggcaggtgggagctgtgacacagtgtgaaaaagcatttgtagagagactttttctcagcagccaataaaagcagagtggaaaaagattccaattctgcagagagatgctcacctcttgtctacgcacaccctatttgtgctttgcggggtgaggtcctcatgatcttgtatttattatcccaagttcctgctgttaagaggtggtaggagaagccaaaggcagcagagcacaaaaagcaaaactcttccctccccacccgctcttcccattagtcctgtcagggttgccgatggacaaattgtctctgatcgttggatgttataaatgtctgacagtgcagtgcaaacagaagacaaactcagttgatccttgaacaactcaggggttaggggcaccaacaccccctgccctgcacagttgaaaaatccgtgtataacttttgactccctaaaaacttaactaatagcctgctgttgaccagtagtatg

SEQ ID NO: 2489 - DNA, 537 bp, Homo sapiens
cagtggccgctccctgggccgtaggaaatgagcgataacgatgacatcgaggtggagagcgacgaagagcaaccgaggtttcaatctgcggctgacaaacgggctcatcataatgcactggaacgaaaacgtagggaccacatcaaagacagctttcacagtttgcgggactcagtcccatcactccaaggagagaaggcatcccgggcccaaatcctagacaaagccacagagtatatccagtatatgcgaaggaaaaaccacacacaccagcaagatattgacgacctcaagcggcagaatgctcttctggagcagcaagtccgtgcactggagaaggcgaggtcaagtgcccaactgcagaccaactacccctcctcagacaacagcctctacaccaacgccaagggcagcaccatctctgccttcgatgggggctcagactccagctcagagtctgagcctgaagagccccaaagcaggaagaagctccggatggaggccagctaagccactcggggcaggccagcaataaaa

SEQ ID NO: 2490 - DNA, 493 bp, Homo sapiens
  misc_feature (1)..(493): n=a,t,g or c
cctggattaaaaggatgatttttaagctctttagtcaagagacggtgatgaagtttgtgccgcggtacagcctcgtcctagaactcagcgacagantagccttccggagaagcctgcatgatcccgatgggctggtggccacctacatcagcgaggtgcacgaacacgatgggcacctgtacctgggctctttcaggtcccccttcctctgcngactcagcctccagntgtnttagccctcccagatagctgcccctgccacgcagcacaggagtcttcacactcaggcaccaggcctggtccaggaggagctgtggacacagtcgtggttcaagtgtccacatgcacctgttagtccctggagaggtggtnggaatggctgcttcattcctcgaggatgcccgggccccaactgggcttggtctttcctggttagagggaaagtgtaacatatctgccatgangaacataaattcatgtaaagccattttca

SEQ ID NO: 2491 - DNA, 396 bp, Homo sapiens
  misc_feature (1)..(396): n=a,t,g or c
ctgaaactgtcggaatatatgggtcttgaaattcagaagatgatagtcactcttcccatatttataggctattaaggcaagggatatcttaaacatcatattactttatttagatttctactactccaattattaatgttatgtatttctcattgttttacttcttcatggtattatgaagactatatagatgattcaaccaagcctgcaaatctccctcttgtgggaattccactgggacccaatctgttttccatttccattgcaatactactaaagccatacaatatcaaggcaccctccctctagggtccgggggacttatcacaggaggaggcagggcatgttagggttttagggactgggtttcgggggggtcgagtgtagggggnaaac

SEQ ID NO: 2492 - DNA, 441 bp, Homo sapiens
  misc_feature (1)..(441): n=a,t,g or c
atgaatggcacaccatttctccttctcctgccccagggatnaaccactgatctgcatcagagttgcctgctattctctggtgtatccttcacatctaggtgccctcaagcagctgtgtgagtgttgagatctctgccatctctggctgagatactgctgtcctgtgaagtgtttcccatgacctttttcttcccctttgaatccctctgtctggagtagtccttgcctcttcctgctccagtagggccttttccctaccccagcccctgtgccagggtaagctggtacaagagctgccaacctcacagagtgtttgctagggcgagagaggtgcaggggaagagggcagaggtattgcaccttcccccttgaagagagggggaaagggcttacagtgggcccacataanttggcctgattcacaatttcaggttacctttt

SEQ ID NO: 2493 - DNA, 374 bp, Homo sapiens
  misc_feature (1)..(374): n=a,t,g or c
gtatggtgctttaaatactaattttatatttcaagctttttgcagggtagaaataagtggctgttaaagaaaatatcttcaagaaggattatttcagtgtccctttttaaaactcgatgatggctttcagtttatttaagtcttctgtttttcagctccagttaaaactgacaataggcagctatcaaaaatggaaaaaatcttgtgctctttctggaatattagaggantcagttaataatagtaaagtggtattaacccaatacttgatttgcagtttttaaagcagtttttaaattgagagaaaaggggctgggncaggctggaggcgggtggatcgcctggaggtgcaggagttttgagaccagccgggc

SEQ ID NO: 2494 - DNA, 358 bp, Homo sapiens
  misc_feature (1)..(358): n=a,t,g or c
gctattgaagacaagctacaggatggagttcagaaaccatttcaaaacttgcaaaagctgacattaagatctgggtgcttactggagacaaaaagggtaattcattgtgcagggaagcatatctgttaattcacaaatatttatagctgccgtttcctttgcccaagatgacctcctcagacttttcatcctgtacaaacactgtttctttggacggaagatgctttttctgagaaaccctcctctgtttttccagcacatccttctgcatcctttcctgatccccctcagtagcagtttcttccttattaatttagctcctgggccatgtctttgctggatnataatcggtcttatc

SEQ ID NO: 2495 - DNA, 84539 bp, Homo sapiens
gatccgccctcctcagcctcccaaagtgctgagattacaagtcaccacgcctggcttccgtatttaagtattaggtggtgactccatacaaaatatttaacagcttgctggttaacatttaaatctttgttgctaagaccttttctatgtttgacagttattccaaacacgttccatataggaatagtttgccaaatagaagaacacgggatattcttctcccatggctgatgtgttgtgattctaggtgcatatttctgtttccaagaacacggacctgttctcaagttcaaacactgcatcaagagactgtgccccatgtcttttcacttttttccctctctctttctctccccttcccctccttgatttaatttcttcagcaggtcagaattgatacagcttccagaagaaatagtagaagtaggcaaaagattagtttttaattcttgttctgtcaaatactttttgattgaaattgtttttattacaaaggtagcatttgctttttgaaaaacaaaataagaaaaatctttttaatcacttcactattaagtttgttgaatattccctcataactttttctcctggctttttgagtatttgagacatttctttccacattgcagttttgaaacattctaccccacactcatacatgaaagtgaaggctctgcttctcagagtacagtttaatttactttgtggacatcattaacaaaaggcagagaaagacattggaccatactaattgtgggacttagaaaagctatattagtgatggttattaagtatcgcttgcagtggagtctgtaacatattcctatgaagttaatctaactactgagatagtgggagtgcagaggaggcatgctgtgagatggagtggtattttccagcatggcttttctgtttcttgaaaaccctacagcactttgccatggtttctcatctggatgaaataaagcacctgtaccttagtatgtcctgccatgcctttgtatggcatacttggctttgttctccaggcctcttcccacagtaacaacggattctttaggaattggaagggggggccgggcatggtgactcacgcctgtaatcctgggactttgggaggctgaggcgggtggatcacgaggtcaggagtttgagaccaacctggccaatatggtgaaaccctgtctctactaaaaatacaaaaaagaattagctgggtgtggtggggcatgcctgtagtcccagctactcgggaggctgaggcagaagaattgcttgaacccaggaggcggaggttgcagtgagctaagatcgtgccactgcactccagcctgggtggcagagactccgtctcaaaaaaaaaaaaaaaaaagaattggaagggaatggaggaagcaaggtggttaaacaaaaatcatctttacacacaccacccactctatgatgtatatgagttcagaagagcactttgctttatccttaatagaaatatctgtaaagccaggggagtcataaagctgtaggctaagtaaggtgccatgagaaaaggaggcttcacttacgccagtatttggagcagcgtttggcctcttggaggtgtttgcacccatcggagatgctccatagtgagatttaggataagtgcaaggtgagctttgcttttgtaaaatgcatgaagtgtgaccacgaaagggccatgggaaagaattattgatgggttacaggtgcatcgtttcaggcagattgacactaggaaagagcaaagagcaggtagaggtttgacagtttactcctttaaagtaatccatgtccaataacccatggaaagtcttcatgtacttctaaggggtagacataccctagtctaggtgctaatctaggttctatcatgtgttagctgtgaccctgggcaaataactttatcctatggcctcaatttcatcttgcaaaaaaatacggattagataatggcacttccttaaaaggtttgatgggatttcaatggaatattgcatagaaagtgcttgaggcattgtaagtacacagtaagtgaagtgttgaccattattaatatcatgatgataaagtgtgtaacttattttataagtaccatataattgaaatttgccaatagtaactcctcggagacttccagggaactctgtcaatcaaaaaaagctttgtgtaataatggacgctaccttgacagagtgtgttagtcaagagaggatacttatttataaattttgggatatttatacttttttttttttctttagagatggagtcttgctctgtcgccaaggctagagtgcagtggcgcaatctcggctcactgcaacctctgcctccccagttcaagtgattctcctgcctcagccttccaagtagctaggactacaggcacctgtcaccaggcctggctaatttttgtattttttaggagagacggggtttcaccatcttggtcaggctggtctcgaactcctgacctcgtgatccacacgcctcagccttccaaagtgctgggattacagacgtgagccaccgcacccaactataaaatgtatttttatagatacttattgaattttaggatgtgggctgggtgattattttttaaagtacttttaaaaaaattaaggtattatttacatataatatccacccatttttaagtatacattttggtgaattactgtgtgtcaatcatgtaacctcaaacacagccaagattataaaacagttctctacgctgctttggtgatggatacaccaaaatctcagaaaccaccactacagaacttattcatgtaaccaaacaccatgtgttccccaaaaacctattgaaaaaaaaaaagaacccaaaaccaaaaaacagttctctcaacattaaaagttttcctgtgcctttttccagtggattccttccctcagcctctggccccagacaaacacttatccactttctgtgtctgtagttttgtcttttcaagaaattcctatgaatggaaccatataaaagttatataaaaatcatagacttttgtatttgatttcttttactcttagcatcatttttttgagatttactcctgttgtatgtatttacatttcctctttttcttggtgagtaatattgcattatatgaatatctcacaatttatccattttactagtggataacattagattgcttccaacttgaggctattatagtacagctgctatgaacatttgtgtattcaccattgtgtgagcatatgattttccctaccttcttttctatttcactttcttttcctttttctttccttttttttttttcttttttttgagacagtctctctgtgtcgcccaggctggagtgcagaggcacgatctcggctcactgcaacctctgcctgctgggttcaagcaattctcagcgtcagcctcccaagtagctgggattacaggggcccgccaccacacccagctaatttttgtatttttagtagagacggggtttcaccctgttgaccaggctggtcttgaatgcctggcctcagtgacccacctacctcagcctcccaaagtgctgggattataggcctgagccacagtgcccggccctttttcctttctttttttgagataggatcttgctcaatcatgcaggctggagtgcagtggcacacttggctcactgcaacctccacctcctgggttcaagcgagtctcctgcctcagcctcccgagcagctgggactacaggtgcgtgccaccacgcccagttaatttctgtgtttttagtagagacggggtttcaccatgttggccaggatggtctcgatctcttgacctcgtgatctgcctgcttcagcctcccaaagtgctgggatgacaggcgtgagccaccaagcccagctgacaatggattttctttgttttctccttcatctgaagatgtcttccctttgccttcatttttaaaggatattttctctgggtatagaattataatccgagagtatagaggttgacaagttttttggtattggttttagttttgggttgtgtctttttgttgttggcttttgttttgtttttgccccttatagatgtttcactgtcttttggctcatgtgttccgatgagaagtcagcccttcattgggtccttgttctcatctgtttaatacctgttcccatacctgccctttctctctcactgcttttaagatttgctctttatctttggttttggagtatttgactatgaagtgcaagctgctttgtttcttcttggtgtacattcagcatcttgcatcttcaagtatctgcgtatcattaagtttgggcagtttttggctcttgtttcttctaaattttttctaccccattctccctgtccctctccttttggtattgtagttacccactggaacacgtgacattatgtagcaagtctctgagtctgttcatttttttccttcagtcttttttttttttttttgaaatggtctctctctgttgcccaggctggatggtacagcggtgtgatcacgactcactgcaactttggcctcctgggtttaagccatcctcctgcctcagcctctttgagtagctgggaccacaggcacgtgccaccacgcctggctaattttttgatttttactagaaacagagtcttgccatgttgcccaggctggtcttgaactcctgggctcaagcaatccacctgccctggtctcccaaaatgctaggattacaggtgtcagccactatgccagccttttcaattttttatctctcttcttcatcttggttaatttctactcatcttttttgaaatgcacatactgtccttttctttgtccattcagctgagtatatccagtgaattttttatttcaaaaagttaatttttttcagttctagaattgccatttaattattttttgttgttcctatttcccccattgagatttcctacttcttagctgagattttcattcattggaaacatgccttatactgcttcattgagatgattataatagctgcttaaaatctttgtctattccagcattttgttgatctgcaggttagactggcagttgaactaatttgtcccactgtcttgcttctttgtatggtgggtagttctggattgtttactggactgtatgaatgtcaaattctggatattctggattctgttacttttctctaatacttgtttggttttatcaggtggttttcttggctgggtttgaacacaaatgtgtttctctctgagatctttagtctgtagctgagctgctttgtgtctgtcccatgcatgagtggctcaagggtcagtcagggatgtgattgtacggggattggagatcttcccctgcctttttcccttctaggattacttcagtctatttatttatttgtttatttatttagagacagaagtcttcctctgtcacccaggctggagtgcaatggcgcgatctcagctcactgcaacccctacctcccgggttcaagcgattctcctgcctcagcctcctgagtagctgggattacaggcccgcaccaccacgcccggctaatttttgtattcttagtagagaaggggttttgccatgttggccaggctggtcacgaactcgtgaactcatgctctacccgcctcagcctccccaagtgctgggattacaagcgagagccactgcgcccagccggctctctttgttattcatagtttcctggcttctcttttctgagccacccagccaaaaatgctttgactttttctatgcatgtttctgtcatgtctgtgcatgacataaatcataatatcctaagacacaaaattgttaaaggcaataatttggaaacatacaacaataaataaaatggttatagagatgtaactttaaaaagttgaacattttgttaaaacgattcctgaatatgctggaaaattcagatagttaacaaaatattttgaggataaaaaggaaaggaatctgttatctggaggtagaataacttggccattttacagaaaggaaacaaattctgatttcactttttgtatatcatccatttgacaattttcaataaaaggtttattgaaaacggaatacataaggctggtgtttggacctttttcctaattagaaattgtccatgtctccaaagattattaactcagtttattatcagctaaagagatcttaaagttgactaaacacctggaaattaaaacttaggccaacacatcaaagtctttatgacttgaagtgttttaagaattaatgaggcaaagcacacacctgtggtcccagctacccaggagactgaggcaggagaactgtttgagcccaggagtttgaagctgcagtgagctatgatcatgccactgttcttcagcccaagagactgagtgagacctcttaagaaaaaaaaaaaaatgaccggacacagttgctcacgcctgtaatctcagcactttgggaggctgaggcgggtggatcacgagatcaggagatcgagacaatcctggctaacacggtgaaaccctgtctctactaaaaaaatacaaaaaaattagcagggcgtggtggtgggcgcctgtagtaccagctacctgggagcctgaggcagaaaaacggcgtgaacccaggaggcggatctcggcagtgagctcacaccagtggctcacacttgtaatcccagcactttgggaggccgaggtgggcagatcacctgaggtcaggagttcgagacaagcctgaccaacatggagaaaccccgtctctactaaaaatacaaaattagtgggcgtgtggcgcatgcctgtaatcccagctacttaggaggctgaggcaggagaatcgcttgaacccgggaggtggaggttgcagtgagccaggatcgcgccattgcactccagcctgggcaacaagagccaaactccgtctcgaaaagaaaaaattcatgagactaaatcattttaaaaagatgtcttttattacaatttctttcaattaaacagttttatatttttgaaattttaaacaatttgtgcaaacgagatcctactggacctataaaactaatgtagttaatttagaaggtttaaatcacgagaagttaagcccaaatcttgggttgatttaattgttgtgttaacattgtttttatatcataataaaatcagaaggatgcatagacttgtttttaagctaatattaacttctatttctagcccaaagagtcatctatcaaaagccagctcatattaagtagggggaccaagagggaggtctctcagttaaacaaagttattgacttgtctttagacaggcaagacagagtatctcctcataaggttttcttttaacctttttgttctgaagttaatatgtcttttaagtgaataatcttgtttataacaacattttcttttctgttttgtttgtttgtttgtttgagacagagtctcgcactgtcacccaggctggagtgcagtggcacagtcttggctcactgcaacctctgcctcctgggttcaagtgattctcctgcctcagcctcccgagtagctgggactacaggcacatgccaccactcccatctaatttgttttgtgtttttagtagagacggggtttcacaatattggtcaggctggtctcgaactcctgacctcgtgattcacccacctcggcctcccaaagtgctgggataacaggcatgagccactgcacccagctataacaacattttcaaagtggcacattttaatatgaataaaccttctacaatcacaggcctagaaagtttttctttttcttacggaatttcttgactgtttacttgtactagatatttcttcggtatattcataatgacagaacaattgtttatgattgattgatctccaaagtttcccaagaaaagagaaaaagtaggaggggaaggaagaaagaagtgagcagaagttggcttcagagagataggaagggccagttcccttctctgtttaaggaggggagaagacttagatgcagggaaactcattttgacatgccaactcaaaccacagaagccagagtcagttcagctggtttcagtagtaactcaggaccttgacaattctgttaagccatgtcctttaaaagccagctcttattaagtagggggatgaagggggaagcccttcagttaaacaaagttactgacctgtcttttagacaggcaggacagaggatctcctcatgaggtttttttaacctttttgttctgaagttaatgtgtgttttaaatgaataatcttatttataacaacattttcagcgtggcaactgcagtttcagaatggtggaattataccagtcagagagagatgcaaatgatttaaaataggaagaaagcaggtgtctggcccagaggaccagattaagaagaccccatgagagttacaatagttagtgaaaatggtgcttctgcaaacctcatgtctacagaagctggtcaaagaccagatgccaccaggtagaatcccagcaaactcttcaatggtagatatctgtcaccatccttaggaggtaggtctgtggaagctcactataataccatttgcttaacagatatacaaacatggatcagatataatttcaacccacaaggagctcacagtctggctcttcttttgaggcaaaaagactaaagctgttgcctttatggtaagataaatctgccttggagtcaatccaaggtgatttaattactgtaggtagttgtaccaataaggcttgtatcccagagaactccatattgcatttaagcttgttagtaagccaggccagctctatttcctgtgaggactttaaaaaaaattgcattcacacatttaaaaattagcataagcagggtgcagtgatgcacgcctgtagtcccagctacttggtaggcagaggtgggaggatcacttgagccccagaagttcaagaccagcctggacaacaaagtgaagtgaagactgtctcaaaaaaattaattatgacataaaatgttatatgtcttaatttacacaaatataagtatatacttttaaatcccattcttacacacaaaagctagcatactgtgtaaagtattctggacctacacacctttatttttttaacataacaatatgtcttggatacattttcctatttgtctatagaaagtttcatcattattttaaaaaatttgtttttggctgggcacagtggctcatgcctgtaattccagcactttgggaggccgcggcaggcgaatcaggaggtcaggagtccgagactagcctggccaacatggtgaaaccccatctctactaaaaatacaaaaacttagctgggcgtagtggcgggcgcctgtaatcccagctacccgagaggctgaggcaggagaatcgcttgaacccgggaggcagaggttgcagtgagccgagatcctgccacagcactccagctggggcgacagagtgagactccatcttaaaaaaaaaagtttgcttttatatttcatacctgcatggtattctattgtgtgagtaggccatcatccagtggtcttcaaactttcctgtgtactccgtaacagaatttgttgttttgacatgcagtctcactctgttgaccaggctagagtgcagtgccacaatctcagctcactgcagcctccacctcctgggttcaagagattctcatgcctcagcctcttgagtagctggcgcatgccaccatgcttgactaatttttgtatttttagtagagacgggatttcaccgtgttggccaggctggtcttgaactcctgacttcaagtgatctgcccgccgtggcctcccaaagtgctgggattacaggcttaagctaccacgcctggtcttctaatagaatttttaaaaactgtatttacccccttgcacatttaaattgacatctaagatttttattataagtttaaatagttgtaaaggatgtattttccattatattttatacattccttaattttatatatatatatatatatatatagttttttttttttttttttttgagatggagtctcactctgtcacccaggctggagtgcaatggtgcgatctcggctcaccgcagtcactgcctctagggttcaagagattctcctgcctcagcctcccgagtagctgggatcacaggcacccgccaccatgcccggctaatttttgtatttttagttgagatggggtttcaccatgttggtcaggctggtctcgaactcctgacctcaggtgatcccccccacctcagcttttcaaagtgttgggattacaggcgtgagccactgtgcctgccctcccttaattataatttaaaaaatttttgcagatgtagatttatataaattggcaagccagttctctttatcaaattaactgatcaaaaaaaaaaaaacagattaactggtcaaacatagatttactttctgtcagtaaaattttgacttcatttttttaaatcaaataagcatgttaacccggtattgctgtgacaacctttatcctaatttcttttcttcttcttcttcttcttcttcttcttcttcttcttttttttttttgaaatggagtcgtgctctgtcacccaggctggagtgcagtggcacaatctcggctcactgcaacctccacctcccaggttcaagcaattcttctgcctcagcctcccgagtaactgggactacaggcatgcaccaccacgcctggctaatttttgtatttttagtagagatggggtttcaccgtgttggccaggctggtctcgaactcctgacctcaggtgattcgcccaccttggcctcccaaagtgctgggattacaggcatgagccatcgcacccagcttttttatcccaatttcaagatgggtgggcaggtaggtaggtaggcaggtgggtagatagatagggccttcagacttgcctcgcattcatcttttacataaaataagacagtttcaccttgaacacttctgtggtgagactgtttagtcttgtagctctaaactccagccatactctgatgactcccacatttataaatcccagatttgtatactcaactacttatctaacaggtcaaaactgaactcttaaaattcttacatttgtgtccacacatgattggctaagctaatggggctcagatttaccctgtcacctgaaacaactgtaaaactggagaaaatatgtcaaactctgaagttattaggtctaaggtgattaagaacagcgaatcctgagacctgagaaatagagccctatgattgctctgatttaatgctcggagaaagtttccagaccgcggtgcggggagaaggaacatcagcaggccccagcagtctctcctcattgaagaggtaaaatgaaaatccagggcagctggggcagctagagttcacaggcagagaaacaaagaggcaagagatgcacagagaagagaacactggcctgcagatgcccagggagcccactcgagtattcggttgagtactgatcagtgcacccatgtgaggaaaccccttagttcagggaaggagccactcaaaaggattagagagaaccatttacggagttcacacagggccagaaatagttcctgttcccagtagcagagtagaacatttcatgattcaggggtattgattggagtactaagaagagttgtattagtgaaggttcttgagagagagagagagagagagagagagagagagagtgtgtgtgtgtgtgtgtgtgtgtgcacgtgtgaagaaatttattgtaaggaattgccacgtgattatggaggctgataagtcccaaaaatctgcagggcgagtcagcaagatggagacttaggagagccaatgatgtggctatagtccaaaggctgacaggctcaagacccaggcagagccaatgtttcagttcaagtccaaaggcaggaaaaaagttgatgtcccagttcgaaggcagttaggctggaagaattctcttttactcaggaaagggtcagattttttgttcaattcaggcctttaacagattgaatggggctcacccacattagggaggccaagctgctttacgcattttgccagactaacgtttgaccaaagatctgagcacgtatggcccagtcaagttgacacataatgttaatcatcacaaaagtcttgcctcaatagttgggaaaaattaatcctagaataaatgctattctggtcttgcttagcaaaggttaagagcaagaccaaaaagatcaaaccttttccaaacaaaagctgaagaatatttttagggatacaaaaccatctaggaccgagtgtggtaaaatgcacaatgtttaccagccattccagaattactaggtatgagcagaagtagtaacatacaaccaataactgaccagaaatgagacagattatataagtagtacattacagacattagtcattataattgtattccatgtgttcagtaagctaaagaaaagatttaatatgttaagtaaagacatgaaagatgatggctgggcatggtgcctcacgcctgtaatgccagcactttgggaggccaaggtaggtggatcacctgaggtcaggagttcaagaccagcctagccaacatggtgaaaccccacctctactaaaaatacaaaaattagctgggtgtggtagcgtgcacctataatcccaactatacgggaggctgaggcaggagaatcacttgaacctgggaggcagaggttgcagtaagccaagatcgtaccactgcactccaacctgggcgagagagcaagattccgtctccacaaaaaagaaagatacagagatgaaaaatacactgaagactgtcagaataaacattgcacaagtaaagatttgtgattttgaagacttaaccatagaaactatccaaaatgaagcagaaaaaaaaaagaaaccctgaaaaaaatacatgaacacaacatcagtaaagtgagggacaacatcaggtagccaaatgtgtgtggaattggagtccctgaaggaagggagggtatgagggaccaaaaaatatatatagagagagaaaaaaaaatggctgaaaaatttccaagtgtaatgaaagcagtaaacacacagatccaagaatttcaaggaactccaagcacaggaaacatgaagaaaaactatatactaaggcacatcttaagcaaattgcttaaaaccatggtttaaaatggccaaagaaaaagatacattatatacttaagatcagggtgacaccagatttctcattggaaacaatgtaagccaggttaacagtggaacaatacatttaaagcaaagaaagaaaacagttgtctacctagaattcttttctcagtgaaaatacctttcaaaaatgaaggcaaaataaggtctctttcagactttaaaaaaaaaaaggaagaatttattaccagtagatatgcagtacaagaaatatcaaaggatgtaattaaagcagaaagagaatgataactggtagaaaactggagccaccaggagtcccaggctgcagtgagctatgatcgcaccactgcattccagcctgggtgacagagtgagaccctctgtctaaataaacaaacaaataaaagaaaactggagctataaaaataaatgaagacaatgcaaagggtaactaagtggataaatacataagatattttttctttttgtttcagtctcattaaaagatatgtcttagaggtaattacacattgtagcatttgtaacttacatagaagtaaagtttatgacaatagcagcacaaagactgggagtgggagaacaaatatactcttgtaagctttttacactacatgtgaagttgtataatgtcaattgaaggtagactgtgataagttaaagatgcatatgataaaatctatagtagcagagttatagctaatgagccaacaacaataaaaagttgggatataatcccaacactttgggaggccgaggtgggtggatcatgaggtcaggagttcgagaccagcctgaccaacagggtgaaactttgtctctactaaaaatacaaaaattagccgggcatggtggtggcacctgcccgtaatctcagctactcgggaggctgaggcaggagaatcacttgaacccaggaggcagaggttgcagtgagcggagatagtgctactgcactgtagtctgagcgacagagtgagactccgtctcaaaaaaaaaaaaaaaaaaaaaaaaaagttgggataaatatctttaaataatccaaaagatggcagaaaaaaaaactaaacaggaaaagcaaacagagcagatgggacaaatatgaaacaaagagcaagatggtaggttaaaattcatatcaataattaattcaccattaagggccaggcagagtggctcatgcctgtaatcccagcattttgggaggtggattaggaggatcacttgaagccaggagtttgagaccagctttggaagccaagtgagactccatctctacaaaaaaaaaaaaaaaaaaaaaaattagccaggtgtggtggtgtagttccactcaggaggctacggtgggaggatcacttgagcccaggagtttgaggctacagtgagctctgatcacaccactgcactcctccagcctgggtgacagcgagattccatcttaaaaaaaaaaaatcctcattaaaagcagacattgtgagattggataaaaaagcaagacctatttatatttatatgctgtctacagttatcccactttgaatataaaaatacaaatacgttaaaagcaaaagagtggaaaaagatgttaatatgttaacattaatgaaaagaaaaccttagtggcatattaaacaaactatattttaaaatgaatgtcaccaaggataaaggagaattatttcataataataaagagatacattcatcaagacataattctaaatgtttatgcatgtattaacagagattcaaaatacaaacttttcaaggagaaataaatctgtaattatagttgaaggtttaacaactctctcacaaaaactgatagaacaagtagacaaaaatcagtgaggatatagaagatttggacaatataatcaactgacttgacttaattgatgttcagtagaacattcgacccctaaacagcagaatacacgttcttttcaagtgcatatggaactgtttccaagacaaatcattttctgggccattttaaaagcctcagtagacccggcggggtggctcacgcctgtaatcccagcactttgggaggccaaggcgggcggatcacctgaggtcaggagttcgagacaagcctggccaacgtggtgaaaccccgtctctacgaaaaataccaaaaattagctgtgtgtagtggtggatacctgtaatcccagctactcaggaggctgaggcaggagaatcacttgaacccgggaggcagaggttgcagtgagccgagattgcactactgcactccagctgggcaacagtgagactccgtctcgaaaaaaacaaacaaacaaaagcctcagtgaatgtaagctgattcaatttgtagaaagtatgatctctggccaggtgcggtggctcacgcctgtaatcccagcactttgggaggctgaggcgggcggatcacgaggtcaggagatcaagaccatcctggctaacatggtgaaaccccttctctactaaaaatacaaaaaatcagctgggcatggtggcgctcacctgtagtctcagctactcaggaggctgaggcaggagaatcacttgaacccgggaggatgaggttgcagtgagccgagatggtgtcactgcactccagcctggctgagagagcgagactccatctccaaaaaaaaaaaaaaaaaaaaaaaagaaagtatgatctctggccacaaggaattaaatgaggaattaataacagaaaggtatctggaagatctttcaaatatttggaaaataacataattttaagtaaatcatgggtcaaagaaaatcaacagcgaagtaagtaagtatctggaactgaatgaaggtgaaagtgccacataaaatttgtgtgatggagctaaagggaaatttatatagtgcagatggtccctgacttatgacgtctcaacttacatttttcaattttatgatgggtttttcaggatgtaacccaattttaagttgagcatctgtatcagaaaagaacaaaggtcccaaatcaatgaccttggggtcccacttttagaaattagaaaaaatgaagactagtgaaaccccaattaagcagaagaaaaagccagtgtggccaggcagggaggcccatgcctgtaatcccagcactttgggaggctgaggcgggcagatcacaaggtcaggagattgagatcatcccggccaacatggtgaaaccccgtctctactaaccatacaaaaattagctgggcgtggtggcgcttgcctgtgtaatcccagctactcaggaggctgaggcaggagaatcgctttaaccagggagtcggaggttgcagtgaaccgagatcgcgccattgcactccaccctagcgacagaacgagactccgtctcaaaaaaaaaagaaagaaagaaagaaaaagaaaaggccagtctggaaatcaatgaaacagaaaaccagtacagaaatcatgaaaccaaaagctagttatttgagagagcaatgaaactcataaacctctacccagactgatcaggggaaaaaagggaagacaataactgtaatatcagcagtgaaagagatgacatcacacagattctaaagatattgaaagtgtaataactgaatattgatcagcaatctagaagaaacagattccttgaatgacacaaactaccaaagttcactcaagaagtaaccatctgccgggcgcagtggcttacgcctgtaatcccagcactttggtaggccgaggtgggcggatcacgaggtcaggagaccgagaccatccttgctaacacggtgaaaccccgtctccactaaaaatacaaaaaattctccgggcgtggtggcgggcgcctgtagtcccagctactcaggaggctgaggcaggagaatggcttgaacctgggaggcggagcttgcagtgagccgagattgcaccactgcactccagcctgggtgacagagccagactctgtctcaaaaaaataaaataaaataaaaataaagtttagtaaaataaaaaaaatcagtaaaatacaaataaaatttagtaaaaataaagctgattctaaaatgcatgtgcaacagaggatctagagtagccaaaataagctcctctgtctgacttaaagtcttaattaaaataatcagacaggccgggcatggtggctcacgcctgtaatcccagcactttgggaggctgaggcaggtggatcacctgaggtcaggagttacaaaccagcctggccaacatggtgaaaccccatctctactaaaagtacaaaaattagtcaggcgtgatagcacacgcctgtaatcccagctactcaggaggctgaggcaggagaatcgcttgaacccgggaggcggaggttgcagtgagctgagatcatgccaccgcactccagcctgggcgacagagtgagactctcaaaataatgaaataaaaataaaaaactgaacttcatatcttgtccccagatctgatatagtcacttcttcctttgttcagttaaacccagcttcatgtttctgcttgcccagggccaataactttgggatcttccttgactcttctttttctgtcaaaccccgtaccagtctttcaggtaaccgtaacttcagagtctatccaggtcacctctgcttgtccaagcccctgtcatctctcacttggatgatttcattagcctcttggccaggatccctgcttctgctggtatttccttagtttcttctccctacagcagccagagctaatcattttaaatgtcatatttctgtctcgcctcagctgcaaaccttccagtaccttcccagctccttctaaataaacaccagaggccgggtgcagtggcttatgcctgtaatcccagcactttgggaggccaaggtgggcagatcacctgaggtcaggagttcgagaccagcctggccaacatggtgaaaccccctccctactaaaaatacaaaaattagctgggcgtgatggcgcctgtaatcccagctacttgggaggctgaggcaagagaatcgcctgaacccaggaggtggaggttgcagtgagccaagactgcgccactgcactccagcctgggcaacaagagtgagactctgtctcaaaaaatataaataaataaacaaacaagcaccagagccctggcagtcacctgtgaggcttcaccccgtctccccacccactataacctctgacttacctccttttacactccttcttgctgactctgttccttccacattggcctctttgctcttgcttgaatgatccccagtcatcctccctgcccagggcctttgcacttgctgttctctgccaggaaggtgcttcctccgtagttcactcttcacctcctttgggtctttgctcagttgtcatcttcagtgatggctcttctgatcaccttatttaatttttattttttaattaaaaattttttttgtggagatgtcttgctatgttgcccaggcttatctcaaactcctggactcaaacgatcctcctgcctcagcttcccaaagtgctgggattacaggtgtgagctaccacacccggccccgatcaccttatttaaaattgcagctcccagcccccaaccccagcatacccattcctcttttttttttttgagacagaatcttgctctgtctcaaattccctccagccatgagccctgaaatgaaacaagttatctatttccaaaacacaacagtggggcaggcataggatagacattcccattccaaaagggagcaataggcaagaagaaaggggtagctggtcccaagtaagtccaaaacctgagacagagtcttgctctatcgcccaggctggactgcagagtggtgcgatctcagctcactacaacctccgcctcccgggttcaagcgattctcctgcctcagcctcccaagtagctgggattagaggcatgcaccaccacacctggctaatttttgtagttttagtagaggcagggattcaccatcttggccaggctggtctcaaactcctgaacctcaggtgattccccccgccttggcctcccaaagtgctgggattacaggcgtgagccaccgcctggtctccctcattccttttgttatcagtcatccctcccagccctggcaactgctgctcactttcctgaccttagaattttgcttattacagaatgtcatataagtagaattataaagtatctaagcttttaagtcctaatgcatttaagatctgtaaaaagtaaagtagaggttcctcttcaaagactttcctccccatctaattaggaataaatagtaacttctcttagaagaaaaatttattcaaagacctgtgctaacattcttaaatatctgctagccataataaagaaatcaatgtactttatattcttagctctcacaatttagcctaaatatttgccctggcatgcttatactggtccaagcaagcattaggtcatggcctgttcctcttccttatttgaaggtgtttttacctttctcagcactccacaagttacttcctccttcctttgttctcctctgcctttgcctcttttaaaaagttctaagttcctagccaatcaggacaaatacagaatgtgaggtcctgttccagccaatggaaactggacacagcagtagggtggacgcgtcaggttgtaaatgaccctgtctcctttgttcagtgtactctcatggcaaaactgctggtgagtgtaccctttctgcagaaagtaaaaaatggccttgctgaggaaattaaatttatgttcaagtgctttttcttcagggcaccagggaacaagcatttctaacagatccatatgtgtcgctgcatgtaatcagtggttcattcctttctattgctgagtagtgttccattgtatggatgtacccgtgtattgatccatccatccactgaaggatatttgagttgtttccagtttttttgtgattatgaataaagccactgtaagcattcacatagaggctttggtgtggacataagttttcatttctcttcggtaaataattaggagtagaattgctaggtcgtaggataagtatatgcttaacttaggagaccctgccacagtattttacaaagtaagggtgctattttgcattactaccagcagttcacaccatatgtattcacaccagttgctccatttggtcttcgttctgtgacttgtctctattctcttaacagtatctttagaacagcagaagtttttgattttgatgaaattcagtttatcgggccaggctgggtggcttatgcctataatcccagcactttgagagaccgaggagggtggatcacttgaggccaggagattgagaccagcttggccaacatggcgaaaccctgtctctactaaaaatataaaaattagccatacatcgtggcgcatgcctgtagttccagctactcaggagtctgaggcaggagaatcacttgaaccctggaggaagaggttgcagtgagctgagatcatactgctgcactccagcctgggcaacagagcaaaactccatttcaaaaaaaaataaaataaaatttcagtttatcagtgatttctcttaagtttcatgcattgggtattgtagctaagaaatcttcacctaactcaagtttacaaagattcttctgttttttttctagaagatttataagttttaatttaacttttaggcttataattcatttcacattaaatggtgtatgtggtgccaggtattgctcgagagtcatcatcttgcataggggtttcggatgttctagcaccatttgttcaacagatagcctcttttcattaaattgccctttcacctttgtggaagatcaattcagcatgcatgtatgggtcacttgtatgtttttaattgatttctaaattctgaaaggaaaatgataaaaaggaagattctttcactatatctgcatttccaatttctcccccaagaacgctttcctaacacctgcaggcagaactaaccactctgggcccctgtagctgttgtgcgtatgtttattattgagtttttctggcctttgcagttctttcagtgtctgattctccctctctctcagcttctttctcaagactgtgcatccttggaggtcagaaattgtctcatcctgccgggcgcgatggctcatgcctctaatcccagcactttgggaggccgaggcggttagatcacaaggtcaggagttcgagaccagcctggccaacatagtgaaaccctgtctctattaaaaatacaaaaattagctgagcgtggtggcacatgcctgtagtcccagctactcgggaggctgaggcaggagaatcgcttgaacccaggaggcggggaggttgtagtgagctgagattgtgccactgcactccagcctgggcaacagagcgagactccatctcaaaaataaataaataaataaaagacaaaataaattttctcatccttttttgtcatcttcatcacagctggctctctaatgttcgttgaatgaaagggccattcccaaatctctgataagtcaagcatttttaggagagctaaaccagccaaatgagaccaggaagtgaagaaaaatacctttttttttttttttttttttttggagacggagcctcactttgtcacccaggccggagtgcagtggcacgatctgagctcactgcaacctccgcctcccaggttcaagcaattctattgcctcagcctccccagtagctgggactacgggcacacaccaccatgcccggctactttttttttgtatttttagtagagatggagtttcaccgtgctggccaggctggtgtcaaactcctgacctcgtgatccgcccgcctcagccttccaaagtgctgggattacacgcgtgagccaccgcgcccagctgaaaaatacctactttttttttttttttacagcaggaggtgtttctgcttctactttgctgtgacttctgtttctccaggcattcctggtatggacatttataccaggtgttttggtcattggtgggctctcagcttcagaggacacttggcttctctataccctatctttggtgacttctgcttgttggacttcagtcactgcagttcacaagtttcacactcatgaaatatttattgttaattaattccaatatttaattgattgcttctctttctcagcactttggaaacatgtttactacctagacattttcctacagtagatttttaattcttaacattttgatcttaagcaatttaccatgatacttggtttccatgagagatttaacagttggaactgtactgcccataagatgcaggtggggtcatggtatgtagttgggaactctacaaatggcagcccttcatgcctttgcaaaggctgcaggttggaaagctgccattacttgtgagggcgtccaaatgcttcctgtgaatggaagatgtgtttctgtgcctcactgtcttcactgtgctggattgctggctttctcagatgtctttatttgagtcaacctgtattccatctccccactcccacccagtcttgatcatctcatttgtgtgtatacaaccttcccctcacacacacctctttgcagagtttcgttgcactgggcgttgggaggagaggcgtcagagttgggtggaatcatttcaggctgactgtccagacatagctctcattagaagcatcagtaaataagctgaaaaccaacaacacgtacagcacagtctttctgtgtttgcagcttggaactgagcagccctcactgggtgcatttctaatcctttgtctcatcatttatatgacatccacttagaaaaaggtgttaaaatcatataacatattgctttttccccttttttattagcagttttactgaggtgtaatttatatgccataaaatttaccatttgaatgttcaattcaatgatttctactaaatttatagagtgtgcaccataaccacaatccagttttattttttatttttttttcgagacagagtctcactctgtcactcaagctggagtgcagtggtgcaatctcggctcactgcagcctccacctcccgggttcaagcgattctcctgcctcagcctcccgagtatctgggactacaggcacgtgccaccatgcccagctaagttttttgtattcttagtagagatagggtttcaccatgttagccaggatggtctcgatctcctgacctcatgatccgccagcctcagcctcccaaagtgctgggattacaggcgtgagccaccgcacctggccccacaatccagttttagaacatttccagcatccccaaaagatcccttttgtccctttgcagcagtcctacccccacttccagccccaggcgaccattcatttgctttttctatagatttgtcttttccgtacgtttcatgtaaatgaagttttatacaatatatgaccttttgtgactgttttttttcccagcatgtttttgaggtttatctgtattatagcacgtctcagtactttgttccctttttatcactgagtattattccattgtacggacatacatttttctctattcactagttggtgaacatttggattgtttccagttttggtcatcattaacaatgctactatatatatccatgtataagtctttgtgtggatatacattttcatttctctagggtagatttctagaagtaaaattgctgagtctttttttttttttttgagatggagttttgctcttgttgcctgggctggagtgcaatggcataatcttggctcactgcaacttccgcctccctggttcaagtgattctcctgcctcagcctcccgggtagctgggattacaggcatgtgctaccacacctggctattattattattattattttttttttttttgagacagagtctcgctctgtcacccaggctggagtgcagtgcgcgatctcagctcactgcaagctctgcctcccgggttcatgccattctcccgcctcagcctcccaagtactgggactacaggcacccgccaccacccccggctaattttttgtatttttagtagagacgaggtttcactgtgttagccgggatgctctcactctcctgacctcgtgatctgcctgcctcggcctcccaaagtgctggcattacaggcgtgagccaccatgcctggcaaattttgtatttttagtagagacgaggtttcaccatgttgatcaggctggtctcaaactcctgacctcaggtgatccacccaccttggcctcccaaagtgttgggattacaggcgtgagccaccacgaccggtcaaattgctgtcttatagtaagtttatgtttaactttttaagaaactgccaaactatttcctaaagtgactgtaccatttacattcccaccagcaatgtgtgagtgttccagtttttccatgtccttgccaatagttggttttgtctgcctacctatccccgcccctgcttttttttttttttttttttttttaagagacagggtcttgctgtgttgttcaggctggcctcaaactcctgggctcaagtgctcctccctagtagctgggactataggcacacaccagtgtaccaggggttgtctgtcttttgattatagctattggaatgggtgtgaagcagcatctcgtgattttagtttccatttcttgaatgactaatgatactgaacatctttttatgtgcttattagccatttgtatttcatctttggtgacctgtcaattcaaatcttttgcctatttttttttattaagtttgtgcactgtcttattatcgagtggtaagagttctctgtattgtgggtacaagttcttttttttttcgagatggagtctcgctctgtcacccagggtggagtacagtggcacgatctcagctcactacaacctctgcctcctgggttcaagcgattcttctgcctcagcatcccaagtagctgggactacaggcttgcaccaccacacccagctaatttttgaatttttagtagagacgggatttcaccatcttggccagacgggtctcaaactactgacctcgtgatcctcccacctcggcctcccaaagtgctgggattacaggtgtgagccaccgtgcccggccttccaagttctttatcaggtatatgatagcacatgtagctttttatcttccttacaccagtgcaagtttatagaaaggaaaagggatagttaatagtaatcataataatgtttaatatttgaatgttttttaggagctggacactgggctgcatgtttcacggggatgatttgggtcactcttcaattttctaaaggttacaggactgtttcaaacacctctccttctattaacagttttcaatggagaaagaaaacaaaagattgatttggggaattcttaggttaatgcgagttagaactgaccttttaacattattaccataaggactaaatggctgttacagacccaaaataggagcaattcaaacaagcgagatgcttctctctgtaacaggctgacagtcgcggtcctggaggggcacgatggctcctcagggtcagacacctcctgtcccttactctgtaaggcacagcttctacctcaggatccaaaatgcccacgccagctgccatggcccctcacaggcagtggacaccagaaagaggagagggagtgcgtgcctgttgctttgaagaacctgacccagaagtcttacacagcacttttgcccacataccatcacttagtcatgtggtagtgcctggccacaagagagactgggaaatggagtctttattctggggtgatgtgtcccatctgcaactgaggggttaaggcctaaaacttagggattgaaggcaggagaaaaaacagatgtcgagagccagtgttgggattgcagggtcctgtgtgggattcctgttcattttcatcaaagaaagtctagttgatatgcaattgttggcctaagtgttattgaggagttaattttactgttgaattacaccagaacatttgtcatgtgaaataactataaatacgactgattattgcctagtgtattacagttctctccagagacacaggaaacaatagggtctgtctatcggaatagatatcctaaaagtgtatcttttgaagagattgattataaggtattggctcatgagatgatggagcttaagaagtcccacagtctgctctctgccagatggagacccaggaaagctgctggtgtagtttgaaggcctgagagctgagggccagtgatgtggattccagtctgaaggtctgagaacccagagggctgagggcaggagaagatccatgtcccagctcaagcaggcagagggagggtaaatccaaccttcctttttctgtttttttgttctaatcaggccctcaacggactggaggatgcccagccaaagtggggagggccatctgcttaggcagttcaccaattcaaatgctagtctcttctagaaacaccctcacagacacacctggaaataatgtttaagatctgggcatcctgggggtctagtcaagctgacacatacatttaaccaccacacttagggaatatgaaaataacttagacattaaatttgattttggtgttgctgtaaagaatacagatcttaggcaccagctcgtaggaggggtggtaaacaaggaggacagcttttaccaggttgcctttggaagcaaaactctgctttgctgttttgttttcaagcggctgcatggccactgagcgagccctttcctgccatcaccacagtgccacttagtgaacagtttctccaaggttaactgtagctgctcttgttcagttaatatgtagttctggattaatatgccacatctgtcactttaaggaagaaaaagagcagttccgtttagagatcccattgctcctctaaggacagcagtcatttctaacaagcagagggaagaaatcttctggttccatttgtcctttgtgtgtgttgaaaaccttgacaacaaaacaaattggtactgaatggtttgaagaaataaacattaactcccctttagtatttcatttctagggtttccagccttggtaacaattaccaagaactttgctgtcatggggtacagctctaggctgctgacaggatcttcatactggaggagactatacttttatagccaattccaactgccccagagataacttggataaacactggctcctccactacctcctaatccctgctgggttttacactgtggggaggtttagacaacttgttttctttcccttttagcccttctctctacactcccctccagctgccttcttcccccacccccaaatgtaacgtgatctcctaggcctgctctgctgcttttgcagattcttttagtcttagagaaagagaggaaaacattaaccattggtttaccaattcaaagttaacaacattttaaacaaaaggagcttgtcaataaccagggcttgggcttttcttttatcagttcctcctacttggctgagtttacctcatcataaatcttatcacacagataataatttgacagctttagggtttttgcagcattgctattttctattgcaacaaagctgtaacattgctatttttgatgtatttgttttatagatatcttaatcttcaatattcagattaaaaacaaacaagacttagtgatttaaaattatttggtaaaaaggtaaagggacagagacatctcatgaaaacatggcaaaatctctttaagtttaattcaagcacttagagtttaataagaatatcccaaaccatttttgcttaataatatttctgtttataattaaaccttaaggtacagtgttgtaactggatttaagaatttagagttttgttgtttcttcgccatcagcgaaattaagatttaaaacctatagtttgcaacaaattttagtttttcagcctagtgtcctaaaacttgtctgtcatgggtacctagtaggtgtcatgtcacaggaaagggatctaacaagggagtttgaagataggggttttccttgctctgccactaacttgctatgtgacctagggcaagttatataacctatctgtgtcacagttgtctgaaatgcaatatggggaaaataaattcttaaaatgacaataaaaagatttctttttttttttgagacagagtcggcgcaatttcggctcactgcaacctccacctcctgggttcaggcgattctcctgtctgagcctcctgagtagctgggattacaggcacacaccaccacgcccagcaaatttttgtgtattttgtagagatggggtttcgccatgttggccaggctggtctcaaactcttgagctcaaacgatctacctgccttggcctcccaaagtgctgggattacaggcatgagccaccacgcctggccaaaatatatatatacatattttaagtgaagatgtgtaaggactaaaggagcccaaaggagacagtaggggataagaaaggcaaagagagtggtaatagatttagcagaatcaaggatgccaaaacctcttctgagagagaccttgattaagagtgagctggtttgcctgtaagaatctgcggaaaggtcagaaattagagacattagtaccacagaaagcaggggatgaggcctgaagctgaaatcaaggggatcaattgagagcctataaaaggagggtttagattcttcaaacccctcccaaccccacagagtcagatgaccacctctcctaaccacctacaggagaccagaggcattatattgagaaatgcccggccgggcgcggtggctcacgcctgtaatcccagcactttgggaggccgaggcgggcggatcacaaggtcaggagatcgagaccatcctggctaatgtggtgaaacaccatctctactaaaaatacaaaaaattagccgggcgtggtggcgggcgcctgtagtcccagctactcaggaggctgaggcaggagaatggcgtgaaccctgaaggcggagcttgcagtgagccgagatggcgccactgcactccagcctgggcaacagagcaagactccgcctcagaaaaaaaaaagaaaagaaatgccccgtagaggctctgcactcagaagcctgacccccagcatgggtccgggtaggccattggccgaaaatagtggagtgggcaaagagcagattttttaaaagtctgcatactgaatagtaagattcccagccctcttctaatacctgctagccaggggcctaataaggaagagattgaaatattcttttctagggggaaaaagttgaatgaccctagagaaaagccctacagataccaacatttagggattctcttgaaaaagcgagtttaccatctcctttcactgaagcttaccagtggctgtgccccttccacgcatacaaaactaacagtcatcttttagttgctcattcatagagagtgagtggcctgccaaatctctctaggcattagaggaaggtctctaacctgatattaatagataaagggtaaaacaaatagcagaaaacaggaacttggtggaaataaagacaatgcagtcaacagaggaagagtttaaaagaactattcagcttgggcaccatgactcacgcctgtaatcccaacactttgggaggctgaggtggacagttcacctgcggtcaggagtttgagaccagcttggccaacatagtgaaaccccatctccactaaaaatacaaaaattaactgaacatggtggcaggcacctgtaatcccagctattgggaggctgaggcaggagaattgcttgaacctgggaggcatagcttgcagtgagccaagattgcaccactgcattccagcctgggtgacagagtgagactctgtctcaaaaataataaataaataaataaataaataaataaataaataaagctatgcatttcccacaaatactgcttaaaaaaaaaaagaactattctttgctatccttggagagagagattgcaaatgtcagaaaacaggatgcttttaaaaacaataacaatcagaataagaataaaaatgaattatttttcttttatttatttatttatttatttttgatacatggtctctgtcacccaggctggagtgcagtggcaagatcacagctcactgcagccccaacctgcctcagccccccaagcaactgggactacaggcacgcaccaccacacctggctaatttttaaattttttgtagagagatggggtctcactatgttgcccaggctggtcttgaactcctgggctcaagtgatcctcctgcctcagcctcccaaagggctgggattatgggcatgagccaccacaacccagcaagaatgaattgtttaatattaaaaacattatagcccaaatttaaaatccaacagaagatgtggaaaattgtctcagaatgtattgggttggtacaaaagtaattggggcttttgccattttaatgacaaaaacgttgattacttttacaccaacctaatagaacataaagacaaagacatggactgttgagagaacaataagagagaacaggtaagaaaattagaaactctcgggaggctgagacaggataatcgcttgaacccaggaggcagaagttgtagtgagccgagactgtgccattgcactcctgcctgggcaagcaacaagagtgaaactgcgtctcaaaaaaaaagaaaagaaaattagaaactcaatcccagggctttaatatcctttttgtaggaattccagaaagaaaacaaaaaaataatgataataacgaagaaacaaatggaggagaagttaggagacgttaaatgtaaggaaaaatttcagagtttagtgaagtgagtattttccaaaacagaattatataaatctctggatttatgagtgcccagaataatatatgaaaggccatatcattgtgaaagttcagaacaccaagaatattagaagatcctaaaagtttccaaagagaaaaaaagcaagtcattttaaggggtcaggaaccagaatgggattgcatctctaaacaatacttactggaaactagatagtagcagataaataaatgccttcaaagttcatttgggaaaattattttcaacctagaattctatacccagacaaactgtcaagatagaagaaaggtatttttttagacatgcaccctccctccccacctctgtgaagctactggatgatgaattccagcaaaatgaagaagtcagtcaataagtagaactgagcccgggcacggtggctcacacctgtaatcgcagcactttgggaggccgaggcgggcagatcacgaggtcaggagattgagaccatcctggtgtaacacagtgaaaccccgtctctactaaaaatacaaaaaaattagcagggcgtggtggcgggcccctgtagtccgagctactcgggaggctgaggcaggagaatggcgtggtgaacccgggaggcggagcttgcagtgggcggagatcgcgccactgcactcccgcctgggtgacagagcgagactacgtctcaaaaaaaaaaaaaaaaaaaagtacaactgagaatatttgaaatgttttagtgattggaaaaaatatcactagatgtttgacagatctttgaagtatttgagggaaaatggtgataggtatatagaagactaaatgaaaacaaggcaatatctctaggataaacaaagatgtataataaaggaaacattcatagtatattattggctaagcagtgaagaatatttatatcatcctaataatgtaaacactaactattgatttatcccccaaattgtgattttattgttttggggggttatggatggtgatagtataatactgctgtcataagttaatagataatggataaatctaatgaattcagaaagagcaagatgatgttactagctaaaaatctgaaggaggctgtctctgcggaaacatacaggggaaagggattgctgttttttattaccagatttttacaagactatttttagccttttttacaagacttttagtactgcttgagttttaaccatgttatgtatattactttgattaaaaagaaaaattaatttaaaaaaatgagcatactaataccattaattttctccttctagagaaaaatgtttaacagttaggtttagacttgttaattataaaaatatagtagtcttactgtaatgagattttctagaaagcggatttactctaaggcagttcagatttggtccccagctgagaattatagcctggaaataccaacagaaaaatcagtgtcatttgaaggacagtcatctgtgcagcctgtgcatgaaatcatgggtctgaattaggcccccattcaagatgcgggggtgtggggtttgtgttttgctgaagctgtggttgcaaatctttgctttaggatgaaaggtggggctctctgttacatttgaaccttagttgctactcctacctcacagctagtgtttctttctcttcataaaataaattgatttcctggtcccttggaaaacctccagactgctttctggaatcattttcatatagcatgtttgttaatttgagctcttgactgagtcccagtgagatgtaggcaggaacacagacctgatacagaaatagtcctcttttggaaataacaatagctactgtttatcgagcaccttctgtgctttgggcactctccctacatgattcctaatcttcataataaccctgtgagataactactcttatgactacctcccatttttcagatgagaaaattgaggctctgagaggtgaagtcgttgcccatggccccccagtgagtggcagatctgagactcagcgctagcctttgtgacacataactcgtgaccagcaggtagtgctacccgattgaaaaaatgtgagacttaaagggatgcatgtgtccctatacagtggcaaaaactggtatgacagaaatgatgttttaagctatgttatcctttagttggacatacactggacccacagagctagagtacctggcaggctcttgctggacaatgtttgctgaatcagagaaagtgggctttgttggcatttgcatgtgaaatactgtgcacatacctcaagatctttgctgttccccccctaaagctactagctatgctggaaacagtgaaggggtcagccagacctggggtcaccttgtcctggggtcccaagccaggcctcctgtcaggttcatctgtctctgttccacctgcactcacacccagtcttgctgctgagagatggagcatccacatcctgaatcctgcctccttcccttgacacacttctatggtgggtgcctgcccaactttttcttaataggactaaattccaaattaaaaaaaaaattcagtctctctcctctaatcatccaagaagagtcctcttttggtaacttgttctagaactatgcctatcttaaattcagaaattgctttcaaatgaattaaattttagaaatatccattcctgttcgtcctattcccagtgaaaataagcaactcttccctcttccaaaacagtggatttcttttctttttttctttttttgaaatgtagtcttgctctgctgcccaggctggagtgcagtggtgcaatcttggcacactgcaacctccacctcccaggttcaagcgattctcctgcctcagcctctcgagtagctgggattacaggtgtgtaccaccatgcctggctaatttttgtatttttagtagagacaggatttccccatgttggccaggctggtctttaactcctgacctcaggtgatcgcccaccttagcctcccaaagtgctgggattacaggcgtgagctactgtgtctggcccccaaacagtggatttccatcttacatatgcatacagatcatctgggagcttcagatccagcccattgcacatattctgattctagactagaaaccaagactccgcattttaagcaagccccacattattcaaaatagattgtccatggattatgcttttagaaacattgttcagatcccatgctttaatgttggggagtttatcctttccttctaaatattttttttttttttgagatggagtctcgctctgttgcccaggctggagtgtggtggtgcgatcactgctcactgcatcctccacctcccaggttcaagcaattctctgcctcagcctcccgagtagctgggattacagatgcccgctaccacgcccagctaatttttttgtacttttagtagagatggggtttcaccatctcaaaaaaaaaaaaaaaatcttaaatagctctagttccctgaattattttctcctaagacatgttttcccaacagttaatgttacttatttcatcttctgatcttactcatattatccacctttcacttaaattggaaattttctgccattttacaaagttcaagactttcctaccttcctacctcctggctgtgtgaacttggacagaatacttccccctctcccttcagtcagttttcttacttgtgaaatggaattaaactatacaaaatcattaggttactgtgaggcttaagagtgcctggcacatattacatgcacattaaaaatgtatttcttcccaaactaatgcaacatagcaaacaagttagttcacagtctttaatttctttccttttccctttctttttagctaatagcttttgggtcttaggctgattagaaggaatccttcttggggtgttcttctggtaagaagattgaagctctcctttatttgcttgtaacagaatgctcttcgtatctttcaaaagcgtcaaaagctggatatggaaagtataggccaggtttgatacagaagtgtagtttggcagttttttcagtatccattgccactaattcagtattttgttagatctgttgatgtacggttttataactaaaattaaaaagatttgggtacagtttataagcattattcattttaagaggatttaagaggataagaccattttagactcgagcagaatattagtaataataattagcttaaaaaaataaacatataccaatataaagaacagcacaaggcaagcaaatatctgggcctatattaacagacggtattcaaggatatggctagaatttccaaaatgcctaataatgtgtaattcttggcattaagccgccaatttgaatatggccctttaatatgaaatgctatataatgacagactttattatagtctgatccaaggcccctgaactttccaaaagggcaacaaaacagacagatactgtattttttcactagttggtactggtggcacccttttgagtgttatttttggcattacgtgtagaggttgacagattcaagacaacactaaacatgttagcagtcaccacacgcaggctgtccagcagaatgacagcgcctcccagatcctagaaagcatccagagtcactgcacccatcccctgggggccctgtagtcctgcatctccagatgatgggagctgcaaacttccctgatggtgccctcttggatgctcatgaggcctgatctggtaccacgactctagcagtaggtccattcaatggcagtaaaaatacatgttgtatgttgatcagaatttggcaggacacatgtggaaagttaatgacatcctggccgagaacccctgtgatatacactggttacatcctgtccaactggagtttttatgtgctgtttttggcagagccaagtgaagatcttgttacttagccattcctgaggtactgaagatacccgggtttttgtcattacaggataggctagaaagtagccagggtctcataaccaaggctttctctgaaacatataatgacaatgctagttatttgaccaaagatatccaatgctttaatccacttggaatttattcttgatgtgaagggtcagcatcatccactggtcgggagcctgatccttggagccaggcagacctgggttgagtccatctccgcctgtttccagctgtgggcaaggtgtctgacttctctgagcatctgtggggtttgtttgtttttaaacctgaagaattgggataatctgtttcctcacagaatcattacgcagatgcaatacagttaatgaaggtaacatggcacataggaagagcacaatacacgtcagctcttactcttcatggctagaagatgtggactaaacttccccctttacagttttgtgattaacaccatttatgaaagaaataaatgaaataaattccttttcctgtcatgaggggaacttacctgattttattgaattatttggtgccattgagttccttattgtttccctctgacctagatttctgggtgtgcgccagtaacacgactgtgattgttgctgctttataacattgtctgtggtcagtccaaacaagagtttaaaataattgaatgaaatggattttaaacaatggtccccccaccctcaccccgtggcactcggccaaaggaagaggaaaagttctctgttaaagaaaatgaatcagagaagaggcccagaccgtgcctccgaaaattctcattgtagggactaagtcctctcactctgaactcacacccgtctgttcgcagcctcacctcatatcctggtctggatgtgcggcctcaccggggtgtcgtgcgcacgtgtggttgtcctgtgggtgccagctctgacttcctccccagacacccactgcctcagccttaatcacaggacgcgcgttgagtagaaatgagaccagttagtattggtaactgcagaggaatttgcattttcaccagcgttctcgggtcagagggtttgcctggcaccgcgtactgggaaactcgccaaaagcggtgcaggttggagacgccccaggccgcggtggagttgcgcgcggcttctaaagtggagtggagcaggcctgcaccctccccgccggggctgggacggcgcttccaggcggagaaagacctccgcgggccgcgcgcggccttccccctgcgaggatcgccattggcccgggttggctttggaaagcggcggtggctttgggccgggctcggcctcgggaacgccaggggcccctgggtgcggacgggcgcggccaggagggggttaaggcgcaggcggcggcggggcgggggcgggcctggcgggcgccctctccgggccctttgttaacaggcgcgtcccggccaggcggagacgcggccgcggccatgggcgggcgcgggcgcgcggggcggcggtgagggcggctggcggggccgggggcgccgggggggcgcgcgggccgagccgggcctgagccgggcccgcggaccgagctgggagaggggttccggcccccgacgtgctggcgcgggaaaatgttggagatctgcctgaagctggtgggctgcaaatccaagaaggggctgtcctcgtcctccagctgttatctggaaggtaagcccgggccgcacgggttgggctgagtagccgcgcgccctcccgctgctgctgggcccttcctaggcctcgccgcccgcgcgctcccgcctgcgccctccccgggtcttgtcttttttttctttcttccctcttctcttctcttctcttcagttctcttatattctgtctctctttctttctctctgtgtctgtctcttttctcttctcttgtctctctctttttctctctctctgtctctttctctttctcgcgatggcccctaggcgccgccggcggagcgtggcccccagccccggcaccagccccggtagagccacgccggatggtgacggcggcgtccgggaccccacagtgcgggctcccccgaaaaagtttgagaaagccaactcgccaggccttaacatccctgggatcccacgttgtggaatttccaccgttaattgggactgtgtgttaaaaagatcgacccgtgtttgtgaaaacatgcgatttccattaagcatcatgtacacaaggagcaccactctaccatttatggatacagaatttcaagtgatctttccatctcccccacccccatcttatctacagaccacgaagaggtcttaggaattcgctctcttttcaggggaggggagcccatttaagaaggcgtttccaaggagtcccccagagtactggggtgtcatgttcgtttccttaagtgaagctcagggccaggagggcttcacttttgcgttctttctacctactctccttctctaattacatctgttttattttatttttctttcctgttgtagtctttagttttataaatggaaaaaaagtaaattaagggttatgggtcttcactttcgtagcttctaggtgggtatgaaattgatctgatttgagactggtgctcccagaccattgccttcagcagaaaggctatctgtgcttcagagatggagttgcacttggacttctctgttgttttcaactaagaatataagagtaaaaatgtggccgggcgcggtggctcaagcctgtaatcccaacactttgggaggccgagacgggtggattatttgaggtcaggatttcgagaccagcctggccaacatggtgaaaccctatttctactaaaaatacaaaaaattagccgggcgtggtggtacacgcctgtaatcccagctactcgggaggctgaggcaggagaattgcttgaacccggcagggggaggttgcagtgagccaagatcgcgccactgcactccagcctgggcgacacagcaagactcggtctcaaaaaaaaaaaaaaaaaaaaaagagtagaaagaaatgtgaagctcactttagatcaagtaggatttctgctagaatgccatgtttttctttttaaaaaagcaggagaaataaacaggcctcatttattttctaacctatttttctttccttaacctctgactctaccctgaaggcctgcttggagtcacatatgcagatcgcactagtgatgtgggtgaaacctgtttgcccttcttgccacagtttgtgtacctcactcctcttctgtctctgggattccagggggctgaatggcccagagaaggctcatctaggtggagtgggctcacagagcctagcatttggagggtggagattgtttatttgtccctaaaagttgatgtctgagcattccaaatcatcttcaattaatacatcgcttattttttccaagttgctcaaaattctgagcacattctcatttacatctgtatcgagttagtgttaggcatcatcatctccactttgcagatgggtgcctaaggcggggatgaatggacttttgtaagtgcagagctggagcaaagtttaggtcacagctttgccaagtcattgttttgttttcctgggagtaaaccggagatttagtatggacctggctggtttaattattgttttgggaaaaaaatctaaaactcattccaacatgtcttgaaatgaattataatgttgactctaaagtctcaaaaaaaaaaaaaagttctagtacagcagactgccttgggttaaaccttcttctaggaaggtgtcactctaggaattctttcttactgagttttcttcttttcgttgttatagttaattagagaaagtaaatggaattatcattttgtagttggtagactttaacaagcctcagcgatagtcttttaaagactggaagtgctatttgtcttttgggaaaaatagttcctaacatctggatgagtaatccaggctttccactttcactgacagcctaaatcagtcaatcagtgtcgatcagtcagtcagtgtttattgacgcccactcagggtcccaggcattccctgtcagggagagaattgaatgagatcaagtttttcattgttctatcaaagaagcttccaccataaatgtggtttgatggtgcatgctacctgctactcagcctagctgtcaaagcaacactggtaaacataaagatggctagcaattattaaatgcttactatgtgccaaatactgttttattactctatgtgatctgatatagttatatttcatgatagcactatgattatttccattttatagatgaggaaactgagtcaccaaaaggttaggtaacttgtctagggtcacagagccagtgagtgggggtactggaatttgaactcatgctatctggcttgggagagcccacttttagccactggatgctctactgatgtctcttttggaattcactgtgattttcaaaatggtatctccagaaactcctccaattaatccctgaaatgtaagggtagtctctttttcttttctagaaacctgatcctggcaaaatgattagctttaacagtaggattaattttttttaaatgtatataaaaatacttgtatgtaagaaatcctaaaagggtatttagtgaaaagtaattccctctcctattcattttccccacctagaggcaatcaccctggagttttatgtgtgtccttctagaaatactgtgtgcacatataagcatttattataacatgtgaattttgctctccagctttttgtgaatatgcatgtttatagcagtatctattcaccaggaccgcatttagctttgcaatattcggtctactttgaacactgaattttctgattatttctttcccctggagacgtcaaagaaaacatgaacactagccttttgaattcagggttttcttttcattttattttcatttgttcatgtgtttgtatttacatacattgtgcctgaatattgtacatgtatgtgacagttgtgtactgtagaatcaaaaactaatgtctgtgaactgaactcttcttgaactttttgttgttgttgttattgttgcttttggagatagggtcttgctctgtcacccaggctggactgcagtggcacaatcacagctcactgcagccttgagctcctggtctcaagcaaccctcccacctcagcctcccaagtagctggggctgcaggcatatgctacctgactaattaaaattttttttttttttttgtagagacagggtctcactatttttactagtttgcccgggccaagccagtgttgaactactggcctcaagtgatcctcccaccttggcctccccaaagtgcatccctacaggcatgagccactgcactcagcctgaactttcgaaatttattttaagggcccacttttaaatgcttcttttcagcagctaactttccagcggatgcttcatgtggtgccagccatacagatacgcttttagaacttgagctttggagaagcttatgcttgctttctgctctctcctgaggtcatcagatacttcccttgttcagtaacaaagaaagtgagactctttctgttacctaataaaaggccagtctgtccatttcattttgggtgctattaacattgttgaccatttacaatgtcacaggccctggcactgagcacatcatgtgcagcctcacttaattttcacaccagtgccctgaggtttctagaaaagaggaagggccccagtttaggtggcagtacttttcaatttggaggcaggagatcccagttttcctctgacctctctgagcttccgtgtttttacctctaagacagagagaccaatctctgttcagccaccttagaggattgttttgagggtctataagatgattgagggaaagctctgaaactggtaagagttaaatgtatgtttgtgttatgttgatacgagattcctctgagatgctctttagtccaggcaggtttatggctcacacagcgttcctagggtctcattcttctgcacaggcaggcagctcccgagccagccagtctggacccaaatgccacctgtgctcttggctggtcttgcgcattcaccgaggctcactgtaccttggtgttcccatttctaaaataaggcctgtagtaatccctacctcactgagttgttgagagacttcatgtaaattgtttagcagggagcctggcacagaacaagagcctagcagaaaagtaagctgttgttactttaagcaaatatttagcagcctaaaatggtggctttaccagtttctgtaatggttgaagtgatgacagaattcagccaatcccacccatagtttttcttgctaataaagcagtttgtttctaagtgtgttttgatgcgtataattaatacttcctgtccttgatttttggctgaaaaatgtcttctcttcctcgcaccctctgttattcccgtagtgaatattttcattgtggaagagaaattcccattggctcatggttggcattttatttctcctgtccagagacaatatttccacagcctcaaacgtgaaaactgaaaatctggtgccacttaccaccttgtaaaatcaagtcattgtaattgtgccagtataatcattgatctgaaataaaagcagaaaataaatcaatgggtagctttcttaaatacataagaactaaagatcaaatgggatattggaagactttaacttttcctccataatggtggatcttaattaaacacacagaagaacaatttataaaataaattcataggtttgtttgttcttttttagtgtcaatttttaaaactatctcttttttaattaaaaaaaatagagatgggtctcactatgtcgcccaggctggtctcaaactcctgggctcaagcaatcctcccacctcagcctcccaaagtgctgggattacaggcatgagccactgcacccagcctaaaactgtctcaaaagtagacagcataatgaactcccatgtacttatgatgtggctttaacaattatcagcttatagtcagtcttgttttcttacataataaagttacagtttcaaagccattaggaagaatagcttgctaattataattacttagttttgatagtgtaactttgtcctcagatgggtagaatcgttactctggaacaggggtgtccaatcttggcttccctgggccacattgggagaaaaattgtcttgggccacacgtaaaacatactaacgatagctgatgagctaaaccaacaaaacaaatcccacaaaaatctcatttctttttttttttgagacaagagtctcactctgtcgcccagactggagtgcagttgcacgatctcagctcactgcaagctccgcctcctgggttcacgccattctcctgcctcagcctccctagtagagggtactacaggcgcccgggggtttcaccatgttagccaggatggtctccatctcctgacctcgtgatccgcccacctcggcctcccaaagccctgggattacaggcgtgagccactgcaccgggccaaaaatcttataatgtttttaagaaagtttgcaaatttgttaggccacattcaaagccgtcctgggccatatgcagcccgtgggccatgggttgaacaagcttgctctagaaattggttttcaggccgggcgcggtggctgacgcctgtaatcccagcactttgggaggccgaggcaggtggtcacctgaggtcaggagttcgagaccagcctggccaacatgctgaaaccctgtctctactaaaaatataaaaaattagccaggcgtagtggggagtgcctgtaatcccagcactttgggaggctgaggtgagtagatcacttgagaccaggagttcaagaccagcctggccaacatggcaaaaccccgtctctactgaaaatgaaaaaaaaaaaaaaaaaaaaaacttagccaggcgcagtggctcacatctgtaatcccagctactcaggaggctgaggcaggagaatcacgtgaacctgggagctggaggttgcagtgagcctagatcgcaccactgcacttcagcctgggcgatggagtgagactccaactcaaaaaaaaaaaaaaaaaaatttcaattggcttctattaaagcttttttatgtttgtcattgttttctagtaataacaacaatccacattttttgtgagaaatataccataatatagagaagtataaagaaaatgtaaggccagacacggtggctcacgccgataatcccagcactttgggaggctgaggcaggcttatcacctgaggtcaggagttcgaaaccagcctggccaacatggtgaaaccccatctctactaaaaatacaaaaaaagtagccgagtgtggtggcgggcacctgtaatcccagctactcaggaggctgaggcaggagaattgcttgaacccggaaggtgaaggttgcagtgagcagagatcacgccattgcactccagcctgagtgtcaagaacgagactccgtctcgagaaaaaaaaaaaagaaaagtaaatttaaagcacttaaaatcccaccaccctgagttaactactgttcacagtttggtgaaattcctcctcgtcttctattttttcatagttgggaccatgcctatatactggaatgtaatataaacacttaatatattattgcgagtatattctcaaacttaaatattttttccaaaaatattttgagtggcttttaaaatatatcctattttatgcatgcagcataaactaacttatcctgtgttgatagatattttgtacttgcccttttctgtgctgttgtttaaaattagtgtatagaaataattgtgttgatcacttaggataaattcctagaggtaaatcagatattaaattctttatagacttctggttcatattccagttgccctcaatttatacacctactactagcattgtatgagagtgcccgtttctctgaaatcttacccacactggctgtcagcgtcaaaaagatgtatctgcagatttggcaaggaatttgcatttcagtgattattatcaagcgttcacacactttccatgtttaatggtaattttttttgtttttttttgagacgatgtctcactctgttgcccaggcagagtgcagtgccgcgaccttggctcactgcaacctctgcctcccaggttcaggtgattctcctgcctcaactccttagcagcttggattacaggcatgcgccaccatgcccggctaatttgtgtatttttagtagagacggggtttcaccatattggccaggttagtctcaaactcctgacctcaagtgattgcccgccttggcctcccgaagtggtgggattacaggtgtgagccaccgcacctggcctttaatgataatgtaaattttttgtgaattgtttattcgtggctttgccccattttttccatagtggagggatttttctttttcttgttggtatgtaaagtccttgtgtgtcaagaatgctctgcctcacagtttttctaatataatgacagtggaagctcgtaactggcttccacttgactgacttgctaaattgaccggcactcttcacttccttataaaacatgcctccatagtccctgtgccccatggcacatgggatggggtagccacactaccactgtctgctgctgcatatgttcctgtccacaagagccagtcatgtttgtttccaagcctggttctttcagatatagctgttgttgtaattacttggttgatatgaaaccaatgaaatgcaagtgtgaaaagagaattgtttctaggaaaattaagatgaatgctttagaaagactcagtaaaggaagataaatttaacaaattactacagaattaggtgtaagacaacagtaaatgattggaatgaattacagaaatctagaaagctttgacagtgggaatgcgtagtgaatggctctaagttctccctccatctgtaggaaattgaagctggaagtgagatgatatattcattatagggaggacttacagaagaaaacatcaagctctaatcacatgtccacatttcgttttgtttacttattttttgaaatggagtctcactctgttgcccaggctggagtgcagtggcatgatctcagcttactacaacctctgcctcctgtgttcaagcgattctcgtgcctcagcatcctgagtagttggggctacaggtgtgcaccaccacgcccaactaatttttatatttttagtagagacggggtttcgctatgttggccagcatggtcttaaactcctgacctcaggtgatctgcctgcctcggcctcccaaagtgctgggataacaggcatgagccaccgcacccagccccacatacctacatttcaaaggacagtctttggccctacagtcaagactaccaaaccaatgtacactaaatgggggtggggatcacgttgttgttttttgtttgtttttgtttgtttgtttgtttgtttgtttttttgagagagtctcgctctgtcacccaggctggagtatagtggcgtgatctcggctccctgcaagctccgcctcccgggttcacgccattctcctgcctcagcctcccgagtagctgggactacaggtgcccgccaccacgcccagctaatttttttgtatttttagtagagacggggcttcaccgtgttagtcaggatggtctcgatctcctgacctcggggatcacatattttaataaaattgataatccctaatagtgatggcgctaggtgtacttttagagccaatgtaaatagtcgagaaagggggccaaacatatgactaagcttcttctacactctaggagatgtcagtattgcaagatcctgttccttgaaattatctttgccccccgccattcagaaaaattaccaaatattgtaataatgtaatttaggacttaccctttcagagaaacagttcctgaaggttgacttcagttagtagtacagaagcgagacttgaagctcttcatggtttatgttctgttggtttatcccaaagagatgttttagagcacattcatttctgaaagttctcggtcatgtttccggaagtttgatcaggtgggttctttttctttttttaaaagataattttttttttaaagataattcagaatcagtcccacccctgagatggtattattacccaggaaagaatgcgtgaggatcctctaaatccatagagaaggaaaactaaaacaattttgttaccatttgtttggctcaagcatctggtagatccttcagttcttttcaaattagaattttcctctctttttcttttttttttttttttttgagatggagtcttactccatttcccaggctggagtacagtggcacaatctcggctcactgcagcctcacctcccgggttcaggcaattctccggcctcagtctcctgagtagctgggattacaggtacccgccactaattttcatatttttgcctggctaatttttgtgtttttagtagagatggggttttgccatgttggccaggctggtctcgaactcctgacctcaggtgatctgcccacctcagcctcccaaaatgctgggattacaggggtgagcctccacgccgggcctctctttttaagataataaaaattactaaacatcataatgacatgatttgggattactctttcagagaaacagttcctaaaggtttacttcagttagtgatttttatttttattatttatttattttttgagatggagtctcactctgtctgccaggctagagtgcagagacgagatctcagctcactgcaacctccgcctcccagactcaagcgattctcctacctcagcctcctgagtagctgggactagtagctggaactacaggcgcccgccaccatgcccggctagttttttctattttagtagtgacggggtttcaccgtgttgcccaggttggttttgaactcctgagctcaggctcaggcaatctgcctgcctcagcctcccaatgttctagggttacaggcatgagctactgtgcctggcccagttagtgatttttaaattgtagttccttaaatgagtattttggatttcactccacaatgttcttcaactgtaagatctacttgaggttatttgatttgctggtttgcaagaactcgtctacacgttgtctttatcacaaagaaattctggagcatttgagccctgttcaaaaaaaaaaggcaagaagaaacttcaggaacaaataacctatttgaccctgtaatgaataatattcacacattttctaatttaagagctgttgattgatttccaacttttagaatctgtttcagacaaaacatggaagtttagtaacagttttttctattctgtaataataattgccacaaggttaaaaaaaaaaatttacagaagaacatatttgagggtggtcgtgggggcaagaaagctggaaggacgggtggggtgtgttaatagccttgtcttgtgaagtaagtcctcagagacgctgtcctagttggaagaacaggcagtgaaggtgtgcgtctgttacggagaataggactccagtgatctagctggtacttagagaggtgggggtgatcaccaaaaaaacagctctgcctctgggagcggagaggactgggatagaaagtatttgtctttcattttaagcccttctgtacgatttgacttttcttttttttttttttttttttttttgagatggagtctcactctgtcacccaggctggagtacagtggcacgatcttggctcactgcaacctccgcctcccaggttcaagcaattctcctgcctcagcctcccaagtagctgggactacaggcacctgccaccatgcccggctgatttttgtatttgtagtaaagacaggatttcactgtgttggtcaggttggtcttgaactcctgacctcatgatccacccccggcttttttttttgacacggagtttctcgttacccaggctggagtgcagtggcgcaatctctgctcactgagacctccacctcctgggttcaagcgattctcctgcctcagcctcctgagtagctgggactacaggtgtgcgtcaccatgcccggctaatttttgtatgtctaatggagacagggtttcaccatgttggtcaagttggtctcaaactcctgaactcaggtgatccacccaccttggcctcccaaagtgctgggattacgggcgtgagccaccatgcccggctaaagcaagaaattttcattgcatattttaagcaaaggcaaatgcatatgtggatagactgttttaatttgactaaagtcatattgaatccatgaattttagaagctcaaactattggggaacaataattaccaccttggagtgaaaatacttaatttccacaagatttagtaaaggaagagttttttaaaaaccaccttaatgataatagtatgtacagatgttaagaaatgaaataggaatgtgtaatgttggaaacacaaatatttttgcttctgagaataaaactaattttttctcccaattttctcttcctttttcttttttctgttcccccctttctcttccagaagcccttcagcggccagtagcatctgactttgagcctcagggtctgagtgaagccgctcgttggaactccaaggaaaaccttctcgctggacccagtgaaaatgaccccaaccttttcgttgcactgtatgattttgtggccagtggagataacactctaagcataactaaaggtaaaagggttgtgggcagctagtggtggttgcaggagatagaaatctgggaattgcggtttgacctaccaccctttgctcgttaaaggagcagctttgaaatctggactgcagggatatccaaaacaacaactgcatgtttctaagggagtcgactctccttagaggagttcttgtacaatagccctgggcaaaaacagaacttgccctattttttatactgaaaaggacagctggacaaaatactgaacgcaatttttcccctaagaaaaagcattatttccctaaaatgtcttatattaggaacagagcacttgaataaacataattgatttataaaaactgaggctatacacttacctatctgttcagtacaaacaggaagcttcaaatgtaaacgtgaattctcatacacttataaatgcatatctttatgtggacttgttaaaatgaaattggtatttaggaatttggagatttttagtagttacacaagaatcaatgaaaaagaacgaagctggtttccaaagctgatatgtctgatttggttcctttcttctcaggtgaaaagctccgggtcttaggctataatcacaatggggaatggtgtgaagcccaaaccaaaaatggccaaggctgggtcccaagcaactacatcacgccagtcaacagtctggagaaacactcctggtaccatgggcctgtgtcccgcaatgccgctgagtatctgctgagcagcgggatcaatggcagcttcttggtgcgtgagagtgagagcagtcctggccagaggtccatctcgctgagatacgaagggagggtgtaccattacaggatcaacactgcttctgatggcaaggtaggggacccttggcagggggcgctgatgggcccagggcaggggaaccagaggtcctgctgtcggattgataaattattgcaagaaagctcaaccaagaagatgtttaaagaatctttcaggtgggagtcattccattagccttatgaagaccctttattgaggatccgttctgtgatattacaagttcctgggactggtatgattctcttattgtcttgctagagttttgttgttagcaagttacttaaaataggaggaatatctgttgggttttggacacattttttacaataagattcttcctttaaaaaaaatattttataatgatagaaatcatccccaacgagaaaaattcaaataatagataacctttcttagagcgaaagaccactttactatcccctcccccacagacgcctggcacgtgggcttcttcctgcggatgaacacattcatggagaggtgtgtggacatacgtgcatacacgcatgcagttttcagtgaaaaccgggatcaaacccacagcttaccaaacccaaagtgtggtgttgtaagggaggtggcctatatgattttgtggtcttcatataaataatccttaagagtccataaagagaagggaggagttaacattgactgaggtattgctataatacctgcatctttgcattaaagaaagggaggcataaagagatcttgcccgatgtcaacctagtgagtcactgatggaataggcttggatcccacagtttattctactgcaccaggctgtagttgaggtacagtgttgataggtggtcccgatggtgtatgtttgtttgtttgtttgtttttgagatggagtcttgccctgtcacccaggctggagtacagtggtgcgatcttggctcactgcaacctctgcttcccatgctcaagtgatcctcccaccttagccttccgagtagttgggaccacaggcgcacaccaccatgcccagctgttttttgtttgtttatttgttttgagatggcattttcgctctcattgcccaagctggagtgcaatggtgcgttctcggcttactgcaacctccacctcccgggttcaagcatttctcctgcctcagccttccaggtagctgggattacaggcatgcaccaccacacccagctaattttgtatttttagtagagacagggtttcaccatgttggtcaggctggtctcaaactcctgacctcaggtgatccacctgcctcagcatcccaaagtgctgggattacaggcgtgagccaccacgcctggccgtttttgtatttccagtagagacagggtctcgccatgtcgcccaggctagtctcaaactattgagctcaagcaatctgccctcctcggcctcccaaaatgctgggattacaggcacgagccactgtgcccagcctatattttttaaatagtatgtaatgcatgcatatggttaaaaaaaatcaaaagaacaaaatgaattacagtaaaaagtaatcgtctcctaattcacttttcctgcccagaggcaagcactggtactagttccttctagagttacctggacacagatggatggtatatagatgtttatgtggatgtttatattcaaaaaggcacgcaaatgatacatgcacgcgaatgcatcatgcttctcccgtgtgataatacaccttcgagattgttttatggcaacaggtttagagctgcctcattcttaccagtgactgtgtaccgtggatggactgtcacttatttcagtagtcccctgctggttgacttttaggttgtttccaatctttagttattgtaaataatgctgatatgaggtggctttcaaaccttttcaaaaatctggttctgctgtaagaaaaactcattttacaccaccacccagccctcacaatataacaaaagtttcatgaagtcttacctacccttactgtatgtaacgcactctgatagtttgtatttcattctgttctatttcattttttaaaaattctggttgtaatccactaaatttatttcatagactgactagtggcccatggcctggtttgaaaatgcgttgcacgtgcttctttatgtgggtgtaagtgtgtgcagataagttgccagaactgactgaaggttatgtgcatcaccaggtcaccctctatagaaattgtacaaatttgttctcccacaaacaatccatgaaagggcttgtttccccttaacccacaccaacagtttattattagacatgtaaaaacacctttgtcactctgactggtaaagaatggcatctcattatgttgaatatccatgtggcatattttgggtcatctttatgccatttagtaaattcatctttttcctacatgttagaaatataccaagtgtatatgtgtatctaggcctgttgacctctctgttctcttccattggtctgtctatccgtatgccagtaccaaacttgtaattgctatggcttcataccatgttgtggtatctgataggctagtccccacttacctttttaactttttttttttttggctgtcttcacacattcacttgtaccatatgaacatacatatacttcctttttaatgttcttatttttcttcacatcccaaagtcttctggctgaaatcctattgcccatatctgatgctttccaccactgcagaattctttagtaccaacactgcagtgtgcgtgacggacaaaagagcctgttatccctgtgtgactagacgtgggcctgtcagcttgctttttgggttattgttcttatcccagaggtggagctgcgttcttccattctgagggacgtacttcaggacattgggccctttgaaagagccttcagaccacaagggtacctttctagtgaatcagaacaccagggtgcaccgcccatggggggtgattttctggagcagacagcttgcttcccatgtgtgctatttatccaaggcaagtcatgctgcaccgagatagtcacttgaggtttgcaccgaacaggataatggtttcttttccctagagctgtttaatcagcaaccttggaacagatgcaggcaggcatgatctagtgtgacagctcattagctaggggttgatctaaaatactgttcaaatgggcaaggaaaggcctgcgtatgggatatgtgatttgcagaatttgagattcatccaaagagggagaatctgcctaagatgcctctgtctaaaagctagtatgtgccaggtgggtttgtttcattccaggtagagcacagggagcttatgtgaccaggcagtgtccaccattgggcaacacatcacacttcccttggcgtcttgcctcctccctccccgtctggcacagactctcccatcagccgtttgggcacctggggacttctgagcccacagcgtcatccagcagaccgtctgcggaggttccttcctgtgagggccgcactcgagggggtgtattgggtgggatcgtatcactggaatgagtgaacatcgttagagggagctcccacagctatgcgtgtgaccgtgtggctcgccgctgaaaaatgctgctcacatagcagaacttcgatgcaatcctttttggatttctaaggggaaattttaagaccgataggaggaataggctggggttgaataagtttggttcttatttttaaattagctcatctttagaaaacaactgaatttagaagattcttctgtaaggccccaaaggatttctttctgcctccccgctcttggctcttatttgtgtctctcctcgtgttctgagcttttcagcagcccttgtgggtcatcagccgaggaccatcagctcggggcccagagctggggactgggagttatgagctggactcttgaaggggccaatactaaaccgagccgttgccatttcctaggagccttgacaggctcaaacatctctgggtacccggggatttgactgtcattgttctgatcctttcccaaagttgtaaccctctgttgacatagcggaattgaagattgatttttcttcaccaccttctgcctaaagttcttagttctgaatgtgtccacacctcattgacttctatgagatgcccctgtcacgttcctcgattccttctagtccttaatagagtctttccttttcttgaaagaaatttgcccagttgacatttattttcatcgtctgctgaagtgacagatccaaggccctaagcttcagcagagttgcaggaagggaccatttacacagcctcttagatgtttaaggtttacccgccctgacagtggctcagcaggcgtaggcctcctggtgaaaagccgagcacatggctaacctgctctggtggaggggctttggaccgttcttgtgtactgcgaggcttgccttcctgctggtgtgtgagcagctctcgggggaacttgcttcctggctgagcaacctgtaaacagtatgtctgaggtgggactcccgggcccaaagcagccaaaggttgcacaagtctaagctccgttaggcctgtcagtgtggctgtcaaaagaaacgctgtttcttttctttctttcctttttttttttttttttttttttttttttgagacaggctgtcacccaggctggagtacagtggcacaatctcggctcattgcaacctgcgcctcccgggttcgagcgattctcctgcatcagcctctcaagtagctgagactacaggtgcccaccagcatgcccggctaatttttgtatttttagtagagatggggtttcaccatgttggccaggctggtttcgaacgcctgacctcgtgatctgccctccttggcctcccaaagtgctgggattacaggcgtgagccactgctcctggcaaaatgctgtttctaagcgtttctttgacaagtcccatccttcaggttcatgcatgattagggagaggcagcagccctgactgagcacctgagtgttcatggaaccaggtgcatagcgtaatgacatgccattcatgacactactttcttccctgaacatgccatgaattcctgatgattacacagttccccaacaagtgctgctcaaaacctggaactaatcagaaggaagcaccagccttgactgttagtgggacacggggaagatggctgtgaaccgaatatgcggtgcctttgggggagaatggttttagtatttagtaagtgtcagtatgtaagttttatgttgaaaaatgaactaagtcacaacaaggtctataaatttaattattgaaaaggataaagttgggccattcagtgaaacctcctgtaactgaagtctctaacacagtagccaatgggggaatcaaatgagcccaagaagaaattctgcgtaaactaggacttaggggagcccttagcattccactttggagtgaaggaacccgatccgccagttggggaacgctcctttgaggcccatgtgcttcctgctccgacgggagagagggataatgagacttgctcccaggtgccctgccctggagcccagcaggccacacgggctctttgactctgtactgtgccagtgatttccaagatgggagtggtgctctgattgcaggaatgtcttcttggaatggcttttctcacttctctagagtccttggtagggagcacatcatcagctgagctaacgtgagaacaggggttggagcacttgccaccggcagtgaagtaatcggacagctgacagtcttttccagagggtcggggattgggagctgaccccaggtcccgctccgttttctttgtgtgcagcacttgtgttggtgaccagcagtgaagagagtgcgtggacgtcaccgtgtggttatgaagctaacggcagccctcagcggtgccgacttccgctccccgacacattcctgtgtgcacgttcgtgggtctgagcgtgactcatggtgtgtgtccctagagcagttcactcagaggcttctcttccgtgctctcaagaataaaagcagggccgccacatcctgataagtcttgccattcagcggtcctgtcttgcagagggataagccagtgtccccaggccacagtccttacaccttgagcaagttccccagagtgaagcaatctttctagacaagttttgcgtttctcagaattttattttagtgatattgttaccaaaagattgtaaccccaaaatgtgtgcctttggcttgcctgttttaggaattcacttgtgttatctccccaagcaaaacaaaagaaagagaaaccttcctgttgacgaatcctttttaccttcttgagagttgtcaatgggactaacttgtatatttctttgctaccttcttttaaaaacatttttcttatttactattacagacgtatagtaatggtgcctgacataacccacagccaaaggccttggccttgctgtgtgtatttcaggctttttcttcccttttctttttttttaagtaataagatattacagttatagctgaagcctgatcctgttcccttttctccctctcgtcccaagcatcaccactgtcccaaatctgctccttcttcccacatctttgcagtttgggcaagtcttctgaatgcctagtcatgattttaagtcttctttccaccttcagtgatggttggctaccctgagcaagccagtagattcagttatgtgcctggagtccagatgttttatgtggatttttcatgtggaattgtttttggtaaggaagtattcccttgccacaccaatgaaaagagaagaaaacaggtagctggcacccactgcattgttgctttctgccagcctgctccttctccttcctctccagctctgttgtgtccagatgcaaactctacatgcagggtttgaccctaggtcctcacctgctgtagctctcacacggggaccgaatgctcttgtgtcgtaaatccttccttttgcttcctcgtgttggatgtgtttagtggttttcatcttctggtcactatttcattctaggtttatcccctttaaattataaattaaatgaattcttcgcttttcctaccagcaactacccaccaagttctaccatgtgttaatttaatcaacagttatttattgagtacttattacatgttgatttcctgttctcaacattggaatgaagacagcttagggttctgctttcatgaagcttgcatgctcttaggtggagacagacagtaattaagcagataaacaggaaattatgagctagtagtgggtccattgctgagaagtaagacaggtggtaggatgacccgtgccgtgtgatgactttagattgggtggttggggaagacttcacggaccttaaaactggccttggaacgggaagcgagaactgggcacggaagatgagggagtgggagatttcaggcagagggagcagcagcaggtacagaggccctgaggccttttattgtgtctttttgcttgagcgagtaacttagagcacacgtagagaaagacagcagaagtgatcttctaaacactctgtcctgtgtggagagctccttatgtgagattttgctgtgtagtgaattaaggctcagccaaactggctcacgtgagctctttgagcttgcctgtctctgtgggctgaaggctgttccctgtttccttcagctctacgtctcctccgagagccgcttcaacaccctggccgagttggttcatcatcattcaacggtggccgacgggctcatcaccacgctccattatccagccccaaagcgcaacaagcccactgtctatggtgtgtcccccaactacgacaagtgggagatggaacgcacggacatcaccatgaagcacaagctgggcgggggccagtacggggaggtgtacgagggcgtgtggaagaaatacagcctgacggtggccgtgaagaccttgaaggtaggctgggactgccgggggtgcccagggtacgtggggcaaggcgtctgctggcattaggcgatgcatctgcctggaagtctacctcctgcctgctgtccgagggcttcattggcgccacggaattgacttttccgtcttatatcattcctgtgtctttgtaggagtggaatcattctcatagtccgagtgtgtttccacatatggtgagagctgacaagcatggaggggttttggtgtaaaaagattagtcatttggagaggttttctcattttatggcaaggttcttttaaagccgtggatttccatgctgttcgtgcggcatggagatcacttcctaccgagagttaaggaggaaaaaaagatctctgagttttgaaagaagatttaaccaaaatgcatttgactcttctgtggatttttgttggctgatttggaaggcaggtgccctgggcatccccagtgggttccaattctgcagctgcccagactcctgcaggcagaggtggaagtgtccccgctagaaaggcatccaggaaactcgcttttgaccaactcagatacagtctggtctttcttgttaactgggactttaccctctccactaatgaatagtgtttgtagtttccaggcaggtttttttcttcttttgaagttctttgaaacccttaggacgccaagggaaggaagttttcattttcagccctttgcattcttcaaaatgtgatccaggcttttccctgtggcgagggtgtcccctagtgttgacttacattatttccacttgttttaaatgaactttgattaccttgacctgtgcacagaaatcaagagaggcagcccctttttagagctgttagaaaagaactgaaacatccacctctgggaaaaatagagtttagtttgtgcatgtgtctcagaagtcaggtgcacacattgagactggtgcagccacatgcctgccttttagggactccttgactgacctgatgccttcacccaaaggcatagtgaaatgggaagtatgatttctgactggtatgaagtggctgctttagagaaaagatcacattctttagtcctagaaaccaaaggtggcttcctgatgctcttattcagcacgtgcctgtctttgaggcaggactggcactggggtgggggcatggtttggggttaccttaaggaccctggatatttctcagataggactttttcttttctttttttgagacggagtcttactctgttgcctaggctggagtgcagtggcatgatctcagctcactgcaacctccgcctccccaaattggcgattctccttcctcagcctcacgagtagctgggattacaggcacccgccaccacacccagctaatttttgtatttttagtagagatggggtttcgctgtgttggcctggctggtctcaaactcctgacctcaagtgatctgcctacctcagcctcccagagtgctgggattataggcatgagccaccacacccggccctggactttttcttaattgaataaatatttatcaagttcttcacttctatttgacggttcctgggctcaacactggattagaaaatgaatgggacagagttcttcatctgagacatagggtggtccaggtagtaggaggaagaaggattgcagcgcagcagtcctcgggacaccaccagggggtgaacgaaggagggacgggggagctgtgcaggtgccccagctccttgggttgcacagggttgaagaccagacccaagaaatggggccttgaccagctcagcaaactgagaatggcctagatttcagcacactttcaccaggatttgtcaaatgaaggaagattccaagcgcaaaataccctagatttcaaccagtaaaagcttgtctgaaaacttccaagatcgggttgtacaacttgacatttgaggaaacgctacttcagtagatggtgctgtggcattgttttctgaacaactgaaggaggagactccagagaagggtacctgctggagacctgtgtggtttgtggggtgggtttcttatatcactgaatctaaagtgggtgcctttcagaatgtgctttactaataatgtgttactctgcttttaattatacttctaataattttccccaagagcctaattaacttacgatctcacagttggtaaagaattacaggatgtcattgcgtggatttctgtgggcagtcacccggagtggtatctaattagggaaaaggcagtatgtccctttctggaagtgtgttaactgaaaatacggtactaagcaactgctaaataaattagccctccttcctcctggccgtgcgcagaaacatccctgcagtatgttgcctatttgtcaaataagattagtgtaaatatggggcatttacctttgctatagaagctgaaattgccaggcacggtggcttacgcctgtaatcccagcactttggaaggccaaggctggtggattgcttgagcccaggagttaaagaccagcctgggcaacatggcaaaactctgcctctacaaaaaataccaaaaatcagccaggcgtggtggtgcgtgtgtattcctagctacttgggaggctgacatgggaggattacctgagcccgggaggttgaggctgcagtgagccgtaatcgtgccactgcactcctacctggggagcagagtgagaccctgtctccaaaaaaaaaaaaaaaaaaaaaagctgaaatccttgagtggattctaaatcatggcagtggctaacattcagcttcatcgtgcccttgctgtgtgcctggcagagacctctgtgcttactacatgtcgcatctcattgaatcctcacaaccttaagatccttccaggttgagcatcccggaccctaaaatcccaaatcctaaatgctcccaaatccaaaactttttgagcaccggcatgcagctcagaggaaatgcatactggaacatttcagattttggattttctaatttggagtgctcatctggtaatatagtgtggatattccccaatctgcaaagatctgagctccgaaacacttgtagccccaagcctttcagttaagggacattcaccctgtatcaacattttaatgctgagaaaatggaagagagagaggttaagtgactgacctggcatcacacagccaggagtggcagcatcaggatttgaactggggcactcagctccaaagctcagctcttcttttttaaaattgaacccagattcttatttctcaaataccataaaatatttacataagccacagttatgccttttaaaaaaaaatcaccttttccccccactctcccatttacttcctttgcagtttgtggctacgatctaccttcctcttcaaaacccttgaaaaatccttgcagccttgcccaagcgtccttccctcagccgatttttgggcctcagtttcctcccatccagcctgtttcctatcgctggcttctccaagggcagagccagagtcctcttttgccagcagggggagcaagggcctacttttaaccgcaactccatagtgaacaagtcaagcaaccttgggtcattcatataccttccaggcagaaggaagacagaagagaacaggaaaaaagcaggacactaggctgacccctgcagatgggaagctggaattacagcaaaggctcattgattgggaactgcacccttgaattttgatagtattgggcaggacatagtcttgctatctgtgttaaagggaggacgtgcttaagaaaaccaacagtcaagtacaagaagctctaattttttttgaggtgggggaacggggtctcactgtgttgcccagctggcctcaaactcctggctcaagcagtcctcccacctcagcctcctgagtagcagggatcacaggcttgtgccactgtgcccagctaagaggctgcaattttttaatgaactgtattcagagtttgtacatcagtgtcttttttttctatgaatcagttctctaagtaatagaatttggaaaagaccgctggtgatctagctgtggcatttagattgactcatgagctaactgacaaatttactacttaaacagtggaaaataatgtgcaggatatatttttttgaataggttgtcccaccctcgagttctgtgtctttcctgagtccgcatatgtgaaccttgttttaaccaggtgacagcatcccataggcacggatctctgtcttctgttgtccacatcatgtgtcttggcagttgttccttattgatatacataaggttgtcttgtttttgtatggatatattttaacatgtaccagtgttcagtgggcctttctcttatttccaatattttgctgttctaaacagcagcacagtgattcccctcatttgcatgtatgtgaaactatcctggtgggtccgcttccagaaactactggatcagggaccatgtgcatttatggccttgaccatactgccagagtaccttccaaggagtttgtgtcatcaatttgcactccccagtggtgttgagagagtgcctgtttcctccacccagcacagtgtgtttcggttttatttctcccaggaaatgggtgttagttggggagctccagaaagaagccgagaagaagggcagtcgtacccttggcagttgtacgcagtggctctctggccgcacaaggagggctcggagcctgctgttgccaggttgcacttgctcttgcaagacaggcattccttgcagtgggttctcctctggccagggagatgagttctgggggctcctctacgaggtggtctctcctgggctttcctctcgagcttcaagtcccacctctggagtgtgaatcgccttcctcagtctaactctatccctccagtggtttttttttttttgctttttgtttttgtttttgtttttttgagacagagtctcactctgtcacccaggctggagtacagtggcgtgatctcggctcaccgcaagctccacctcccgggttcaagcaattctcctgcctcagcctcccgagtagctgggactacaggtgcctgcgaccacgccggctaattttttgtatttttagtagagacagggtttcaccatgttagccaggatggtctcgatctcctgacttcatgatctgccctcctcggcctcccaaagtgctgggattacaggcgtgagccaccacacccagcagtctcttcagtgtatttagctgtgttgatcctgattcatctgatgggtgaaggaatattggaaataaggataatccctgtggtgtttcactgtgcctgtaacctctctcacctagcatttggttaaccagaaacagatgtggaaactgatctatctgtagataatggccctgctcagggagggggtccctgctgagagcgagacattgaaagcctgctacacagaaactgctggaaggccaagccatttcttttttctttttctttttttttttttttttttttcagacagagttttgcccagtagttcaggctggagtgcagtggcatgatctcagttcactgcaacggcctcccaggttcaagcaattcttctgcctcagcctcctgagtagctggcattacagactcctgccaccacgcccggctaatttttgcatttttagtagagacacggtttcaccatgtggccaggctggtctcgaactcctggcctcaagttatctgcctgtctcggccccccagagaggccaagccatttttaaaaacagtgttctttttcatgctgtagaatacctgtgcttgggggtgagcaaaaaggaggaaactgattagaaaatacctatgagggccgggtgcagtggttcatgcctgtaatcccagcactctgggaggccgaggagggcagatcacaaggtcaggagatcaagaccatcctggttgacatggtgaaaccccgtctctactaataatacagaaaattagctgggcgtggtggcaggtgcctgtagtcccagctactcgggaggctgaggcaggagaatggtgtgaacctgggaggcggagcttgcagtgagccgagatcgcgccactgcactctagcctgggcgacagagcaagactccgtctcaaaaaaaaaaagaaaatacctgtgagatgttgagtctgggagaatgtatctgtgagaagacaaacaaccctagtattcattaaagaaccagcctttgttttctacaagctatctgttcggtctactcaggaatagagataaactgccttaatagtaataaaagcaagcaccgctgagtgagtgctggcctcatgccaggaactgctcttggcactctgtgcacaagggagatactgacattctttctgttgtgcagatgagaaaacaggctcagagaaggtgagtaacttaccatggtcacacagcagcagagctaggtcagtataatccacaagtcattctcttaaccgctccgccgtaccgcccagaatgttcatctgcatctgggccagcctcgtcagtccgtgcaaagaggccagttgacccatctccctccctaacaagcacagaagagaccaggctgaaaattcatagctttcactcaaagtgtttccttcacctcattcatctgagttagctttattttactatataaagagaattttcttcagcaaaatgataggaatttttttaatgaaagtaaaggaatgtcacagaattgcgtcagggatatttccagtttaacacaactacaaacgtaggctgttttgttgttgttgttttggttttctattttgagatgaagtctcactctgtcgcccaggctgaagtgcagtggtgcgatcttggctcactgcaacctcctgctcccgaattcaagtgattctcctgcctcagcctcctgagtagctggaactacaggcatgcgctaccacgcctggctaatttttgtatttttagtagagatggggtttcaccatgttgaccaggttgttccggaactcaggtgatccaccttggcctcccaaagtgttgggattacaggcatgagccaccacactcggccagctgttgttaatagttaaaattataaattggacaaggtctgattccagcagggggagacaaattcacattgatttttctataagaaaaggaattatttgtactttcctcccttgtgtgtttgtgtgtatgtaagagagacagatgagaagagggctgcctttgagagccatgttccttttgcatgtacatacctctcaagattattacatgggtcttttagaagagggtcagtagctataaaagcaaatgatatttatgaaatgatttcattgtatgtggtttattatgtagtcttcaaaacagaaaaaccccacttgcttcgaaagcttcctttgagagctactttttaaccatattgttgatcaagcaagattcttaaagccccagtcctatacgtgagcagcattgaatccccggatactggcaggcgttcactgtccagcctttgacattagcatgtcaccctggtaaatcagagcactccatgccaaaaaacagcatggtctgctgagcacattaaggagcagagagggctcagaagaattaaacggccaatggggtggtgacagaggtgagctctttccccctcggacagcttggcatggtgactaccaatgaggtttaattgacattaagagcagctcaccatttttaaagagcgataaattgtttccaagtttcagcctcacggagccctgagctaagagataatgggctgacacatagcctcattggtcacgcttcacttgtaaacaggattggccaaagcaagaaggctgtaagtaaaggttggcccgtcctctggaagcctcccccacagcagggtggggaactggggcagccatagcaagcaggaccatcaggacacggtgtctcccaaacgggccggaacatacaaggttctacgtttaatagaaagttgatcaagccttcctctttggggagcctaatttttaagccattcactctctgttcccctgcagtcttttctctccaaactctgttgaaacttggaggcatctcgcttcctcctttggcctttgtagccaggttttcgcagcaaacagaccatatcatttaacacccacctgcttcttgttctgatagtcagttcagtagacagtagcattttttaagtcaaaaagaggcttagtgatgtaggccaaggtcaaggctctgtgtcatggggctctccccagggctcagtgccacggcacttcagacttgaccccagactgaaaagatgagaggacctgtagaagtcacggcctgtctgtcccgggcccatgctcctatctttttctcccccttggcatttagataccatggacttgttaaaatgtgacatgtactgatgatccttatgaatttgttggtaggggagctgctggtgaggattattttagactgtgagtaattgacctgacagacagtgatgactgcttcattaagagcccacgaccacgtgccagaatagttcagcatcctctgttgctactgtactttgagacatcgttcttctttgtgatgcaatacctctttcttgtcatgagggtctcttcccttaaatcaggtacatttcagattcttcaggtgatgttttttaggctgagtgtgttagcaccccttggaaaccaggttccctggggaaagtgtgtcacgtttgtggtgtttgcccgtatagctctcccacacccccacgagctccaagaggtggggaagcacatgtggcctgcctagcaggcaccagaagcaggttgtcggcacatgcaagccagctttgccctgttgcctgggggagaattgaaaagtttggccccaaaggggaaaattctttctgccatcaagttgctggtcagctgtcatggaacctgtctgcagcaatgtggctgtcacaaaacgcagcccaggacgagtatgcgctgaagctccattttgcattaactagtcaagtacttacccactgaaaagcacttcctgaaataatttcaccttcgtttttttccttctgcaggaggacaccatggaggtggaagagttcttgaaagaagctgcagtcatgaaagagatcaaacaccctaacctggtgcagctccttggtgagtaagcccggggctctgaagagagggtctcgcgccgcacccccagggtgacacaggcgctggggaagacgcacgggcggctcactgcacaaaacctcgttggaatatttgtgctctgccgacgttcagccgcgggtaaaatgaggcctgtatgggatgggtgtgtgcgtgtgtgcacatatgcacatgtatgtatgagagggagaatgtgattattttaagtggatacctaaaagcagtcaaatgcaaatctgaaattagtttctgaaacttgggcattttccagagttttctcactgaagtgattctgtaagtagacacataaccatcagacctaaccattcaggggtaaactgacggtggtgaaggtcatttgaggtggggccaggtctgcgtctgaattctgtggcagcctctccctgcgtaaattcaagttcactggcttgagaagaagaaaagagcctggccatgtccctcccacacgagcacagtctcaggatgcaggtgcttgggaccatgttggaagttgggcccaggactgaggagcagagtcagaatccttcagaaggctttttctttagacagttgtttgttcagttgggagcggagccacgtgttgaagtcctcgttgtcttgttggcaggggtctgcacccgggagcccccgttctatatcatcactgagttcatgacctacgggaacctcctggactacctgagggagtgcaaccggcaggaggtgaacgccgtggtgctgctgtacatggccactcagatctcgtcagccatggagtacctggagaagaaaaacttcatccacaggtaggggcctggccaggcagcctgcgccatggagtcacagggcgtggagccgggcagccttttacaaaaagccccagcctaggaggtctcagggcgcagcttctaacctcagtgctggcaacacattggaccttggaacaaaggcaaacactaggctcctggcaaagccagctttgggcatgcatccagggctaaattcagccaggcctagactctggaccagtggagcagctaatccccggagtaaggaatatttcatttttgaaccattttgggctaagtggaatattaaatgaagttcataaaaggcgtccttcctaataatcacagtcccctctgaaagagagtactcattgttcctccggggccagcgcccagcagtaatggcctcttcctgggagccgctggcattgcttttacgcaaactcatgggaacaaccagtacatggcttttgttttttagtgtgtgtgtctttttttcctgctttctctttattatcttttcattctccacttaacttgctgtcctctgattcagggatgtttccacaattgtcagaattgtgtatgtggaggtctaaattaagtgtctttgctgttttaaaccctgaagtgttttgaccttcaaatgtgccacaattatcttggtcttcaaattctttgctggtggaaatggcttcccagcaaagcgacggcctgtgcaggacagagcctgatgggctttgctggcgtcttttatacgagatgttctccacaccaccactgtgacctttcctacccaattagctcaagtatgaaacctctacatgagatttcatagcaaggaataagggtagcatgtgtgaaatgctggcggctccttgtaagacagattttctatgctccatgagagcctgatccagatactcctggctttcaggaaagtgaatcctctgatgctgcaaattgagattgcttgacttctggtttgcctggcacggccgggtccgttccttcttcattcaagcgaacttaaaatgctttatcaaaatcctcttaggcacaactcttctgtatttaatttcactcttgttgctgacgatcaggctatctcacgcagccatcacctcaagctgctgccccctctcattccgctcttcccgtttgccttgtgatttcatggttaatgttcatgaaccaaagattagactcctacctccctgggagaatcaggaagtgagaggaagcagattatacaggagagagttttttaggatacatttgggtacacctcaggaagaaagagggaagtaggaaacacagtttgggtaaagaatgccatgggctttgttttattttgtcccatcaagtctgaataggacaagtggagatgcactctgatagaagtttcttgcaatcaaggactgggctcagtgtttgtctccgtgcctggcatagagtagcaataactgcacttactattctcgacacttcaatcaaagcacttagcatattaattaattacactcacagcaaccctaagaggtaggtgccattattatcgtcttcattttacggatgaggtaactgagtcccagggtaattaacttgctccaggtcatgaggccagggagcccgctcccagcaccagcctctccccatgttgggatctcagggtgtgtttgctgagaggctggcactgtgttaattgccgtgggcattaatacaaacttccagggcattggactcaatctttccattgtcagcattgcacctttgctcagcagtggtggatttgtgaagtggaaggttggccaggagctctcatgggtgaacattttcctttcttagagatcttgctgcccgaaactgcctggtaggggagaaccacttggtgaaggtagctgattttggcctgagcaggttgatgacaggggacacctacacagcccatgctggagccaagttccccatcaaatggactgcacccgagagcctggcctacaacaagttctccatcaagtccgacgtctggggtaagggctgctgctgcactgaagtggtccttcctgactacaggagggtttttttctgcctctttcttgctcttccctttcttttcttcctttctttttgtttttttgagacggagtctcactctgtcacccaggctggagtgcagtggtgcaatcttggctcattgcagcctctccctcccgggttcaagcgattctcctgtctcagcatcttgagtagctgggattataggcacccgccaccacacccagctaatttttggtatttttagtagagatggggtttcaccatgttggccaggctggtctagaactcctgacctcaggtgatctgcctgccttggcctcccaaagtgctgggattacaggtgtgagccactgtgcacagccacccttttttttttttttttaactgtgtatttggcctgaggtccaaatatggtgcacagtgtatctgctgatctgttaagtctcctctataagccccctctccatgtctttatttcccttgctgtttattgaagaaaccatccttagagtttcgtacgttctgggttttgctcattgtctcccatggtgtgatttaatatgttcctctgacttcagtattcctagtaatgggtggctggatctggaacggcctcatcacattcaggtttgactgtttctcttttagtaagagtggatcaggggagatggtgtgcccttccatcagtagatacaaaatgcttcatttatttccttccttcctttcctcccctctccctcccctcctctcttctccttctccttccgacggagtttcgctcttgttgcccaggctggagtgcagtggcacgatcttggctcactgcaacctctgccttctggtttcaagcgattctcctgcctcagcctcctgagtagctgggattataggcgcatgccaccacccccggctaatttttgtatttttagtagagacggggttttaccatgttggccaggatggtctccaactcctgacttcgtgatccacccacctcggcctcccaaagtgctgggattacaggcgtgagccaccacgcctggccccaaaatgcttgatttgctatcgtttttttgtgggggtttttttttgagtaatttttggcagttactgatatacagtgcctagatccaatagtttgctaggtattgccaggtaggaattctctaattctgtcattcctgttaagttactagtggaaacttgtatgaggagaaacagttcctcatctgtgtggttactcagtggtacagttcatgtaggaagagcagggtcaattcttgcttctttgtttttatttaccagtttttaaaataacaaattactttttcttttttttttttggagccagagtcttgctttttctggggtacaaagtacaggctggagttcagtagcatgatctcggctcactgcaacctccgcctaccagattcaagcaattcttctgcctcagcctcccaagtagctgggattacaggtgcctgccaccacgcctggctaaatttttttgtatttttagtaaagatggggtttcaccatgttgcccaggctggccttgaacttctgagctcaggcagtccacctgccttggcctcccaaagtgctgggattacaggcgtgagccaccatgccctgccacaagttggtttcttttttttttttttttttttttttttttgagacagtctcactctgtcgcccaggctggagtgcagtggcgcgatcttgatcttggctcactgcaagctccacctcctgggttcacaccattctcctgcctcagcctcccgagtagctgggactataggcatctaccaccacgcccggctaatttttttgtatttttagtagagacagggtttcaccatgttagccaggatggtctcaatctcctgacctcgtgatccgcccgcctcggcctcccaaagtgctgggattacaggtgtgagccaccgtgcccggcccctaatttttgtatttttagtagagatggggtttcgccatgttggccagggtggtcttgaattcctgacctcaaataatcctcccacttcagcctcccaaagtgctgggattacaggcgtgagccaccgcacccagccttgtcctggtcttctgatgataaagagcctggtaaaatgtcagagcctgggctgctgctggggccatcccttctgaggtctgctgcaaaggtaactgattttaaatgtagtgtagtgaaatgctacacatcttgaacagcctttctctttcggttttctttcagcatttggagtattgctttgggaaattgctacctatggcatgtccccttacccgggaattgacctgtcccaggtgtatgagctgctagagaaggactaccgcatggagcgcccagaaggctgcccagagaaggtctatgaactcatgcgagcatgtaagccttcctcagcctgttctcacgagtatatgtgggcattccaggaaattcaactgtgcaggagtgtgtacacaaagttgaaagtttttccatgagctctctccattccagttcttcagatgcagctaatgtagccatttgatacctattgacctttatttacagataaatagtatgtgcgtgacttgtcttttaaagcaaaaatggtattgatagataccaaacctgggtgtattcctaaatacagattcctgggccctgctttcacagacattctgctatagtagctaagctcatgaggtgattttttttttttttttttttgagacggagtttcgctcttgtcgcccaggctggagtacaatggcgcaatgttggctcacttcaacctccacctccctggttcaagcgattctcctgcctcagcctcccaagtagctgggattacaggcatgcaccaccacgcccggctaattttgtatttttagtagagatggggtttctccatgttagtcaggctggtctccaactcccaacctcaggtgatctgcctgcctcggcctcccaaagtgctgcgattacaggcgtgagccaccacgcccagctgcgaggtgatttttatctggtcgttttatactgattacatatgtgttatctgtactatgcacacacaggatgttttcatatatcttataaggtatttatatggccatttcttacactgttttcccacacatgtctttccacgtccatatattcagatctctccctctccctacctcttatttatgtatagctgcccagtactccatttcactcattcatccggtcctcttttgatgtgcatttggttgttttacacatttgtttggtttttgcccttataaacaaagcagaaacaaatattcatgtacacgaatctctgggcactttggctggtatttctaaaagttgaactgttggttccaagaactgtgtgggttttaaattttgatacattttaccaaactgttaaaaaaggttgtgccattgtatgctccagtcagacgcatatgggagtgactgttcctggtccccagtactaggctttgtcagtctgtttagtcctcatgttagtctcattttcatgagaatttctttacttcagactttgataaccgtgaagaaagaacaagatagaaggtgagctgtttggcttagtaattttctacacctactagagcgggactgggaaaaatatatttgtaaatgcagttcttgctgtcactgtctctctggggttttacaatccatattcctgccagcatctaacgtcttttcaaattcttaatgtctataacaggacatgatgacattcatcgttttgacttgttgcagcaaaagatggttagcaggattggaatgttgctttcattctagacttttccttgagaactgctagccccgtattgctagccagatctcatggatgatctgacttgggtttcatctgtccaggttggcagtggaatccctctgaccggccctcctttgctgaaatccaccaagcctttgaaacaatgttccaggaatccagtatctcagacggtaaagtacccatcccggggtacctgcagtggggtgaaagggcagccatgtgggactgcagcctgggtcattcggttcacttcctggtgaaagttcacagaccagcctgtcctgagaccagaaagctgggcagaggtgtggagtattgtgctttcttgtctgctgcagccctgcagagttctaagaaatgctaagggctgtttctccggtatccacgtgccttttctttagttgtatgcagatgagcactgttaccttacaaagaaagagaaccaccacaccaagccaacaccagtactgatggctgctggatttttgtttctgtccctgtatgattcttagaagtggaaaaggagctggggaaacaaggcgtccgtggggctgtgagtaccttgctgcaggccccagagctgcccaccaagacgaggacctccaggagagctgcagagcacagagacaccactgacgtgcctgagatgcctcactccaagggccagggagagagcggtaagtcccccgcttcccccaaccccactgctcttcccttccctgccagaggctacattcaggccatcataggccaacgggaagctgtgaatggagcccgcacagaagggcagccatggcctttgtcaatggttcagcttcggaaggaggaaggttctcctctccccacctgcctcctatcccctccctctgagagtccccgaggagcataggctccagcagtgagttcagtcctgtaggcagaggtgcttctgaagcccgccaaggagctagcccatctcccacctattacccgcggcatctgtggttgctgtctcagagcagattcaacaatagtaagcaccaggctgcgtgacaagcagctcacggtgaaggcactgatgtgagaagctcgctgcagccaggtggaaccaggacacgcacatggacagaacccgtgtcctggtggtctctgggaagagcatctttctggtgccattgcctaggcgagcaagggagttgggatcagctcaggagggggtctcaagacactagcaaaaataataatggccaacatttatgtagtgtgcctactacaggccaggctctgttctatgttcatggttgacccccagaaccagcagtccaggttctgctgcagaccagctgaacaaaagcattgaggggtgtattagtctgttttcatgctgctaataaaggtatacccaagactgggtaatttataaaggaaagaggtttcaccgactcacagttccacatggctggggaggcctcacaatcatggctgaaggtgaatgaggagcaaggtcacatcttacttggcggcaggcaagagagcttgtgcaggggaagtccgctttataaaaccatcagatctcgtgagacttattcactaccacgagaatgtgggagaaacctccccatgattcattgatctccacctgaccccaccgttgacacgtggggcttattacaattcaaggtgagatttgggtggggactcagccaacccatattggaggtgggggataggccaagcatctgggttcatagaggatcctggggatggcaatggtggactccattctaatggactgcagactgggtacatgtgaagggactggacaaagccctacttcttgaagatttatggtgggatgtttactgacagcagaatctataaacctgagttttctttatcacgtactctcattagtaaaaaaaaaaaaaaaaaacagaacatgcagcccatatatatggtatataaagtacgtatgtccactactgtaggagtagagtgcgtatgttatgtaccaaaacgcacatttaaaaggcttgcatgctaaataagtccaaatttgcaatacttcccgccccgctgggccatctcactcacctacttggaggttatggcgtatagactctccagaatcttccacccttcctcctcttatcggttttcctgatttcaggtggctgagcagtagggaggagaggcctctgggaacgctgtgcttattaagaacccagtgatcagcagtcatgttcatttacgcccgtcagtttcatctgaggggtattttgatagtgatctcttggtgagccgagggtgtcaattaactgctcagtgctgaaactgagtggtgcataattcattgcaatttcactctcctggcctccttccactagattaaagttttgggagggctttggtgttccctgattcagatgtcccgcgtgctgccttgggttctgataaatgcatactggtacctctgttgagttacaggtgccaacagaaaacctcttcttgcaagctgacctctgagggagaattctgttactcactagcaggagcttggcaacaccaaaaagatttccttttttttttgagatggagtctcactctgttgccaggctggagtgcaatggcatgataccagctcactgcaacctccacctcctgggttcaagcgattctcctgcctcatcctcctgagtagctgggactacaggcgtgtgccaccacacccagctaatttttgcattttttagtagagacggggtttcaccatgttggccaggatggtctctatctcttgacctcatgatccgcccacctcagcctcccaaagtgctgggatgacaggcttgagccaccgcgcctggctaccagaaagatttcttatgagctatgattcatatttaaagagtgcccattaaaaaactgttggccgggcgtggtggctcacacctgtaatcccagcactttaggaggccgaggtcagcgaatcacaaggtcaggctcccgtggcacaagctgggggctgcccccaccccatgctccccagaggagcacccaagcgtctgggctcagacaggcctggatctgataaccggctctgatgccaccatccctgaggccaggcaagtcccagccgggctacagcactgttgtgagaatgcagatgaggttgtaaaggtgaagcacgtgtcacgcttctctcaataaagccatcattgctgttaggattgtcattaggaaaggctttgggccgggtgcagtggctcatgcctgtaatcccagcactttgggaggccaaggcgggtggatcacctgaggtcaggagtttgagaccagcctaaccaacatggtgaaaccccgtctctactaaaaatacaaaattagccaggcgtggtagcgggtgcctatagtcctagctacttgggaggctgaggcaagagaaccatttgaacctgggaggcggaggttgcagtgagctgagatcgtgccactgcactccagcgtaggcaacaagcgagactccaactcaaaaaaaaaaaaaaaccacacacacgctttggtctctttccctgaagatgggaacaaaaagctggacggccctggcctcttcatccctgcactggtttacttgaaggcagcagccccccacccacccacatcactctctagtgagtataaaaacgatgacaaggccaagcaaagggtcaaaacctgtggctctcctgccagccagctagccgagaggcctatgaggagctctgggaataaggggctgtgtcccacagtggggaagggacaatgggccattatgcacaggagataagaagggatgacctttgacaatttttttgtttgtttgtttgtttgttttgagatggagtctcactctgtctcctgggctggagtgcagcagtggcactctgcctcccgggttcaagcgattctcctctgtcagcctctagagttgtctggagttgtcagctcttccccttgcgtttcagatcctctggaccatgagcctgccgtgtctccattgctccctcgaaaagagcgaggtcccccggagggcggcctgaatgaagatgagcgccttctccccaaagacaaaaagaccaacttgttcagcgccttgatcaagaagaagaagaagacagccccaacccctcccaaacgcagcagctccttccgggagatggacggccagccggagcgcagaggggccggcgaggaagagggccgagacatcagcaacggggcactggctttcacccccttggacacagctgacccagccaagtccccaaagcccagcaatggggctggggtccccaatggagccctccgggagtccgggggctcaggcttccggtctccccacctgtggaagaagtccagcacgctgaccagcagccgcctagccaccggcgaggaggagggcggtggcagctccagcaagcgcttcctgcgctcttgctccgcctcctgcgttccccatggggccaaggacacggagtggaggtcagtcacgctgcctcgggacttgcagtccacgggaagacagtttgactcgtccacatttggagggcacaaaagtgagaagccggctctgcctcggaagagggcaggggagaacaggtctgaccaggtgacccgaggcacagtaacgcctccccccaggctggtgaaaaagaatgaggaagctgctgatgaggtcttcaaagacatcatggagtccagcccgggctccagcccgcccaacctgactccaaaacccctccggcggcaggtcaccgtggcccctgcctcgggcctcccccacaaggaagaagctggaaagggcagtgccttagggacccctgctgcagctgagccagtgacccccaccagcaaagcaggctcaggtgcaccagggggcaccagcaagggccccgccgaggagtccagagtgaggaggcacaagcactcctctgagtcgccagggagggacaaggggaaattgtccaggctcaaacctgccccgccgcccccaccagcagcctctgcagggaaggctggaggaaagccctcgcagagcccgagccaggaggcggccggggaggcagtcctgggcgcaaagacaaaagccacgagtctggttgatgctgtgaacagtgacgctgccaagcccagccagccgggagagggcctcaaaaagcccgtgctcccggccactccaaagccacagtccgccaagccgtcggggacccccatcagcccagcccccgttccctccacgttgccatcagcatcctcggccctggcaggggaccagccgtcttccaccgccttcatccctctcatatcaacccgagtgtctcttcggaaaacccgccagcctccagagcggatcgccagcggcgccatcaccaagggcgtggtcctggacagcaccgaggcgctgtgcctcgccatctctaggaactccgagcagatggccagccacagcgcagtgctggaggccggcaaaaacctctacacgttctgcgtgagctatgtggattccatccagcaaatgaggaacaagtttgccttccgagaggccatcaacaaactggagaataatctccgggagcttcagatctgcccggcgacagcaggcagtggtccggcggccactcaggacttcagcaagctcctcagttcggtgaaggaaatcagtgacatagtgcagaggtagcagcagtcaggggtcaggtgtcaggcccgtcggagctgcctgcagcacatgcgggctcgcccatacccgtgacagtggctgacaagggactagtgagtcagcaccttggcccaggagctctgcgccaggcagagctgagggccctgtggagtccagctctactacctacgtttgcaccgcctgccctcccgcaccttcctcctccccgctccgtctctgtcctcgaattttatctgtggagttcctgctccgtggactgcagtcggcatgccaggacccgccagccccgctcccacctagtgccccagactgagctctccaggccaggtgggaacggctgatgtggactgtctttttcatttttttctctctggagcccctcctcccccggctgggcctccttcttccacttctccaagaatggaagcctgaactgaggccttgtgtgtcaggccctctgcctgcactccctggccttgcccgtcgtgtgctgaagacatgtttcaagaaccgcatttcgggaagggcatgcacgggcatgcacacggctggtcactctgccctctgctgctgcccggggtggggtgcactcgccatttcctcacgtgcaggacagctcttgatttgggtggaaaacagggtgctaaagccaaccagcctttgggtcctgggcaggtgggagctgaaaaggatcgaggcatggggcatgtcctttccatctgtccacatccccagagcccagctcttgctctcttgtgacgtgcactgtgaatcctggcaagaaagcttgagtctcaagggtggcaggtcactgtcactgccgacatccctcccccagcagaatggaggcaggggacaagggaggcagtggctagtggggtgaacagctggtgccaaatagccccagactgggcccaggcaggtctgcaagggcccagagtgaaccgtcctttcacacatctgggtgccctgaaagcccttcccctcccccactcctctaagacaaagtagattcttacaaggccctttcctttggaacaagacagccttcacttttctgagttcttgaagcatttcaaagccctgcctctgtgtagccgccctgagagagaatagagctgccactgggcacctgcgcacaggtgggaggaaagggcctggccagtcctggtcctggctgcactcttgaactgggcgaatgtcttatttaattaccgtgagtgacatagcctcatgttctgtgggggtcatcagggagggttaggaaaaccacaaacggagcccctgaaagcctcacgtatttcacagagcacgcctgccatcttctccccgaggctgccccaggccggagcccagatacgggggctgtgactctgggcagggacccggggtctcctggaccttgacagagcagctaactccgagagcagtgggcaggtggccgcccctgaggcttcacgccgggagaagccaccttcccaccccttcataccgcctcgtgccagcagcctcgcacaggccctagctttacgctcatcacctaaacttgtactttatttttctgatagaaatggtttcctctggatcgttttatgcggttcttacagcacatcacctctttgcccccgacggctgtgacgcagccggagggaggcactagtcaccgacagcggccttgaagacagagcaaagcgcccacccaggtcccccgactgcctgtctccatgaggtactggtcccttccttttgttaatgtgatgtgccactatattttacacgtatctcttggtatgcatcttttatagacgctcttttctaagtggcgtgtgcatagcgtcctgccctgccccctcgggggcctgtggtggctccccctctgcttctcggggtccagtgcattttgtttctgtatatgattctctgtggttttttttgaatccaaatctgtcctctgtagtattttttaaataaatcagtgtttacattagaattcttggcagattgcttcggcctgtgatcctgccctgttgttctgagcctgtgcggtggcggggccgggatgtagtgggttctggtttcccgacggggctggggcccggcatcaggtcttacagagcagaacggtggcaggttgcccccagctgcccagggcctctgcggcctgggtgcccacagccatctttcaggcacttgccctgctatgctcggaccctttctgtacccttggcgcttacctgctggcagcctggccccaccggcatcactgggagtgggctgtgccaccatacaagccacatctgactggcggtatcaggctgtcgcagcgacgtggaagtggggtgaggaggtcacgtcccgtgcttcttgctggctgagggcaaatccctccccacgtgcgcctgttctctctccacctttccgccctaagcccccaggtgcccttactcactcatgttccttgagccaggtgtcttaggtctttgtgtggatgaggaggagcggaggtgtgaggtgtgctgggccttcagggcctgggaaggccatcccagactgagccccaccgccctttcccagctcagtccccaccgagctgacagcttggaaaggggcggttgggaagtgagtagcaccctctgataatgatactgatcaggccagcaggtttgtcaggggtgcacatcctgctcagcagagcatatgaagatcacagcttggtgaagctccactcgagagacctggagcgagactgctgtgcggtgggtgacaggtggaactccagccgggccggggctggtggagcccactgcgagcagtgccaggcacaagattctccccctctcatttcacagggacaaaaccaggctggggcccccaatttccttgccggttgaaccatagctggccaccagatccaccaagcctggggcttctcttgtcctttgaatggctgcttctcccaggtctgaacgaagacataggacaactctggtgacagccacagctggtggccgcttcctcgtgtcagatgtggacggtcaccccgccctcccagcgctaagcgctgagactgcgtgtccagagtcggctcctgcacgtgaggccaattggtcacactgggccagtgtggaggaagatgcctctcatctcccaaatggggatctttcatgggtgtcacctgagcttatagagcttagtttagtctagccattccaagacagtggtttcttaaccttttctaggtcacaaaacctcctgagaacctaatgaaaactggatcccagccccagaaaaatgcacctgtgtgcacacacccagcagtttccaggtcatttcgagtcctgccttcgaggtccattgttattatttacaaaacaccagcctaaggtattggacattttcttaaaaggccaggcaaggtggctcatgcctgtaatcccaacactttgggaggctgaggtgggtggattgcttgaggccgggagttcaagaccagcctgggcaacatagaccccatctcacaaaaaatacaaaaacaagctgggtatggtggcacctgtagtccagctactcaggaagctgaggtgggaggattgcttgagcccaggaggtggaggttgcagcaagctatgatcgtgccactggattccagctccagagtgagaccctgtctcaaaaaaaatttttttttcttttttctttttgagacagagtttcgctcttgtctcccaggctggagtgcaatggcacaatctccgctcactgcaacctctgcctcctgggttcaagcgattctcctgcctcagcctcccgagtagctgggactagaggtgcgcaccaccagacccggctaatttttgtatttttagtagggacggagtttcaccatgttggtcaggatggtctcgatctcttgacctcatgatccgcccaccttggactcccaaagtgcttggattacaggcatgagccagcgcgcccggcccaccactttttttttttttttttttttttaagacgagtctcacactgtcgcccagtctgtagtgcagtggtgccatctcggctcactgcaagctccgcctcccaggttcata

SEQ ID NO: 2496 - DNA, 4098 bp, Homo sapiens; identical to SEQ ID NO: 1041

SEQ ID NO: 2497 - DNA, 1670 bp, Homo sapiens; identical to SEQ ID NO: 502

SEQ ID NO: 2498 - DNA, 862 bp, Homo sapiens
ggggagccaagtttgccgatgcagtgaatgtggtaaaatattccggaacccaagatacttttctgtgcataagaaaatccataccggagagaggccctatgtgtgtcaagactgtgggaaaggatttgttcagagctcttccctcacacagcatcagagagttcattctggagagagaccatttgaatgtcaggagtgtgggaggaccttcaatgatcgctcagccatctcccagcacctgaggactcacactggcgctaagccctacaagtgtcaggactgtggaaaagccttccgccagagctcccacctcatcagacatcagaggactcacaccggggagcgcccatatgcatgcaacaaatgtggaaaggccttcacccagagctcacaccttattgggcaccagagaacccacaataggacaaagcgaaagaagaaacagcctacctcatagctctcaagccagttgaagaaaccttgccttttcagcttgaccctgcaatataacatgcacaggcctgcttgtgaatcaggactgaatgtgaaagggaagtattgagtgaggacattcccaaaaccaaaggacaactgaggagactgcccagcacataattaataaataagaaaatgagtgaggagttattaacactatttggaaaaaagatttcccattcacttgatattgtttgttcactcatttagtcattaaaagtgagattaataaaatctgaaaatgtatataataactttaaaaagccaggtaattaattaatctgcactgatattacatccacagtaccacagtatttatgtgtatgaattaaggattaaaagataatgtgataaataaacggaattc

SEQ ID NO: 2499 - DNA, 2725 bp, Homo sapiens
gcatgccccatcagccttcagcttgagcccggcggcccccgcccccgccccctgccaccctgcactgccccggctcccccgcggcccccacgctgcagtgcggccgggccccctccccgcaggggccgcccccgccgcccacccctagcgcccgtggtggtggtggtggtggtggtggtggtggcccgggccgcagggccatgaaactacaggccgtgatggagacgctgttgcagcggcagcagcgggcgcgccaggagctggaggcccggcagcagctgccccccgatccccctgctgcaccccccggccgggcccgggctgcccccgacgaggacagagagcccgagagtgcccggatgcagcgggctcagatggccgcactggcagccatgcgggctgcagctgcgggcctgggacacccagccagccccggcggctctgaggatgggcccccaggctcggaggaggaggacgcggcccgggaggggacaccgggctcacccgggcgaggcagagaagggccaggagaggagcactttgaggacatggcctccgacgaggacatgaagcccaaatgggaggaggaggagatggaggaagacctcggggaggatgaggaggaggaggaggaggattacgaggatgaggaggaggaggaggacgaggaggggctgggccccccaggccctgccagcttgggcaccacggcactgttcccccgaaaggcccagccaccccaggccttccgcggcgatggcgttcccagggtgctggggggccaggagcggccggggcctggccctgcccaccccggaggggccgcccacgtagccccgcagctgcagccgcctgaccacggcgactggacttacgaggagcagtttaagcagctctacgaactcgacggggaccccaagaggaaggaattcctggatgacttgttcagcttcatgcagaagcgagggacacctgtgaaccgcatccccatcatggccaaacaggtccttgacctgttcatgctgtacgtgctggtgacggagaagggcggcctcgtggaggtcatcaacaagaagctgtggcgtgagatcaccaagggcctcaacctgcccacgtccatcaccagtgcagccttcaccctgcggacccaatacatgaagtacctgtacccctacgagtgtgagaagcggggcctcagtaaccccaatgagctccaggcagccatagacagcaaccgacgggagggccggcgccagagctttggtggctccctctttgcctactcgccaggcggggcacacggcatgctctcctcacccaagctacccgtgtcctccctgggcctggccgcaagcaccaatggcagctccatcacccccgcccctaagatcaagaaagaggaggactcagccatccccatcacagtccctggccgcctgcctgtgtccctggcgggccaccctgtggtggcagcccaggcagcagctgtgcaagcagcagccgcccaagcagctgtggccgcacaggcagctgccctggaacagctgcgggagaagctggagtctgcagagcctccggagaagaagatggccctggtggccgatgagcagcaacggctgatgcaacgtgcactccagcagaacttcctggccatggcggcccagctgcccatgagcattcggatcaacagccaagcctccgaaagccgccaggactctgctgtgaacctgacgggcaccaacggcagcaacagcatcagcatgtcggtggagatcaacggcatcatgtacacaggagttctgtttgctcagccgccggcccccacgccaacctctgctcccaacaaaggaggcggcggcggcggcggcagcagcagcaacgcaggcggccggggaggaaacaccggaaccagcggcggccaggctgggccagcggggctgtccacaccctccacatctacctcaaataactcgttgccttaaccgcatcactccccacccgccacccaccctggagcccgccggcctgggcagggggtccaggtgggccacacaggggccaggatggcggaagatacgggtggggagggaagatatccagaaaggagccacagctgacgccaaaaagaaaagaaaaaagatatatatatatatatatatatatatacgtatatatataaagaagaatttaataaaacaggggaaaaccaaggaacacttgaatttctcaggttttggacattcagagagatgaattgtgagaacagcaaagaaatccatcagaaaaacagaaagaggcagacgtttcccagggcgttcaggcagccctgatggaccgaaggctctggtgtctggtttggccccacagcagtgtgggccgatcctgtttacctcatacatccctgcactgtgtgttttcatttttgtctgctttagttctcttttattttctattcaccacacactcaccactcccagcttctcgtgtccagtgaaacccctgaaccaagatcactgaatttttgtttttttcttgttgctttgggaaatttttttttctctgtagggtttttaagaggtttcgggggttttgttgtgtaaatattctattttattcttggggggatcaaaccttaggaaaaggatatctatatatctatatagctatatatttgtgttccttcagggaaactggtcttgaaaaagcaagaaaaaaaagcaaaaaa

SEQ ID NO: 2500 - DNA, 687 bp, Homo sapiens
  misc_feature (1)..(687): n=a,t,g or c
ttttcangagctggccctttcaactcagtttaggggcgcagccagctcncttcccaatagggctctttctgctttccctctccttggccctagatttgtaatccatgaaaaagcacaaggtcctggctccttgcggtcacattctggttctctgtgtttggtggactctgctctcactgttcacccagcactagcagtaccagatggttctgtggagtcctggggaatggagagagcacagtctgactccctgccaagtagccaggagttgacttgcccatggtccgctggctttcccaccacttcctacaggatgggatctaagagactcaagagctgggtttctttcagnactctgtactgtcccaaatagnaaacaantcacttngtggccagatttctgaatggaaatgagaaattgaattcagcttgggacttaaccaggctgactngntaggggggnnnnncannnnnnnnntngntcaannnnnnnnnnnnnnnnnnnnnnnnnnnnnnnnnnnnnnnnnnnnnnnnnnnnnnnnnnnnnnnnnnnnnnnnnnnnnnnnnnnnnnnnnnnnnnnnnnnnnnnnnnnnnnnnnnnnnnnnnnnnnnnnnnnnnnnnnnnnnnnnnnnnnnnnnnnnnnnnnnnnnnnnnnnnnnnnnnnnnnnnnnnnnnnnnnnnnnnnn

SEQ ID NO: 2501 - DNA, 1524 bp, Homo sapiens
gtcgccttccagcccgtccgcctcccgaccagggcccgcgccccgtcccgcctctctcccgcccagccaaatgcaggccgccgccctccctgaggagatccgttggctcctggaagatgctgaagagtttctggcagaaggtttgcggaatgagaacctcagcgctgttgcaagggatcacagagaccatattctacggggctttcagcaaatcaaagccaggtactattgggattttcagccccaagggggagacattggacaggacagctctgatgataatcacagcgggactcttggcctgtccctcacatccgatgcaccctttttgtcagattatcaggatgagggaatggaagacatcgtaaaaggagctcaagaacttgataacgtaatcaagcaaggatacttggagaagaaaagcaaagatcatagtttctttggatcggagtggcagaagcgatggtgtgttgtcagcagaggtctcttctactactatgctaatgagaagagcaagcagcccaaagggaccttcctcattaagggctacagtgtacggatggccccccacctgcgaagagattccaagaaagaatcctgctttgaactgacctcccaggataggcgcacgtatgagtttacagctactagtccagcagaagccagagactgggtggatcaaataagtttcttgttaaaggatctgagctccttaaccattccatatgaagaggatgaggaggaagaagaaaaagaagagacatatgatgatattgatggttttgactccccaagttgtggttcccagtgcagacccactatcttgcctgggagtgtggggataaaagagcctacagaggagaaagaagaagaagatatttatgaagtcttgccagatgaagagcatgatctagaagaggatgagagtggcactcgacgaaaaggagtagactatgccagttactaccagggcctatgggattgccatggtgaccagccagatgaactgtccttccaacggggtgacctcatccgtattctgagcaaggagtataacatgtatggctggtgggtgggagaactgaacagcctcgttgggattgttccaaaggagtatctcaccactgcctttgaagtggaagaaagatgaaacccaggaaatatattcttccctctctcctcctttatgaggaaactgatcatcaaaagttcccactccctacttctgcacccaccaacgcctgactcctctctttgctgaagagacccaagtctcttgacacctcagagtgactgtaagctaccagtaagacaagtgggaagaggcacgttcatcaaacctgttactaaaccagcctagtcatagctcatccccatgtgtaaatgtgtccacacaaccacatctgccttttccacaagcttttcacaaagaaggtgagagagaaggaaaccttgggaggaggacattactggttgttctggctggtttgaaaagcacaaataaacttgggatgtggttccttg

SEQ ID NO: 2502 - DNA, 442 bp, Homo sapiens
  misc_feature (1)..(442): n=a,t,g or c
tcagaatatcctcgtattcacaggcaggtcttgccagacttactgtagaagaaactaatcaacatccctgggaagatgagaaaatgagtgctgaagatgaccttccttagccttcctcttccagaaggactaagaagcatgcgagctacatctctcttttccttcctgttccctgggctgccttgcaatacctggtggggcacatacctgccttccatggcagacctttggcaggatagtagtggcagatagaagagagaaagtggaaaaaaaattcccctgtaccctgctagtattccccattaagaaactnccttggagcaaaccaaggacaaatataaatgagtttgtgagtgttagaaaagcaagcctttctgcctggcacataccattacataagccagaaccacacagaaactttatgctattttacccttaaacn

SEQ ID NO: 2503 - DNA, 444 bp, Homo sapiens
cagagcagagggtttttctatttattacaaaagttgttacacaaatacagctgaccagaaggtctaaaaacagcccagactcttccaaccctcatgcatctgtagatagaaggagagctgtggtcttgctcacacacaggggagcccttcttagaagaactgcctgtcccttggaaggttcagagtcttgggtccagcagcagagaggagcccaacctgcgtggacaaccccttgaggcagcccttggtcacagctgctctgggtgggcagcaggtttaagtttcatagttcacatgttcccaccacacaagtcaaatcaaggcatgaaaataaaagggaaaaaggggaaggctggaaaagggagcctggaagaggttgcaggtaggggaaggagacacagtgggcttccgagaagctggcaatttcttgacttggatggagtt

SEQ ID NO: 2504 - DNA, 233 bp, Homo sapiens; identical to SEQ ID NO: 1702

SEQ ID NO: 2505 - DNA, 256 bp, Homo sapiens
gctcccgtctttcttttcttctttcatccatccttttatccagggctgcatagatagcatctgcttcctcatcatctttctcgtagggtccacttgagaagaggctcccagcatagccattaaactcatcgtaattggtgtcatttagatcctcgtcgtcatcgtcagcagcctgatttttcttcatctggtccccaacggttctcttgcctgggggtgcatggcgatcatccacagggtcatttgcatcacgggc

SEQ ID NO: 2506 - DNA, 413 bp, Homo sapiens
gggctagaggtttgggctttaatggcagctggggtaaaaggaaacaaaaacagtaattctgaagagcacagggaacaggcagccaggaccagcctggcccattccaggccagctgagctgaaatgctgattctgtccagggggctgctgtatgtgtagactggtggcagtcttggggactgaggcctcttggagagaagggaagactgtcggctcagaagtccatggagctgtgggccaggtagtccttgcgaccgatgttgctgacctgcttggtctgcatagcctcgagtttggggcagtcagtgatccgatgacccaggcccccgcagaaggcacagccgcggctctcctccaatgtccagcatggactcatccccgcaatgcagcacctgcagcacgggcggcaccttt

SEQ ID NO: 2507 - DNA, 439 bp, Homo sapiens
tagattagaataaaaatttatttttgtaaagaattatattttgtatttgcaaaagctgaaaatgctcataaaaattaccagcccagagcttggatttccaccggatccaccacgtgagacaaaagagtctgtcacttcttcttgccaggtttgagggccttttctagaccttggatgtgttttcgagggagctgatactcttcaagcaatagccagccgaggtggtggacctggtttccctggatctgcacctgaaggctgtccttggccccaggggagggattgacggtggtgctagcctggcatcgctgctgaaggatggcagccactgagtatgggtccagaccataggcctccaagttccggaccacggtcacctttttattagacgctctttgtgctagggtgatgtcaattggacagatttctccctttcttt

SEQ ID NO: 2508 - DNA, 302 bp, Homo sapiens
ttttttttttttttttttttttttttttccgagcaacatctgcgtgtcggtctgcttttattacctcccagactgagcccccgacctggcccagcctggcccgtccccaatccagtgggctggccaggccacctgcaccagggaggacagctgctggcagggactaataaacccttccacctggccatggtggtggtgttctctatggaccgaggccctgaaacgcgggcagggaggggcagagaacgcactagcttgggggtgggcaccagctcagacccctcagcagctttgggccctcg

SEQ ID NO: 2509 - DNA, 326 bp, Homo sapiens
  misc_feature (1)..(326): n=a,t,g or c
gctgtgatatctgaaattgccaaaggatattcagtatctgaaataaaaaggcaaagctgaatatgctgctctctacagcagagggagctgctgtggctggacagtatctgaaccaagcagatcttaaaactttgtaggtgttgagaaatggtggatgcatggactggcaccgtctgtggagccatgattatgtaggtgagacttgctcattatcttgtagtgttttaanatgtcttcacatttctaaaggcaacttgcttaatgcattttttaatttaaattttttatgttgtacagtttattttaaatatagttgccatttttta

SEQ ID NO: 2510 - DNA, 461 bp, Homo sapiens
  misc_feature (1)..(461): n=a,t,g or c
taaagcctttctgcggtttgagatagacatgcagttgggctgggcantgcttgctgtgaatgtcaggtgttgagattagcaccacaccattccccgggtctgagtcttgcatgcgtctttgtccatcattgtctagaatgtgagaaaggtaagcatgggaacgccattttggggaagaaacaccagctatagaaagcaaagggatgcataggagataaaaagtctggggaaaaggatgtgaggtagcaagcgagttctcagctccccccagagaccagctgaaaagaagactgggtcagataccccctatctggcagatatatcacccctcaaaactggaacatgccccaggaaatgttcttggtggtttttttctccttgctcattttagcccaaactctaacaatgttgaaaatatctcgaaatttctttttttcttttctttttacctagaggttata

SEQ ID NO: 2511 - DNA, 430 bp, Homo sapiens
ggcagctcagaaacatttattattaattttttcagtcacagttttcatcttgagaaagtggcaccctcgggagagcgctgggaatgttcagagcctgaatatcatccactctccaagtcccagaaagaactcaacaaagtctcagtcctaatgaagcccaaaccaagtgacctcttagctgggaggctttgtgcattttaaaaaagactatgtaagcttgtttcccagaagctctttctgtctgaccccatctgtcatcccatctttttccctgatctgttgcataatagctgagggaaagttgtgttagagtgtccctccatcgctaggccagctcaactcaatggcgttagtatcctgttcaacacactccattctgtaaagggccatataaaaatgtggcctgtcagattcacaaaagtggtagttg

SEQ ID NO: 2512 - DNA, 339 bp, Homo sapiens
aaggagggatgtctgtttatttacagtgcaccctttgtgccaggcccttatgttcatgaccttacccaactctacaatcttgcaaggcggtttacatcatctccactttacagttcaagaaacaaaggctcagattcatagcccctgaatagtccctcatagtccctgagttcataagtagtggttatagtacaatctaagctatttaattccaaagccagtgatttttctggccttgagctataggtccaaaggctccaacagggccctccagactcaatggcagggtggtgtctgcacaagctggaagtgtccttgtgatgagcccatcaggagcgg

SEQ ID NO: 2513 - DNA, 446 bp, Homo sapiens
ttttaacgttaaatcgattttatttaaagccataaataaataagccaattaacgctcaagtctgagagggctgcagtctttttaacaataccatagtccaaaaagactaatacttattgctgattcagctcacaatattacccctttccagacaacagcacattcaaatgttcaagaaaacattttatgggcaccttttatgggcatttgagattcacagagcaatgggccatggcatgccctcaaggaacttacaatgtagctggagagacacaaaacatccaaaacagacatgaggggctggctctacctccacacctctatctgaacaaaaacgattactggcttaagtcctcgtgttgtaacgcatgagccacaggaatatcttagcaagtacgcactttatcaagtttcaatttgacatgtcaaaacaaaagtttttatgt

SEQ ID NO: 2514 - DNA, 424 bp, Homo sapiens
tttttaaacttcaaaacaagttttatttgggaagtttctcattttgttaaagctgcaagcaagtttctttcacaattacacttccagagatctagtagttttacggatctcagtgttcaaaagtgtatttcaaaatgaacaaaaccaaacccacaccaaaaggaaatagcgtttagattggtttggaatgtatagccattgatttcaggtgttctcagaaacaggttaccatttccttggaaaacaggtgggatacagtcaatgcccacagaaggaaatgtcttttaaataagttagttactcggacaatattattcactccttagaaaatatagtaggataacaagtcacagctggcagggtatgcagtacagcaccgatttcacagggggcttatgcaatcctggagtcagcggttgttggc

SEQ ID NO: 2515 - DNA, 462 bp, Homo sapiens
gtgaaaaagctgcatgttttaatttaggaaatgagtagaagttcacaagcaacccagaataggtgccagcagtttgctccagtgggccacaccacagcagcagctcaggctctgcagaatcactgtgtccagtgcttcctgagatgttctttcagctgaggaatggaaggcagcagctgctggcactcatgacaacgaaggggcagcttcaagagctcaggcatcccatctcggacagttactctaccagcctcttgtaccatctcgatcacagcttgtgattctaggaagtattctgtattgaaagaattccaatgttttttgtttttaaggcaaggagaatcaaaatcctggctgatcacatgaagatgtacatggctcatactcggaatggcgtggtagcccaatcggaagcggagtttgctggacccagcaaaatctacaatcaccttttcccccaca

SEQ ID NO: 2516 - DNA, 254 bp, Homo sapiens
gaaaccaccatagagaatttatttttttctcaggtgaagtcagtaactaattcttcctattcccgttggacacaaggagtctgtgagggggtgtgaaggaaggaggctgcggctgcgtcctggactccgtcgtgcggtagggagtccagcagggatggctcagccgtccgcacctggtgtgcagccggatctccatcctgaggaaggccttgaggttctcatcagccacgtgctcctccagggcagccagggcc

SEQ ID NO: 2517 - DNA, 418 bp, Homo sapiens
tttaaagaacaaagcagaggggtttattataggaacattctcaaaccgcaacggaaaagatgtccgtacaggtggatggggatggagatccacctcggagtacacagacttcagggggcctcctgcctggcacgttctttctctcccgtatcacctaagaccctgagacccccaccctctgcaggagagacccacaaagaagcctcctccctgtggcctggctcccatcagggacagtcctgtttttagagcaagaacagtctgtacttcagacaggatcccaacccccacccaaattcaatgtcgaccgtctgagcagccagcttcattggctgcaaacgcctctctcaggtgagtcaaaggagacacgacggggaaccagggggccctaggtgaggatgtcatgggcctggtgctc

SEQ ID NO: 2518 - DNA, 314 bp, Homo sapiens
taagatgacttgagtttcttgcactcaaagagagagacacagtcagatgtgtctatggtattgcctagaacgtcttaactactgagaaaggatgcgggggtgcacgcacgtggttactgagtggggggtggggaggagggcaccaaggctttctcaagatttacctgatgtgaacgaatcactggcgtgaagttgtggggaaaagaaaaaggcaggatcagaaaacaactgaaaataatttacgcttcttaaaaaatatctctgcttcgggtggttgtacaaaatgatttcctgatgcttgggatctgaatggc

SEQ ID NO: 2519 - DNA, 370 bp, Homo sapiens
ttttaatgaataaagtttattggagattattaaagaaaaatgataaaataaggcaagtcctagatcagatttaaatacaatatttagaaagatggctatataattttagctaggaaaatcagtaaaagggaatatccttaaaagtgggaggggttcatataaccttttaaaatagcaagttgaggtgtaaaagcatcaccaacaatagtatgtaccttaatctttacacaattggacagtgaggagcaaagtgggagattctaccaatgccacttacagaacagattttcaagttaataagtcataaaatcctaatgtagtcataggctaggatggtgacgacaatctgcaattactggtcagagtgaag

SEQ ID NO: 2520 - DNA, 429 bp, Homo sapiens
ttttcaagaagagctgtcttgctagtatgctcagttttctgagaggcctcagcaggtcataaatttaggtttgccatgggcaaactacttggtcccaacatgaaatatgacaatcaatttggcataaaagaggcacacgggaacatctgatggactaagaaataactattattaatgcaactacaaatatgaatatcttattacacaaacaggaagaattacgtatttttacagggtattggtgagcagtcaaaaagcgtggcaaattacctagaagttttaaaagttttaagtgatcaaatatttgcatcaaatataattccacccaataaagaactttgtatttaaatgtttttactaaaagcacaaaattaacctttgctctcctgtaggtaccccacctttgtccatacagaagatgcatgtgcc

SEQ ID NO: 2521 - DNA, 405 bp, Homo sapiens
ttttttttttttttttttttgttttctcaactttattgtggacaggagaagggtaagtagacttgaaggttttttattttttaatgaagaaacaatttatcctgtgtttgataccagatgagactgtaagggtcacatactccttaagcctacacatcaattccaggtgaagtgcttcaggcttggctcattctgacacctaagaagggccctctaggccacggttgggaagactgtttttgccttagcgccgtgcaggtttgggcattatataaacttttacaggcttgctgaagggaatggtgccctcgatgctggtttccacctgtggtgacatctcaccaccctccatccaggggcattttggaatgcgagcactggagttgtaggccagcagcagcctca

SEQ ID NO: 2522 - DNA, 292 bp, Homo sapiens
tttgtgcttgttttattggaagcaagactccagccagctgcagggctcatgggaggaggcctggagagttcagtcctgggtctccctctgggccagcagggggaaaaggggtgttaaaagagctagaaccctcagagatgctcctctgaagcaggggaaagaaaactagaaaggaaaactgtcccagggcggggagcggaatagggcccccacatctcagactctcctaccctcaagcagttaattctcaccccctgccttcctctgtcaacggtgggggtgattccaataa

SEQ ID NO: 2523 - DNA, 389 bp, Homo sapiens
taaggccaagaaagtcagtttaatcttacaatataaatatatcatttagtcacctcagcttatccccagaggtgtttacacaattcccaatgaccagtgcagcttggaagcgactgaggctcgcaagtgggtggcacagtcggctcttcagtggctccaaagtgagcccctcacaacaggagacacttcagagaggtctgtccccagccacgcactcatgattgctttttagcagaagtcatggtcgctgaggccctgggtttggcaaaagcacagctgccagcagagcacagttctggtaggtggggccacggctgacctggccccagagctacaggaacaggcaggggccagcttggcttgcaacaccatgaaacaagcctgtgggg

SEQ ID NO: 2524 - DNA, 434 bp, Homo sapiens
cgcaggtttcaaaaactcactttattccaatgtgaaatgaggacgtgatggtttaaaaacaagaaaaagttcttgctcagcggtggggatgctctgcttgcccgctcacgcccatcccccttgaaacaaggtgtctggacggaccacacccataagcggctctccgcaaacccaggcagacgcccgtctcctccgggtctcagggtggccacatcctcccccaccagggctctgacagcaggcacagagcagcagcacgggcagggtggagcgggacgagcgtgtgggggcccccgccatccccagagctagtctcagaccaggaagggagctgggcaccagagaagcgacatcacgtcggcacctgtaactcccgggatccgtaattgggccccgtttcccagcctcgcccccggccactgtgcgttcaacag

SEQ ID NO: 2525 - DNA, 231 bp, Homo sapiens
tttttttttttttctagagggtttttctcaggggcttctcttagtgctgtagctgctgcaggctgcgcagggcctccgcacatgcgcggataaggccacacagctggatgctagtctccagggaggtgctagagcccagttcagcagaggcccaggtcagcttctgcaagagggctgtctgtgtgcaggccatgacatctgtatttggaggcacagcaggagcaggtggcc

SEQ ID NO: 2526 - DNA, 274 bp, Homo sapiens
tcactggacagcactttattgacaccctcggacccggggcagggtcagcaagactcccagctggcatcagactgtgtctggcctgctgtcgccatccctgaggggtgcaggacagagccccatagggcgagagaggcctccctgggaccagaggaggatgctgtgcagccaggcccatccccagcactcgaggcctaggaggagaggtgggctctggcagcgggtgtgaggtggcagtgagaagccaggccctcaggtgcagctcaggcctctg

SEQ ID NO: 2527 - DNA, 523 bp, Homo sapiens
ttttttttttttttttttttttttttttttttttttttttacagggtaaaggctctgttgacttcagcacgaccaccccagccccaggcaggcagaacagctaggtgaagaggcggacagtcccgtctgcccccgaggagaagacccacggctgggtggggtggaagatgacgtccagcactcccagatctcgggtcagcacgtgtcccttcagcaccttgacgggcaccagcaaggggttctgcagaaggtcattgtacaccatgccatggcagacgatgacactgccgtcgtccgagcctgacgcaaagagtgggtaccgcgggtggaaggccacagcccgcagagccttcttgtggtgtctcagcatcctgtatggcttggtggaaagatccaggtcaaaccacaccagcttgctatcgtagctcccacagatgacgttgtcacctgcagggtgcaccgccaggctggacacccatttgcagttgggcatcagcttcttggtgagctcctggcgcacaag

SEQ ID NO: 2528 - DNA, 379 bp, Homo sapiens
ttttaacaggcagaaactctttaatcaggctttttttccaactctaaaacaaaatcccattttttccttaaatttagttcctcaggaacagagaactttgcaatgatgatctcaactctgcatcatctggtgactcctgattctgcaggactaagacatttcccaagagttctgctgcatcagccagtgaggacaagagttcttcagtgcggttcagctcaaggacacctaggcttccccagcaggggcttgcttgcaggtctgacaaaccacagagcgttgagcagatggcctgggactcccagacctggcagagggttttattagggcccgcctgggctgcaccgtttcatccaagtaccctgacccagcactcatc

SEQ ID NO: 2529 - DNA, 302 bp, Homo sapiens
ttttttgtggatttaataagtcacttcacaccacagaaaatatttaataaatccaaaaaaaggaaagaagaatataacgacagaagagcttctgtctcagttctctgaaactgagtcccccataggaaactggtcccaaagttctcgaggggtcattgaagaaacttcggtttgctaatttttttcatccttttagtgttcaaaagttctagaaagactcctcgctgttttcagtttttaaacagtcaaatctccatctcccccagaaggtaacagtctggtgcagatccataaaaacgtgg

SEQ ID NO: 2530 - DNA, 498 bp, Homo sapiens
tttttttttaaatgaatttaatctctctctagaaacagtgcactgattttacaaatgtccacatttggttttcagtttaccaagatgatgccagtatagctagtgagatgcagcaccccatcctcagccccctcgcctctggaagagacaccagactgcaaagggcaccgcgtacagaagctaacggaacttgaatgacaagacaaaaagagcagaatcagttagtgtgacacaacattctaacatgcctgattcttacatcaaatatgctaactttggggttggtagggggagacaaacaaggagaatccacttgggaacaatttgatgaagtttgcaaatcagcactttacccccaaattaacaacagcttgtatggaaaaaaaaatgctcttttaaaagtatatggtttggacaggtatatttgttttctcttgtagtttttgtaaaaaagtatcaaaaccttgggcttaaatatatatatatatatatatatat

SEQ ID NO: 2531 - DNA, 354 bp, Homo sapiens
  misc_feature (1)..(354): n=a,t,g or c
gagtagtgagtagtgtaattaagtatatactgtatctgtnatttctaacactcacggagaggctggtgggccttgagagtccaggtttcctgacagagccgcacccccttcctggaccaggcagcctaaggactgtgctccccagatggtggggtctgggagcagagatctcaggacaggccatctcgccagggctaagtggaacccactctggggcaccggggctatacttgcttcctgtgcaggcctcaagcaagagccccctctgcctacaggtggggcaggctacctccggataggaggtgcaagcaggccacctgaggggtggctccaggctaggaaggcaggtgacac

SEQ ID NO: 2532 - DNA, 383 bp, Homo sapiens
  misc_feature (1)..(383): n=a,t,g or c
gcaggctgtacnntatttattcaaattggcatagaaagacccccatcaccactaccatctttttaaaaaagcagataacatgaactgtcagacctccagtttttttatacacagcttacaagcttgaaacaatattccattgagagtaacaccaacattctttaagatttacaatttcttcttaacctgaaattttgctttgaaccataatactcagaccttcctgaaacaattctctaatacataaacaaataaccccaaacacttgaggaaaatttactaaaataaaattgagatgtttattacttttctactgacaggcagtgaaaatcactgggaaattatactttngtcctttttaaatgatttacattaaaatcata

SEQ ID NO: 2533 - DNA, 429 bp, Homo sapiens
tttttttttaaggacacgagagagccatatttatttcacatggacaagcatgattccattgcatgctgaacatgaaagctcgtatgagcaaagtacccgtaacagcagaattatgtgcttttgtccacagggagcagggagaatcacaaagttgttttcagagacagtgtttttcaagcacagttgagaccataggctctggaagtcactggtttatttcatcaccaaagggtctgtctcccagggagtggccggagtgctttcagctttgcaatctctcaatgaattgataaggtctgaggagggctgaggatggtctcccatcccaccacccagagcatctttgaaggaaatgaagctcagaggggaaggttacatgccattgggaatttaacaagggccattcctgggttggacaatgacagggga

SEQ ID NO: 2534 - DNA, 347 bp, Homo sapiens
tttttttttcctaaaaatgttttattttaacaaaatgctcaaatatctgaaattgggcaaaggtggagggtgggcaagctggctgaggtgtcccaggtctgtggctgcctagctgggtgaggggctggtgagcagctgctccagacaccctggacttcctccaggccccggtagcccgcttcagaccccggggaaggcagcggcaggactccaggttgaggtagagcaggcccgggcagctgctgatcacagagctgacagtgcttggtgtgacccgggtgcccctgaggttaagagagcacagggctgggtttgagcccccaggggtgcttaagaaggcagccagg

SEQ ID NO: 2535 - DNA, 330 bp, Homo sapiens; identical to SEQ ID NO: 453

SEQ ID NO: 2536 - DNA, 380 bp, Homo sapiens
  misc_feature (1)..(380): n=a,t,g or c
tcatttagcaaaggtactatttgtagatattagccacttattaaaaacatattnctattaagattgttcttacattcttagatttagaacacctgatatctggacccagctgagtttttattttacagatcataaaacggatgaaagtatatcacagtaattaatgaagccgttctaatttagcttgaagagatttaaaattcccagtgatggcttgtactgctactgacgagctcatagactggagctcaacaaggtaaccacaaacagcatccaggcagagatttgtaaatcttctcctttcacaatttaaaacttggctgggattctcaacatatcttgatcaataatacatgtatacaatccaaaaggtgcagtgg

SEQ ID NO: 2537 - DNA, 404 bp, Homo sapiens
  misc_feature (1)..(404): n=a,t,g or c
tttttttttgagcagcagctgtttattgaatgaagcgaaaggaaagcttccacatgctggaaggggacccagaagggttgccattgctagcttgggcggctagagctcanatccctgttactccctcccctttctttctttttgtccattaagagtggttcttccttcaatcccccctnggagtggttaattttgaatccttcattcgatcagttaagaactcaaaaccctgagtcangggggtcttttgtaaaagtccccaaactggcccaggaagtcccgccaactccacccctcattaggatgcatcactggcctcgtgcaccggcttcaccagcactngcacccnaatcaaaacaggggccagcaaggngcctcacccctgtaatcccagcactttgggn

SEQ ID NO: 2538 - DNA, 547 bp, Homo sapiens
  misc_feature (1)..(547): n=a,t,g or c
atttttttctgcaatgtttaatgaagtactgaaaatgagataaggatttatcacaaagtatatggcaagggagaaaagatgcaacattattttatttcgagctactagatggttctcacaaattacacagggagtgatttaatgattatagacaacgtaaaatacattatctcattctgttttagagtttaaaagaaactttgagactaattcaatttcttcatttcttaattgaggtaatggatttgagagtccccttgctataagtacctcttcttgcgggactcatccttacgtgaaataccctcaactttctaagaaaatcacaaccacttatattttttcnatgatatcttatggcacaacaattacatattgaaatctgcatttctaaaatccaaacatgcattctgctgnatgcacaatcatgtgcagtgtctctgccatggggggtgcctttccctaaccaatcttccagctataaaagggcatgaatgagganaccctgggaaagggggtacatccttgaaatgtcacacccagatgc

SEQ ID NO: 2539 - DNA, 467 bp, Homo sapiens
  misc_feature (1)..(467): n=a,t,g or c
agaatttacacaatttattaattttagtgttgtacttacaataatactatttaccattgacacagatgcatttcaatagtttaacaattgagacagtcatgctggtctctatcagtgaaatatcatatctgcttataatcccaaccaatactcggatattattaatcttttaaagttttgggaatccgagaggccaacgttgttaattcacatttaatcatgaacgaatttgtgcatctttacatatattacgttggtctttttaccctccccttgaattgctgatttatatccctagcccattttattgatttataaatattaatattacatacatganatggattgtccaagtatttcctttggcccatttnaaatttactggataaatgtttttnttaaagaaaattaagtccctttgtctacataagtcctacaaaatatttttccccaatttggtaggttcg

SEQ ID NO: 2540 - DNA, 300 bp, Homo sapiens
ggctttaaatccaggatatttatttttaaaccagcagctggggaaatgtgacagggtaaatttttggtaggttacaagtagattcattctgtagcaaaggagggaagtataagacagtgtataaatctgtttctcaaaaggttgatgtaaatagtggaaccatgagtaccaagagcaaaacactggaaacaacttatatgtctgtaagcatctcctgctttccagactatggcccctctgtataatgcttgccacgttcttcatgagaagaatgagttccatctcagcctgctgggattt

SEQ ID NO: 2541 - DNA, 407 bp, Homo sapiens
taactgttctgaaaagtttatttttaaaaaacttagagagagagagagaatcaaaataacctatgaagatttatagaaaacacaccaggtaaggaagggttctttcaaagcaaccacaggaacagttacgataacttaaaaagaaatgctttccacactgaactgacagcgctgcagcccacgcctgagtggggacggcagccccaagcccaggggaacgcgccacaggctggacccaggccaggcacacctggggagtctcttgctgctgaaaacctcagccatttcacttcatgtacttatcctgctggtcagccaggattttggcggaggacttggcatcatagaaaagttcactgatctcttcgacatgctctttctcaatggctgtccttcccgttgatttt

SEQ ID NO: 2542 - DNA, 303 bp, Homo sapiens
gaataagacttggagccgctttaattaaagacttttttttttttttttttttttaaacattagatctctaattttaatagttgagaggaaggttataaaataaaacagacaacacagagcttcatgacggcctcggattggcagtcaacccagggatacagaaatgtaaacaaaaacagagcttccagataacattactgtgtgctatgtgactttcagaatacagcagcgtcccagacactctaaagtcaagtgaaacaagagattttagaatcaatctatacacatttcagagggcagtcc

SEQ ID NO: 2543 - DNA, 330 bp, Homo sapiens; identical to SEQ ID NO: 2176
  misc_feature (1)..(330): n=a,t,g or c

SEQ ID NO: 2544 - DNA, 253 bp, Homo sapiens
  misc_feature (1)..(253): n=a,t,g or c
ttttttntnatttcacagggtttattttatatttaaataaatcccaacaaatgtattcaactataaaatggcagcatacaactgttatgtggcagaaaatagtaaggcataanttagantantgtattgnnccttacatctgtagatatacttaacatttccaacatttccccatctaggattactctacatttttnctgggatttaacacttttcttaatgtgttgtattcacccaactactaggaccagga

SEQ ID NO: 2545 - DNA, 304 bp, Homo sapiens
  misc_feature (1)..(304): n=a,t,g or c
ttttttttttttttttcttagtattaaattttattttaaaatgttaaaaacatgattaggnaaaaattcccactctacccatccccccaatatctatagaacaggattcagagcagtatttgtcaatgtttgcctaggatgatcaggatgtttgaaccactgggagttttctttaaactgtgtatttctgggtctactccagatctacctaatcagaatctctgagggtggngtctacaactgatttttaaaaaacgntcccggggattgtttttatactaaaatttgagagctactgggttta

SEQ ID NO: 2546 - DNA, 438 bp, Homo sapiens
  misc_feature (1)..(438): n=a,t,g or c
ttttttttgtgcttcttatgtttctctgtgctgtattctggaagtggtcggataccatcgtctgagctgggactattctgataagatttctctgctatggaggagcctgactcactttcactgtccagattctggggggtatatgctggtgacttactatggctgggagagccacgctcatgctttggagtggaaccactgatgagtggagagccatagtttttagaagaagccatttgaggcctaagcccttctccactactttccccaggtttctgcaaagtcactttggctttaatgctaggggagcctccatcatgcttactgatgataatttttgccacacctgtgctccccacattttttgactctgaggtcttcttaggaagaatccactgaactcccggagtgggaaacctttngatttgtctttatcac

SEQ ID NO: 2547 - DNA, 444 bp, Homo sapiens
  misc_feature (1)..(444): n=a,t,g or c
ttttttttttttttttttttttgcatatttataactgtttaataaactattcaaaattagcatctaaaataattatactttggacacacgaaggcatatatttggngagaacattgtaattttcattttgtaaactatatattctatattcaagtaataacacagcattgcctatacagaactgaggcctgcgctgagacccaaaacttgtcttttcctaaatgcaccactacggggggctantangnggtctgtccagatgctaagaccaggggacttcaaaatctccatcctgcggctttacaggtctccggggcagttagganctttatctttcagagggtgggagggggcctgacaggnggcttttggaaaccttttgtggcaactcctcccgggggcacattttgggggnctcagttccaacccaaatgccttttttna

SEQ ID NO: 2548 - DNA, 391 bp, Homo sapiens
acaaaattaagtttataaatatttctccactgtacaaagttctcccagccctgcccaccccatcacagttcacatttctcatgtttttaaaatcccaattatatttattttttaaatcataaaatatatttttttctttgttcatatttaaaactatttacaggggcacagagaagccagagtggcccggccgagggtcaggatgagtccgtgcagggggacggagggggcgggaagagatggaagtagctcctctcggtgggcgggcgagggcgggcagctgtcctccgccgacaggtactgggctgtgggggcgtggggtgggggtggataggggtctgagtccgagttcaaatccagggtagtacttgctggccttccagcggctggg

SEQ ID NO: 2549 - DNA, 351 bp, Homo sapiens
  misc_feature (1)..(351): n=a,t,g or c
taaaagttacagttttattttctccatgtttaatactgttaatatttgatagggtattagtatggtgggtacgaagaactgagcctagtacttcacatgaaatgctttttgcatagtcttcataggtgtaataaacagaatcatgattttcatgaatcctatctccaccaatatctgtttggcaaaaacattcagctggagtacagcctccaagaggactaaaagcagaggatcgaataggactaaataaaccactatcttcccttgatgccttcactgggcgaggagaatccggagcatcacacaggttaccatatgggagattctgggtttacgggggngttgggcttt

SEQ ID NO: 2550 - DNA, 266 bp, Homo sapiens
  misc_feature (1)..(266): n=a,t,g or c
cagcacaaaagcgnagttactatttacagctccggctggcacctgcccacctggccagccgcctgcagggaggggtgggagaggggtcagccacatcagcagggaaaggatacgaagcaggtaaagacagaaggaaaatgggcgggtgcggagaaaccaagagggaggtggagctccagcaatgcggacacgaggagacaggagcagaaggggctgggggagacctgacctgtccttcctctctccccccagattcccatccaggg

SEQ ID NO: 2551 - DNA, 400 bp, Homo sapiens
  misc_feature (1)..(400): n=a,t,g or c
gacacgtacacagatcaatgcttgggtttttaattttatcctggagaagctgatcaagttcacaacgaagctcctttaccagttcagccacctgatgggaagcagctacaaaacggatccaaccatcatccagggagacaacgaactctcctctttgaagctgcacattcacttggcctcctccaaacaagaccagcgggtacacagacaccatgctgcagtctcggatgaatactcgactagtttttatcttctcgtggtacancaggtaggggctgtcaaagtgtctcacctgtaacaaaaaaccttagatgatgacagtgatgtcactggcaacaaaaagggaccaaccccccagtcccacggntttaaatactgcctattaatggcttcccaattt

SEQ ID NO: 2552 - DNA, 401 bp, Homo sapiens
gggcttggggggtttattaagtgatgctttagtctcagtctctgccagcaactgggagtggggtgactccactcaccccaggatttcccagacttgctattttagaggagagaggcaggaagccaactatcctctaagccacagcttgggaagctaggctagtactggggtgggggcagcagagctgagaccctccaccccgagcccctagcctgtgctatcctcccagcctgagggggaggagctgaggcaatcctggctgcagcctcccacacacagccctgctcttggtgcgccattcactgccctgagctattcatgatctctgctcccagatattcacctcaacactccaaaagccagccccttcaggtcttcagtcctgcggaaggcaaaaggag

SEQ ID NO: 2553 - DNA, 346 bp, Homo sapiens
  misc_feature (1)..(346): n=a,t,g or c
tttcagaaagaaaggataataaagacgtttatttgcatttgtcaaccaacttaacatacagctgagaaagaaagactaaaaaccctctaataaagattgttaactgacagaagcattttgtttttgttntttttttgagacagggtctcgctctgccacccaggctggtgagcagtggcacgatctccactcactgcaactgccactttctggactcaagcaatcctcctgcctcagcctctcaagtagctggaactagatacacacagcactgcacccggctaacgacagaagcattcttatgatacgatctcctctcggctcacttcatctttagtcctggagg

SEQ ID NO: 2554 - DNA, 412 bp, Homo sapiens
  misc_feature (1)..(412): n=a,t,g or c
tttttttattcttgcttttcttaataaacactatatcataagcttttccttatttcagtcttcaaagttataattttaatgtcttcacgtgatgttgtccagcgcacttatcataatttactagttggtttccngattattttaatgcttttatcctaggaagtcaggaaaaactctgcatacctatcctaaggcacttcctcattagctgaatggcaagtatttttagcctagtgaaaaccagcggagaagaaagcattagggacttacgttaacagccagcatatcattttcaaaggcctcacgcagcttcttcataatctctatctcagcactgggcacaggcctcaactgtgcccttcacagtggatgggntctttccggggttggtatatggctcaaatcctggcaa

SEQ ID NO: 2555 - DNA, 441 bp, Homo sapiens
  misc_feature (1)..(441): n=a,t,g or c
tttttttttactctttgtggcttctttttattttgaatcaataatctagaagtgaaggtctccacagcccattatgccttcactgatccacctacttcccatgaacacctgccgaagaaagaaataaggcagcatgtgctaagatgcagtgctgcttctaaacataatttgtggggggcaggcatgaaacccaagttcagaagtgcttaagtactgaggtgattactcaactatgaagaggtctttcaagcgcacagttgatttttagcaagtacagcgtatgaagaccttcattttgattttataaaagtaggctatgttgcatgagtatctaaaagtggctgaaaaaccgactgcatgcttttaagcctaaaaataaccaaggagtaggagcccaaacatgtacatttcagcaggaaaagtgattaaacagganagcga

SEQ ID NO: 2556 - DNA, 536 bp, Homo sapiens
  misc_feature (1)..(536): n=a,t,g or c
aaaataaaaccaacttttacttctctctttgccaccctttctctccaactccagaaaacctgatgtgctacaagaccactgtttgcaaactcaaatgaccataggaactcagcaagtcatataaatgagcgggaaatgccagatggaaaggcctatttggacagagacatgggtctaagaaatacttccctttcttcttcgctgtactttaagataaacaccaaaaacactaaaagcaagccatgatgaatggcacgtggtntttggtcaggngcccacgggagggtggggggatgggtggccgggccgggtngaattgtgagttctggctccggctcagctcccaacaactgtgggttttntcggagcctagggtcgagttgccaaatctttgggatttttcaaaagacacccagaaaacctgtatttgggntgtaaaatatcccttttcaattttcactactnactcatatcactttaaaaacactgctgggggntcaggtccantaaatntgacanccgcgggccagttcccg

SEQ ID NO: 2557 - DNA, 273 bp, Homo sapiens; identical to SEQ ID NO: 493
  misc_feature (1)..(273): n=a,t,g or c

SEQ ID NO: 2558 - DNA, 456 bp, Homo sapiens
  misc_feature (1)..(456): n=a,t,g or c
gctggtcttntacttggcagatgcacttcaaattaacctgttaaattaggtcatgttctttgagttttgtttctaattcaaactaatcagaattctttaactaatgcttttgaaaagttatctggccatatgaccttggtaaaaagccacaaatacatttgcttaaaatccaacctcaagtcacaaacgaacaagaaagtaatgacatcagaggatgtaagccagtagtctaatactcagcccaccacggtnttactgggagtcgctgacttttaacatttaattatcaattttttttttgggacagtctcgctctgntcacccggggctgggaggtacagtggggtgtggatctcgggcctcactggcaacctctgcctcnggggggtttaatttaattcttgggcctcgaggggccnaaaatttccctataggtgaggtcggtatttaaattct

SEQ ID NO: 2559 - DNA, 361 bp, Homo sapiens
  misc_feature (1)..(361): n=a,t,g or c
acctttaaaatttattacataagctatacacacaaaatgaaatcctagttataaaagatgcatctagaagaataatttataataaaccaacaaaaatgagaatgtgtatctccaggnntataaatatatttaaatgttctcagtgactggcattgctttatgcattacataagatagtatgtactaattaaggtnttgaattcactgggttttagaaggctttaaaaaaaatccngataantcaacaacaaaantacagctcaactttgaactgcattaaantcccgantctctcattttgggtgaccnattccttattcccctcaaaaggtttcccaacaggangctttttcacaaactg

SEQ ID NO: 2560 - DNA, 375 bp, Homo sapiens
  misc_feature (1)..(375): n=a,t,g or c
ggtcttgctatatatatggcccaggctggccttgacccagcatcaagtcgtcctcctgccttgggtcccaaagcactgggattacaggtgtgagccaccatgcccagccagatctttcttgtttttgatgtagatgtttattactaaatacttccctcttaaaactgctcttgctgcatcccatacatttttatatgttgtgtttctgttttcactcattttaagacatttaaattttgtttcttaatttcttcattacccattgggcattcaggaatcatgttatttaattacccatttatttgtgctgcctttaaaaggncccccttggttattgganttccagggggtatntcattgtggggcaggaaaggg

SEQ ID NO: 2561 - DNA, 459 bp, Homo sapiens
  misc_feature (1)..(459): n=a,t,g or c
caaaaataagtgcattttatttaaacaacggaacaaacatcagagagcatcccctgcaaagcccccaccccagagcctgctgatggaagcggggctgcaggacgctctgccacaacggcagcatctccaactgcacaaagaccccttgctgccagggccgggcaccgangncttccttgcctgcctgcctgaggncncgtggaatcagggcaggggtggcacaggtagaaaagacagatgggaaacaatgcccatgaatatacccaaagtgtcccagggngggataaaagccatcatgagggaccagaagccaacccagtctttttttgggcctcctggggagaaggttgttttttgaggacctgaggactccagctgnaaatgggctccctgagggccccccaggggagcagggaggggggtntttctnagggncagcccctnaggggaaaacacagt

SEQ ID NO: 2562 - DNA, 451 bp, Homo sapiens
ttttttttttcaggtaaaaccacactgcctttatttggctaaagaacaaaatccaaaataactcagaacaaactaagaacagacaggaaaattacagactgaaccccacttgaggaagacttccccacggactcacactggtgatggggcgaacgttcaagacgaagccagcagtcctttccaagactcttttgtcttttagggatcctcaatacaaaacaacccaactaatccaggatatgtgttcaaaacagtcagttttccccatcaaaaggcgggaaggcccacttcaaacctccaggaacacaacccaagtcatcccagtgttaaacctggtgcttccgttttctgcctcaatccgagcgctaacataaaatcttggcagacaacaatctttcttcttcaagaaaattaacatttaatggtataatcccaagaacatgttctactt

SEQ ID NO: 2563 - DNA, 429 bp, Homo sapiens
tttagaggtctgctcatttattacagggccatgttttagctcttcctggatcgtctcagatctgccattcctctggatatgaacctgtggccgtggcagaaacccagaaatcagtaggggcttgttgtgttcttgtttgatcttcacgttaagatgctattgagcttttttatccatggatggtcttccaacaactgcatccctcacagtggcctgagtggaattaccgatatgagaagaagcctgctccaacacatatgcggcaccaaaatcaatagctccgcccagctcacgatattgaccagaatacctgatgtagccccaggtgaggagtgctattaacagtaagtccaaccatacagttgaacaacttgggctacaacctcaagacctatgaagccagtgaggcctgaggctatgtacaaagct

SEQ ID NO: 2564 - DNA, 390 bp, Homo sapiens
  misc_feature (1)..(390): n=a,t,g or c
taacctgaaaagtataattcatggcaggactctatttcttctgccacaatatgatcaatagggtttcagacagtgactctcataacaccctcggagcgctcactctctttttaaagagtttattcttttcaaagtcgtgtggattaattccagtatgtcaagtcaaactttggctataaaatgacatggttgaccaagaaaaacacttatgtgctcacaattttccatccagtggcttctgaacatttaagactacctgcccctgaccaagtcctgttttgaaaatagcttaaacaatctattcaagaaatcatactgagccttttctttactggggggatggggcagaaaagaattagaacacacaacnaagcaagggaagagaaactt

SEQ ID NO: 2565 - DNA, 273 bp, Homo sapiens
acgttttgtatgtttttttatttgctccaggtggggttttgactgtcactttcccacactctggattagttctgatcccaccacaaggagccctcgaattggctaaagtgagaaactgggcctgaagactccgtaccctctgccatcttgccgagggagtctccttttagaaaacaatcaaagggttattgcatgagtctggatgaatcccactctcagctgtccacgggcccgaccacctcatctagccccctttttggcagggagaacctg

SEQ ID NO: 2566 - DNA, 282 bp, Homo sapiens
  misc_feature (1)..(282): n=a,t,g or c
ccaaaaaatcgctttcctctttaataccaacccaccccaggagacagctgtccacccccagttggggaaggggccacactgcccccacctccttgttccagggaacactcatttccctacaggtgatcttggggagagactgttcccaggcaaccctggagtctggttcagcgcacaaatctgtccagggcagatggccgggcccccgtgggcttggncttcgcctccttatgatgctgctgctgaaggctctgccggaccttgtcctggggaccggagacg

SEQ ID NO: 2567 - DNA, 369 bp, Homo sapiens
cttaataaatttattcacaaaaagtgatattgcagagggtctgggggctgtacatgggcaggggcttggtgagctttgtacatggggctgggagacaagggagcctccaggtggaagggtattttttaataaaaaaaataatggagctacaaccaccccctcccccctccccgattaaaaagacacaaaaatagacgtctctgaggtaaacggggagcctggggcttaagggtgtttaaagggcttcacaggtgccagagcttagaggtgtcacaggcaccggggtggctcctgcatcagttggtagaacagcacgtagccctcgctggatgccacctggttttcactgacaggggagacacgagagtc

SEQ ID NO: 2568 - DNA, 325 bp, Homo sapiens
cataccaccattttcatttattagcaataacagaggaaataccaatagcaccaattcaaaatgaatccacatgacgtgttttatccttacagctgtaataactagtaactaacatggattggaaagcacttcgcaaatgtaaaaagtgctgtacagatacattataattatcatcattaataaattagcccgattctcccagttcaaaaggcacgtaaggtcagatacatgggcttcagtggggcaaaatgatcacaacctacaatgtagcaatggttcacatgtgttggtaacaagttttaccccatgcaatcctgcagagctg

SEQ ID NO: 2569 - DNA, 450 bp, Homo sapiens
agattcaagtttcagtattcttcttcaggtactgaaccaaaaaaatgtacatttaacattaatccaaagtctaagcctggatatattattatttggtggcagggttcctaaaagatggtctcttgctccttcagtgacagccacgttgacagaccacagaggtgcaaacacatgcacactaaagatttcacagctactcacaagtgacgagactgaccacatcgaagcacagttgtccctaagaacatacagctcaaaaatgttcatgttctctttaagaatactgaagtataaccatcctcatgaagattacagctccttcttacacttgtaggcactggacttactctgcaaggctgttgaagagaagaatctccagctccagtgtagaaaaataatacagaatacgtgagcacttccacgggtgagcctgcctcagaccacttccct

SEQ ID NO: 2570 - DNA, 433 bp, Homo sapiens
cagagagtcttctaaattttatttagaataaaaccagcatggtagaaatacatcagtgatacaagtgaaaaagaacttgattccttaataaaatgacttacaagtgcaaaaatggaccccatatgtgctctgctttacttacacccaactctaacctgcgagcatattaggaaaaaagaagcaagtgcatccaataaaattatttgtaacttaatttgtatgaggcgggacaaggttgcttttgatccaagtctggtatttcttggttaacagggtgtagattccaggctttgtggcaacaccacattcatgacctccagagactatagcgtgggaagacacctttacagatcaaggggccccctggagtcacccttacaggaatccttctggcctttggaatcctcctggcacagaccatgtctttggtgat

SEQ ID NO: 2571 - DNA, 246 bp, Homo sapiens
tttttttttccacacacacagcctttattgagcagctactgggcagtgacgctgccgaggcgggaatcccaccacagtcctgaccgcagctgggacccctttgcctcctctgacacccccacctcaatttgatacccacttcctgagcaaatgtgacccctagggcctgggattcccaaaatgaccaccccgaaatgcagcggccccaccgtctcctgaggccggtgagcaagggggcagcagtga

SEQ ID NO: 2572 - DNA, 427 bp, Homo sapiens
  misc_feature (1)..(427): n=a,t,g or c
atgatcaacaagtttttattacataatactcttgatattccaaacaattcagcactttgtaaaaaaaaaaagaaaaaagagaaaaccggatcatggtaagtttgctatattaacatatcacgaagaaaactggaaacctattgatctatggaattgacatcttcgcatggatgctccacgcagcacgcttgcttccgtctggtgagtgatcatctttcggccagggctggaatatttggcctttctctcctttggctttgtcacccaaaaaacacgacctcagtggtgtcagctttgaacatgctaatctgcctnggcaccaccccattttagagactgtcacttggaggccctgaatgctccttcccattncctttttatgcaggctgctccatgnggaaanaaaaaaaaaaaacacaaccncaaa

SEQ ID NO: 2573 - DNA, 392 bp, Homo sapiens; identical to SEQ ID NO: 534
  misc_feature (1)..(392): n=a,t,g or c

SEQ ID NO: 2574 - DNA, 561 bp, Homo sapiens
  misc_feature (1)..(561): n=a,t,g or c
nnttcacnttcagtcgcagtttattaaagttagaagtgtctccatccaccccctacagaggcttgcgtggtggttccagtctgctaaatatttcagaatggggacctcattctatctactgatttatcaaatctcattaattaatttcccttgctgatatgaggggttgggagagaagggggacgtgggaatgtaaggaagagcgagagtggtcgggctcatggggtttgatggactgtgacccaggctggcgttgctcctctccggatttcactcctggctgaactggtgccttcggtaaacagctgcttaaagagtgcggggactgctgcagggacttcctttttccatcagcgccactcgatggctccgaagtccgtgtagcaccaccgctccccgtgttctctgagctggcttagcttgaaggaacctcacaaaaccaagcccggatcgctgtcagccactcactcagtggccgcatggagctcctcggacagcgcaacgtcaaatgtcttccgtatcctgagagctcgctcctttgaccagaaatcntcatcctna

SEQ ID NO: 2575 - DNA, 565 bp, Homo sapiens
  misc_feature (1)..(565): n=a,t,g or c
ttcaatcaacaaggctttatttacactccttaataaattcaggaaacaatttgatgtcatgtgcagccgccaaaaatagacaatgtagcacatcccactgtctggagacagctacttgtctatgctttaatagtaacccacaggcagccaagtagggttccatatatccaggtgttcacatacagcttccttccagcatcggtcataagcatgcctgcagtcaaaccacttaagatcaacattgatggtaaagtcttcttgatacttaatttggaattaacacttttcccaggaaatctttttcttctttctggatctggtgactcataaaattctataagcatcttatctttgatttcgaaacgttcatgcagccatcttctcatatgttcttngttcttctgggacatcttttttgtcgatacgatcaatgtgaatatgaatttttggacattctttgcagagaaattccgtcatggtcggtgactctccttcgctgcctccatcgtctttcccttcataaccaccgtaacatcataaattgcatctaaataattcctcatgg

SEQ ID NO: 2576 - DNA, 405 bp, Homo sapiens
ggaaatgtgttaggggtctgaagctttatcttcttggcctgaggagtctctgcctccttggcagcctcattctgcttccgcttctttaatgaacctgatttggaaactaccactgccgcctttttcttttcttcttcctcctcctcactgttcttagctgcttttccattctgggcagtcagtgcagaggtgccattggccttgggggcttgtggtcttggagagcccttgcccttgagcttctcttcctcttcctcactggagtcatcagaagaagaactgttgctgctctcagcctttcctttctttgcagaggctggcttggaagggggctgcacctcctgctaccttctgtgggcttcttcttaactgcagacttaagatgtcctctcttcctcctcctca

SEQ ID NO: 2577 - DNA, 441 bp, Homo sapiens
ttgagacttcaaaatcccagttccacagaactgattttattagccaatacataccaaagacgggtggaaaagaagtattatttttgtagttttctttcataatggaagccttatgctattacagactgcagttttccagtcttttgattaagccttgccagttgtgtgccgctgcagcaccaaagaaactgttttgcagcctgtcacctcctctggcaggcagccatcctggtctcggagagtggggtcagcaccagactggagcagcagctctacaatatccagaaactcacaggcagaggcataatgtagagctgtttggccttcattgtcctgacagttaatgtcagctctatgttgcagcaacactgtgactagttccttatgtcctcgatcacaggcccagtgaagtagagccctaccctcttcatctttcacaaa

SEQ ID NO: 2578 - DNA, 441 bp, Homo sapiens
  misc_feature (1)..(441): n=a,t,g or c
tttcatcaaaacttgggacatacatcaacttcatttcttttcagtaccttaaaaaaaaaacatcagttctgggacataacaaagaaatactaggagaaatggtatctggacaggaacagaaatgtccacaactgcgagggattttcttttacactggccacagagcgtttattgacaccaccactcctgaaaattgggatttcttattaggttcccctaaaagttcccatgttgattacatgtaaatagtcacatatatacaatgaaggcagtttcttcagaggcaaccagggtttatagtgctaggtaaatgtcatctcttttgtgctacngactcattgtcaaacgtctctgcactgttttcagcctctccacgttgcctctgtcctgcttcttagttccttctttggtgacaaaccaaaagaataagaggatttagaa

SEQ ID NO: 2579 - DNA, 610 bp, Homo sapiens
  misc_feature (1)..(610): n=a,t,g or c
tttttttttttttttttttaatttcaggtcaagtttattatacagaaattatattaatgggtgggataaatactttacaggagagggtcacactctcagacactttggctcccaaagggcttggagcttttgtgaggctgagcatcttccaaccaggtgcatgcactggtttgccaacatcctcaccacgcccaatccagccccttcacacactgacatcgcctacctgggccctcctngnggnnttnntttttatctaaccagtgtacacaacatatttataaccaattaatacgtgtgagtcatgatttgtttaaaatgtcagcttttgtgaactgaaggggatgggcagaaggcaggatgctgtcctggtcaggaatgtgacccagattttaacactgctcctgcacgcggtaccatggttggtgacgctggtgaagtcgtcaaaacggagagccagccagctgcggtgttggggtcnaagctgaaagggtacagattccacagatgcagcatcttcttccagacgcggtactgcaggagcccagtacttgcagacatcgataagcagccggctnggctngctctggctccatgggcanaaaatccg

SEQ ID NO: 2580 - DNA, 453 bp, Homo sapiens
tttgcagggagtgcaacatttatttcataacagaaccccttttccacagagcagctgacagggggctgcatgaaacatactttggaaattaaagtgaactctccacttgggcataatgttatgtgggcacatggattggcttaaaagggaaacaagaatacttcaacatttgatcaacagtaggcagttgctggacattttagaaaaaggagaaatccattttttgaccatggctaaacatggggaaacagcatcacattttcctgaaccaccctaatcccagcccctcaagatccaccaggtatgcaaccccaaaccccagtcacatacattaaatctacacttttatttttttgttgtaaaatgtgctttttcctcaatgaactttaatcagtccaggacctacaaacacacacacacacacacacacacacacacacacacacacacaca

SEQ ID NO: 2581 - DNA, 271 bp, Homo sapiens
taaaagtgatcatgttttaattatgggctaaaaatgactaatacagtaagcttgaatttaaaaaattaagtctaaataaattgctagggaattccacaatgggagtcaatgaaaatttttctctacatacaatatgatcattaacagactagttcttatttggaatgataaggcaaaaatagtaaaaccacacttttcctataaaaagttacacattatcttctgtagggatagctatcgtacatgaagaaacaaagatgtgatcactcta

SEQ ID NO: 2582 - DNA, 279 bp, Homo sapiens
  misc_feature (1)..(279): n=a,t,g or c
gaggtcataaagaactttaataattcagagaagaagttcaaagtgtatttaaaagttgagaccctgctttacaatattttataattttaaaaaaaggcgtttaaaggtgataggtgacttaataattttccactttcaaaatgggtttctagacactgttgttcatgaaccaaaaacaaacaaacaaacaaacaacaacaaaacccaaacactttggcaagcaaagtattattagtacatagcagcttcataacagtttacttttttaatataaagngg

SEQ ID NO: 2583 - DNA, 416 bp, Homo sapiens
ggaaatgaaattatgatttattaatttacataaaattactttatacattaaagaataatttttcaaattgttaaaaaaacaaagtctgaagctgtcattattgggattcgtgggacgtggtttgctcttctatcacctgcttcacaatttctgccagttttagtcgatctactttatctgtgaatccacgaccattccagctgaagctctgcagagtatctcttaggagtttgcattcccggttatacttccaagcctcctgcattacttcattcagtttctcatcttcattctctccagcctgggggagaatacactgagcaatcacatctcggagtttttccaaggcaacattggaatcctcggctccattctcatggtcgtggatatagacactgtcctttggcttggtggca

SEQ ID NO: 2584 - DNA, 189 bp, Homo sapiens
  misc_feature (1)..(189): n=a,t,g or c
ttttttaatagagacaagngtctcactatgttgcccaggttggtctccaactcctgagctcaactgatactcccacctccgcgtccccagtgctaagattacagctgtgagttaccgtgcctggctctccaggggaatatttttaaaatttaagtcagatcactcctttgcttaaaaccattcaatgcc

SEQ ID NO: 2585 - DNA, 459 bp, Homo sapiens
  misc_feature (1)..(459): n=a,t,g or c
tttagtgtaaattggcaaattttatttaaacctaatgaatccatgtaagactggactgtactgtctcgattatggagtctcattataacagcatccttaggggttacattgtggcactacctaaaaggtaaaagtgctgcaataagggctctgcaggcaattccatcacaaaaccccatggaataggatcacctcccaccaatcttttgctaagcactactctctggtaaagagtacagaagtttcaatgttttgatttttttttttccaggttggcatgatacaaatggcagcacacaaaaacaatgttaaaaaataaaccaaataaaaggctgtacacnagaactttatgtttattgcaaacaaacnaaccaaaaaaaaagggaaagagagggaaaggggaaaatggtcngaagcnccacnttttagggtaagaattttaaagcntccttacantct

SEQ ID NO: 2586 - DNA, 536 bp, Homo sapiens
  misc_feature (1)..(536): n=a,t,g or c
atatttcatataattctgtacaccattttgttgtaaatacgagggtgcttgtgttctataaaatctctctgttgaatccaagtatgccttctcaaaattgtccctataaatttgaagtttatcctcaggattagaacaaaggttaacataggattctcttactccaataaccagctgagaatcaaaagcttctcccaatctctcagcatgtaccagcttcattgcactatcttggagtctgttttttatgtttgaaaagattgactcattccatgtatcaagcataagtgcctgtgcctgcttaataaactcaagaatatcttcttttaaagcctgatgnattttntgctggggcctttatcatccccaaaggacagactggcatggcacatccggaaaacaggatcaaaccactgctggttttggtaaccagattcctgggcggtaaaaggcttcaaaaccaatcggggcgcataaaatccccatttgtccttcaaactgaggagaacnttattcnttnacagattagacgtngc

SEQ ID NO: 2587 - DNA, 531 bp, Homo sapiens; identical to SEQ ID NO: 2272
  misc_feature (1)..(531): n=a,t,g or c

SEQ ID NO: 2588 - DNA, 401 bp, Homo sapiens
gagggtacatcgggggagaggagaggagaggagagcctctctgtgccttggtttcccatttgtgcattcagggcctctgcaggctcacacagggagtctgaggggatagtgtttaagtgagcactcaggcttcctctgaggaaaagaaatgaccaaagtgcagacttttattactgccattcctgctcctaatgggagcaggagtcaaaaggaaaaacaaattaaaaggggctaatgagaaaggaggagagatgagacagagagtgtgaagggctatgcgcgtggcatctcataaattcttattgagaatggcacaggtattaaaaaagtttctgggtagtctacgagaaatgtcaattattatctctactacaactacttacatatatctaatgggaaaa

SEQ ID NO: 2589 - DNA, 350 bp, Homo sapiens; identical to SEQ ID NO: 24

SEQ ID NO: 2590 - DNA, 387 bp, Homo sapiens
attttcaattctcctttattaacaatgatacaggcattcatcagcatagataattaaatgaaattaagtattccagatttcttccctctccaaatcatggcttatatctaatttcactaacaaggaggtaaagatttacatctaggaaaggctagaatattgaaaaagaagtccaggggagagcaggtaccaaatctagtgaagtacagtaaactgcttgggaccagcaaactaggtagcatatgggataatattaggagacaactgcttaaccaagaaaatgaaaatacaagttctattgagagaaggaggcaaactggtaatgtctctgaattcacaaaccatatattgtattaatgtaatataattaatgtataattgtattaa

SEQ ID NO: 2591 - DNA, 155 bp, Homo sapiens
ctgacttgctgttgttttcttttttccccatttcttttagggactggggtaggaggggacaggaagaaaaaaatgtcattcgtcagttaggtcctgaacaaaaagaacttctgtgtggctgagtccggcctcctgtagcgtagggggattgggcc

SEQ ID NO: 2592 - DNA, 331 bp, Homo sapiens
tagactggggaggagaatcctttatggtcacaaatgcttctggctcatcgaatgggttcaaatactgtggagtctgcacctctttaaagggattatagctgttattataaaaagagtcttctgttatttctaggtgaagctgtttcagtgataggttcttctgagtcaggatctccaaatggatttaattctgcagcatcaggatcatcaaatggatttgaattcacggtggccaagtccttttctgcttcatccaaaaagttaagtttgttgataagctctgtaattttagctgccttttcttcttggttcactctgttctcatcatcat

SEQ ID NO: 2593 - DNA, 191 bp, Homo sapiens
tttttttttttttttttttttttttgacatagatacttatttatttgcatatttaaagtttacacacatgctatgactccaatgttttaaaaaaataagcccttaacagctctgagacacatggcctcttctgtatcccaagcaaatccctaaatggaggtagagcacgtgttcctatttttcacactctc

SEQ ID NO: 2594 - DNA, 265 bp, Homo sapiens; identical to SEQ ID NO: 1564

SEQ ID NO: 2595 - DNA, 193 bp, Homo sapiens; identical to SEQ ID NO: 1350

SEQ ID NO: 2596 - DNA, 355 bp, Homo sapiens
aacaggaaaaaattatttaatagtataacaaaatgcaaaataaagtacccaagttacaaaacataaattcctttggttcatgatcacaccactatttttaccttccacatagctacagacatcacaccctcaaagtgaagtcaaactgtccccctcatactgaagatgtcatgccaaaaccatcacataccccactgttcagtgaaactgttggcaacttacatggaacagagctgtggggtaggaaaaaggggaaagggttgcgttaaaaaaaatggggagactctacacatgcagaacaagttagtgggagggagtgctctgctgggtcaacacgccatgaaccacaccccta

SEQ ID NO: 2597 - DNA, 355 bp, Homo sapiens
catcagcaatttcaattttatgttttctacttatttttatataagaatacaatgcaacaaaatattcatatattgcacaaacagtgatgtgcatacaaagatgctaacaacattggctggtaataggctttaccatgttacgatctaaatgcttgttcatcagagaatgtacaaaattctaagtttggcatccaaaagggggcttacagttattgaatatttttcccagccctattttaaatcaaattcaagtttgcctatgacaaagactgtctataagtaacagggcaagcataccaacatcaaaattattcttcttcttatctcacgtgcccctatttctcccaagtaagtg

SEQ ID NO: 2598 - DNA, 297 bp, Homo sapiens
aaagtaataaacttattttaatagtgcaaaatgtaatctgctttccaaccaatgaaagaaaaacttgcaaaaaatttatgaaactagtcaataccttgaacaaagaaaaacacaaataactaagtaaatattacaattgtgtactccaaacccaaaaaagcagagaccgtcattacaagccaaatcttttttagagttggttgttgcaggttactaaaatgcgtaaaacaaaatctctacttttcagacttacagaaaagaaataactccaataagaaagctaacttaaggtttcat

SEQ ID NO: 2599 - DNA, 456 bp, Homo sapiens
tttttttaaaaaattatctatatatattttaatatgcaaaaacaaatttacagatatctacacgagcaaaaacaattttctttacatttttagtaagctgcagcaatgaggatattttactttgaacacaaacatatgaaaccttcaaaaaagtccacattttcataggaagctactttacaaagaaaatacatgtactccagttgaaaatacaaacactgtctgctttatggtaaaaatcccaggaatcatattttctcattttactatgcagaatcagagttcgaaaaataataatctttctcttcttcatctaaagattccacagcattagtgaaaagttttccaataccagagttttctcctaagtctgtgttaaatggggttttccttcttggtgttggagttgagaaatcagtttcaactaattttttcttgatgttgcccagacaatac

SEQ ID NO: 2600 - DNA, 203 bp, Homo sapiens; identical to SEQ ID NO: 370
  misc_feature (1)..(203): n=a,t,g or c

SEQ ID NO: 2601 - DNA, 382 bp, Homo sapiens
  misc_feature (1)..(382): n=a,t,g or c
aactacaaaaataagcactttactaacaacaggattctcagggaatgggggctttcagaggtgtcactgggctgcactgttgaggctgtgtgcatcagtggagatgtgagaccgaaagaaattatccaggacttgctggcccatgcggggctttttccgactgcacggagaggacacctgggaccttttggaacccatacaggtccctggctgttggccctgatacacacggaaaacctttttcatggcggtggaaacagctgcggtgtgaaattcctcctgcgtcancagcgagcacctggtggtacggtggtcactngggtctncccttccaaggccagcccatatacttgatatgtcaacttgatgtgagagaaggtgt

SEQ ID NO: 2602 - DNA, 489 bp, Homo sapiens
tttctcttttgtgcattttattaaaacttgaaagctatggcttgcgccatcaatgacgcctattgggttccaatagcctcatgttcaaatctgactcgttagcaaatccacccaactcaacatcggtcatcttgacattgcaggatattcagcaagtctgaagtttttaatcgggaaggattttctaccgttactgaacaaataaaggttctttgtagcaatggctggaaatgcaacatgagccctttcttcacaccaaaagaactcataaatagttcaccgggtgaaccaaagactttatttttcaaaagcaggtaacaccaaagtactatgtggtatccatattcgttgcaaaaatgataattactggaattttccaaacatcaaatgaagggggatcaatggttaccactatcgttttcaaccaatatacagatgttcgctcaaggtctaggttttatttctacatagtagtattcacatgagttc

SEQ ID NO: 2603 - DNA, 391 bp, Homo sapiens
atttttgtaggcctttattaactcatgaaaagttcacttgctataaatagagccttaacataaagtgattttcggttctttagcacaatttttaaaacaatttctccaacagaattaagtgaaatctcatttatcttaaagcaaattagaggacttataaaaaatctttccatttctatagagatgaaggaaattttaatacagtggttctcaaactggggtccctggaccagaaacatctgcatcacctgggaagtgattagaaatgcaagtgatcaggccagaccctctgaatgagaaattctggtggtcgagcccagcagtctgtttcaccaagcccccgccagatcgttttgctgctgctgaagttgaagaaccactgccgtaatga

SEQ ID NO: 2604 - DNA, 431 bp, Homo sapiens
tttttttttttttgagacagggtcttgctctgtcacccaggctcaagcgcagtggcaccaacatagctcactgcagcctcgacctaccgggctcaagggattctcctgccttattcctgtactaaattattttttgtgctagcttggatatgacgtactgaaaaggcctctacttagatttgactacatattaatactgtagcaactggagtttactctttacagtaaataaaatattaaaattaaaagaataattacatattttgagcttggatagattcagaaaagcaccactcacataaaaggatgaaaaggacccctgtcgttttacaaacacctttagtgctgctgctatcttgatcaataactatgaaatacacccatttcaaatttcagaattaacacaaaccaagattaagtatgtcatttta

SEQ ID NO: 2605 - DNA, 416 bp, Homo sapiens
gatctcttaaatgaaatgatgttctttatttcacgaaatcatcaatcttaagcacgagcaggaataaacaactcccagaagaagcttaattcattcttcctggattttcactgtgtgttattaaatcacaaaaatgacagtccccacactgccctttcccactgacaccaagtccaaccgtgagcacagtgcctctgcgaacatcctggcacccatggtgagcgctggcgaccaggcagtctctggccagcaacagggactgctcaagttaccgacgttggtaggagctgggctcgcatggccagaatggaaccccctagactttccacacgtcacctgcctgaacgctaactacaaagaggaaaggcaacttaaaggtgttttctagatgcagcatcagttagtccctctctttg

SEQ ID NO: 2606 - DNA, 419 bp, Homo sapiens
ttttgattttaaatttcttctttattaaaaaaaaaaagcgtttttctgggttttttaaaacttctccaatacattaaaactttttttctcgccacatagcacttctttcttgcctctttcatttctgctcctggtgttgcctgcctcctgcaagacccagatgaagaaaccttttcaatggtcgagatctgagacttggagctggaggggctgaaggcttgaaggaaggtggttactggtcaaaaggagaagttcatttgcacaaaaatataaactggggaggatgagaccagcacatacacgtatggattgatctacaatccatataaaaaaatagacccaaattgtcattttacatttgcaatattatacaaaataatatatatttttaaacaacacatacccacctacacacacgt

SEQ ID NO: 2607 - DNA, 432 bp, Homo sapiens
ttttttataaaaataaatatttattgccatttgaagctttatgtacacctttaaaagcacatgtacaaatgtgggaaattacaaaaatcaacctaaaaccctttttctcaaagtatacataaatgtacatccaagatcagtggtgctaccatcattagaataaaaaataagtctgtctggacataaacaagcaatcattttaagtgtcattcagatattctcctttatatttaaaactccaaaaaatactaagaggcccaatatatccagaaaattgtgttttcactttaccctaacttatgaatagtggtatacaaatatatttccatctttttgtccagccagcaaatgagagtctgtacccgaccatttcacaaaagaccaatgttggtcagagacaggtgggaggagggcagtacactgaccgagaag

SEQ ID NO: 2608 - DNA, 284 bp, Homo sapiens
tttaatcagacaaagatgatttattttcatacctaaagcactttataatattctctggaaaatctaaaatcattctgttatcctaacatttttatactatcatcattttagaaaataaaaggcctgcgttatatactagaaaaatttcttcattatatgcaaaatatttatctcctctagtaaaggagattaaagaacaactgcaagaggaaggaaggtcctgaaagtgtttcatttggtatctacctaccccaaccccaagacataaagacagataaaggcac

SEQ ID NO: 2609 - DNA, 194 bp, Homo sapiens
aaagaggcacgatctgatttatcagtttctaggaaacaccctctgggaggaaggcaggcagcgccgccggagaccttacaaccgcccgctaaccggggaggggggccggtagggcgcctcgggtctcaaggcgccgggagggtctgcgggccctgaaggtccctgggtccgagccacaagtcggggcagaaccg

SEQ ID NO: 2610 - DNA, 354 bp, Homo sapiens; identical to SEQ ID NO: 396

SEQ ID NO: 2611 - DNA, 398 bp, Homo sapiens; identical to SEQ ID NO: 1157

SEQ ID NO: 2612 - DNA, 465 bp, Homo sapiens; identical to SEQ ID NO: 400

SEQ ID NO: 2613 - DNA, 257 bp, Homo sapiens
aacttttttatatgttatgggaaaacacaatggattcattcacaaacaaaattagttatgcagaaccaaacatgcaaccaaagcacgccagagagacaggattccggagcagaacttaccccacgctttaggctcctgaagcagtggattttgggtttggaggtcatgaactcgttgaagcggtgggagaggggttccttttgctgcttgggagactgggggccgttgggaacagcagagggtgaggcagaggcagg

SEQ ID NO: 2614 - DNA, 501 bp, Homo sapiens
taagcgatattgagtatgaaaccctggatgagcaaaagggatcttgaccaaagggataaatgtctgataggaacctgccttaccacacacaagcagagatgtcagaatatgtcttttcaaaatatgtttttgttgttgttgttatagttttttgcattccttctacaccagagaatgaagacccagattcttagaaataaagccaaactggcattcatctggtttctcacagcatcagtttgataaaaagaatttcactgtattttttttgtccccatgtattttgctttttccaatacttccaattatttgttggtctcactaactcttcaagcctggtgtggctgtaggaacagtaagcacagtggcggtgttgataactgacgtgatgtgggctaaacagacatgttaagtcaaaactattctctggaggaccatggaatgggcatccctctagactatgggagggtgaagtggaaaactttaatgaatatagacagc

SEQ ID NO: 2615 - DNA, 235 bp, Homo sapiens
  misc_feature (1)..(235): n=a,t,g or c
tttttttttttttttttttttttttttttttttctgtcgccacagcagcggacacgtttaatggcaggcgcctctacagttacaagacatgcctgaggtcagttcgcccccttagggagcntccccgagctaaacacagatgacagcgacccagggtgctggaggcccggggtcacctgaggactgcagaagtcctgcgctccgctaactgtgtggacacgcggctgccagggga

SEQ ID NO: 2616 - DNA, 186 bp, Homo sapiens
aactgctaatggagagctttaatcatcacatgtaaaagcaatacattcatatatcaaaattggctccaaattctttatcatcatcaccatcaacagtctagaaatgaaatgacacactaatataaaactttcctgtttataactaaaagatttatgaaacttttttttttaccctgaggctgatat

SEQ ID NO: 2617 - DNA, 565 bp, Homo sapiens
tttggaggtgaccgagcgtcgagttttcacatctttattattgttgttgttgttgttattattattattattatcatcatcatcatcatcatcatcatcgaagtatttcacgtccagagctaagacaagactacaaacacaacacatagaaaattaataaaatagaactttgttttcttctgaggctcctcttcttacttctaggtagtatgtgctccttccagtggctttggggagggggtgggagagacgacaggtctgggatcagggagtcttcaaggcccccgctgaggggacagcgaatctaccattgaaccgtgcacgggggacatggacaaaatgagacgcgacagggacaagagcattttgctctgcttccaggaaacatcaagtgagtccgctcctcagttctcaccaggaagcctgatcaggctgaggcgagttcctcgggaaggaagggcgcgcgggatgctgggtgggctcgagtagtgaggcctcaaagcaccgccggagctttgcgagcggggcgtccaggaaacgctggcccccctttcttcgctgagag

SEQ ID NO: 2618 - DNA, 290 bp, Homo sapiens
  misc_feature (1)..(290): n=a,t,g or c
ctgggttgtgaaatttgtagtttttatttcattatacttyyctgggtttttctaggttttcagcaacaaatactgacaaaaggaaatgaacagttttcgagacttactttaaaacagagttaaaggaatacacatgamatggtaacagtggctgcctctggggtcggcatgggagcmggccttcccttgcagcttgcgccctcccgtaccttttamattttgtaccaggcaggtattacttattcaamaataaataantttctacaaagrrgdtacaggtatatamctac

SEQ ID NO: 2619 - DNA, 287 bp, Homo sapiens
attttaatttttattttttatggtggacagtgatcatttgccccaacagccatctgaagccaatagtcctgattattaaaaatcacaaagttatataaatgttctcctccttttccgaaaaaccatgttccatttttttccccaagaaacagggctgtcctgcaaagccttgaacggacagtgtaacccatggagctaacttcggttcatcaaagtagtgacagagatgttccaataggagacagatctctctggagtatgaagccagtgatgtacacaaatagctt

SEQ ID NO: 2620 - DNA, 286 bp, Homo sapiens
ttttttttttaacttttattaatctttattttaaaacataaccagatgcaccttggttttttacattctctggttgccattcagtctcaaagtaaacaccgggagcatatgataaatcgtagtttaaggaagccatagcacttacagagttcctcgaatggttacaatataaaatctgtcataaaaatcagtaaaagatgcaaggtagaacacagtttaacactggtacaatggcagtagcagctttgcaaatgtttgtctatatgattccacaggactttttttt

SEQ ID NO: 2621 - DNA, 302 bp, Homo sapiens
ttttttttttaagatctgtgcgttttatttttgtaaactatatctaaaacatacctcaatataaaaaaccagaaacaaaataacaaaaacggggtgagaacaaaaaatacagatgacaggttctgtagttatggtactgaactgagcttcctgtcagccaaaactagaagggaaacatgaccaccacctgacttgttgcagaggctttagatctgagcacttggatctgaaaacagtttctctttagatgccttcaaataagggacagtatccttgatgacaatacagtacatacattcaca

SEQ ID NO: 2622 - DNA, 301 bp, Homo sapiens
  misc_feature (1)..(301): n=a,t,g or c
aagccnttgcatcatttttattttcaataaaagtgaattgtcttttacaaaaccatggcgtcctggnaaagttgcatcactggggcggcttctggccaaggaagaggctcttggtggagaggactntgaagccntcggcaggtntgcccncggttgtgctgtcggcgctggctgccttactgacttcaccctgcttcttcttggatttccgggcccctttcttgcctcctgcttttttagatacaggcttcttctggggatggagacttggcctttttggctggggggtgggtgtgatgat

SEQ ID NO: 2623 - DNA, 283 bp, Homo sapiens
  misc_feature (1)..(283): n=a,t,g or c
tagatgataaagagcaacacttttattattcttccagtggctccccaagtcccttaaacccgtgcccctcctcccgtcccccatgcaccctccaaaggagatgacaaaggcggcagtgaaggaggagaaggaggaagagaaacacctttattggaagagctgtgtggacaagagancggggatgagagtgagagcatgggaggtggggtccaaggagctggtgcctttntcagcgccccttccagggactgcacagagacgggctggcacaccctggggtcca

SEQ ID NO: 2624 - DNA, 347 bp, Homo sapiens
  misc_feature (1)..(347): n=a,t,g or c
ttatgtgttgtcgtggatgcggctccaccagggagctgggtaggttgggcgggatctccaccaggtggttcttggagatgtagagcttctgcagcttccgcagtgggctgaaggcttctcatggatcttggagatcttgttgttcaccaggacgagggcgtagaggtgctggagacccttgaagtcatccttgcggactcggagatgtcgttgttctgcaggtccagcagcgtgggtntcaggggagatctctttgggcacanacttcagacccagggtcggagcactgaaccacccgcaggtggccantgggcagccgaaaggacacatgggcgctttagggtngg

SEQ ID NO: 2625 - DNA, 239 bp, Homo sapiens
  misc_feature (1)..(239): n=a,t,g or c
aacttttattttatattcaagataaagcatatacacaattcaatgtggaaataaattactagaaatactctggaaacttttccatttccctctcaaactcacttttttttaagctcataagtctttctacttgattttaagaaacatggcaactataatactaagaaaganctacagctttgtacaganacatagagccttgtcttgactataaggtttagttggngttttaatancaa

SEQ ID NO: 2626 - DNA, 466 bp, Homo sapiens
gcatttaaaattgttttttattgttttgttgggcagtatgaaatatacagtcaaggcagattcgtacagacttgtaaagtcatctcaggaaccttttatgcttaaagtttcctcagccccatttatattcactactatcattcactctttaccactcatatcttccctgctgtctaatcactaatatcttccctcctgtctaatcactaatgtcttccttcctgtctaatcactgagttaagggaaaaatagtcatttacttacaggaatataatgggtattaataacaaaattccatttccccattaaaagctatgtctaagaaaaaaaatagtggaggcattatttaaaacttctaaatggcctggtgagtatagtcttagtttagcttccttacttttttgtattcccaacctggaaatggatgtcatcccggatcatcacagtatggtgccttttcagtacg

SEQ ID NO: 2627 - DNA, 368 bp, Homo sapiens
ctttaaataaaaaatccataaatttattgcaaatctagaagtaccagaatgtcactaatacagaacagatcagcaatcttgtttgtattttcttccaaacatttaaaaccttgattattgacatactgaaattggcatacattttgttttcatgcagataacagaatagacatggagcagatccctcagaaatcagttataaatattaaattgtattgaacattcatagtaaaaaatatgtcgtaaagtgctgaagtcatgtaagtctgcaaaactgccacaagctcaaagttctcaagcagtgacagagatttgctacatccaccttgttttagattatgcctgtttttgacagacactttgtcatt

SEQ ID NO: 2628 - DNA, 405 bp, Homo sapiens
  misc_feature (1)..(405): n=a,t,g or c
gttttgtttttaatttctatttttctggttaactcagaaaccttaaaaatttcttcattttgccactgtcttctctggacaactcttgctccctttccccctgggctgggcaactctatgagcacccacactcctccacgatcatgttctgaatgtcctttttgatgatgttttgaccatcatcatagtacaacatggacatgggtctcagcttggtgggcacacagcacgatttgaggttggcaaaggggctatggccgcnaatgcggtaagtggttgatgactgttgagtggaaggacagtgaggacccggacgtgcctgctatatggctcgggcactcaccctcgcagttagttggcatgatagccagagggagcaatgatccagtcattccagccgatgtc

SEQ ID NO: 2629 - DNA, 476 bp, Homo sapiens
  misc_feature (1)..(476): n=a,t,g or c
ccatgctgtagtcagttacaaccctttaatccaacttttgaaatgcaaaacagtaatggattttttaaaaagtgaaactatctactttttgtttacatagtaatttagattaaagtcacagtcaaatttgcagtgactaaactcaaacttacttaaattagaatattatacagatctcctcacctacagcttccttgtttgactaggtttttagttaagaagagttattctgtaacaggcaactggatggtgagtttgaaagactaatctcttagattagactgttggcatgggcctctcaatcttgtcaagctggatgaagtcnggcaaaatctaggcacttctacaaagtctctcttataaaacaactttaaaaatatacttggtaaaataaataccttcaagactttgtttggtgggggtatgaagctcataccgtgcaaagtttccttttcaatcnatttaatggttaatcc

SEQ ID NO: 2630 - DNA, 479 bp, Homo sapiens
  misc_feature (1)..(479): n=a,t,g or c
tttcttcaatcatcatagtgcattttatttaagtaccaggcaatccaggtgtggttttgtttgttttaatgagtaaaatggagatagaacatctgccttctgggtgatgtgctggactccacgcgcatggctttccctctcttatgtgctgcctctacgtagtgataggcagacaaaaaggaaaggaaatgtcagcttggctccactcccagcagatgagccaatccaaggtgaaagaaataacccatctcaaggtttgcctcttgggtcccaaacaaacattttgagggtgagatgcttgagttgagggatcaactgtgaccaagaaacaaagcacgtctaagtgactcacacaacaggtggcacatggtcagccacattaggccactggtgctaagccccccagaaaaaaaataaatccttaaaatttttggttccacaaaggttttccttaaaagtggaatgggtccnagtgatnt

SEQ ID NO: 2631 - DNA, 276 bp, Homo sapiens
  misc_feature (1)..(276): n=a,t,g or c
ttttttttttttttttttgatttacctattcaggtttatttaataaatacagtagaggttaacagatgatagtgcaagttcaatagaagtagggtgatttaaaaacattctggattacaatgaaaactcacttatgtgggagtttgagcncacatttacagcctccaccagcagaaatcatgcaaataagaaccactgcagagttctttgtccacagacaccatctcccttcaggatggtcctgcttttcccccaagcacctgtgcaggcatctct

SEQ ID NO: 2632 - DNA, 413 bp, Homo sapiens
  misc_feature (1)..(413): n=a,t,g or c
tggccagagcaggctttattggggccgtgtaaaccccagggagaggcaggacgtggaccacagagagtcatgtacaggctgcgctttcacttgtcttctctgtctcagtctcctgaagagcccgaggaagtcaagtctccccaccatgagtgaggggtctggtctgacagttgggccttcagagccaggcacgtggaccgtgtcagaagcgccacctggtggtgactgggatgctngcagggaggagctgagggcaaaactctagtggaaatttcccaggtcggtcccacgccccggtgacagggtgaaccctnagaggagcccccaaacttggaggcaattgtctttgaggtaaccactcaccccagcttttcagagaccagaggcaagacatttctggctaagagcatggg

SEQ ID NO: 2633 - DNA, 477 bp, Homo sapiens
  misc_feature (1)..(477): n=a,t,g or c
gaccatatattctatttatttatcttatttattatccgtctctcccagctaggatgtaagcctcgtgaaggtggaggaggggggcttatttctgaatctccagcatctagattggtacctgccacacaaatatgtgctccataaacaaatgcactttttcttttctgcactccctgggttgcaggctgcatgcgaanacngtcctcaaggccagggatctgtctcaagcctttttgaaaaccacccctttcctacgtgccccacacccagctctagcagggtgccctcctgcccctgagcctgccctcatcatgcccattgccgaggcctcaggactgaatcacatttttggagtcttcccaggataagccaataggcatcattattctacagcgatgctcatgtataattataattattatcctatatgaacgatccattgctgctgtgtaattccaatggnaattactgggccta

SEQ ID NO: 2634 - DNA, 253 bp, Homo sapiens; identical to SEQ ID NO: 2315
  misc_feature (1)..(253): n=a,t,g or c

SEQ ID NO: 2635 - DNA, 418 bp, Homo sapiens
  misc_feature (1)..(418): n=a,t,g or c
aacctagacaaaaagaagaaccaagtataataaaaaaaatcaagaaacatgacaataatggagactaaatccctcgatggaaagaattataatcataaatgtaagccttaaagagttaactttagatgtagacaagtcaaactgaagcactaaaaacatgttcgaccttatataacacattccttagggggaaaaaaagattttttaatattggaaaaaatatggttaggcatagtggctcatgcctgtaatcccagcacattcagaggccaaggcgggaggactgcttgagcttaggagttcaagaccagcctgggcaacatagtgagaccttgtctctacttaaaaacctaaaaagattagctgagtatgggtggcatgcacctatagtccccggctactangggaagctgagggc

SEQ ID NO: 2636 - DNA, 304 bp, Homo sapiens; identical to SEQ ID NO: 1589
  misc_feature (1)..(304): n=a,t,g or c

SEQ ID NO: 2637 - DNA, 228 bp, Homo sapiens
ttttttttttttttttaaaaacctaaatatttatttatttgcattatatttacaaaggtgggaaggagaccaaaggagaccccaagaacacccccacacctggctgaccaggccccttgcactgcagaggaggcagacacagctggaaggaacaggatttatgttgcatacttgaactacagcgagtgtaagactggtcctatttacagggcagaaacactgcaggtg

SEQ ID NO: 2638 - DNA, 371 bp, Homo sapiens
gcatatataaataacatttattaacttaggctgtacaatatattgatttagtcaaataaaaaataccgtacacaaaaattgaagtaaaatctgtaagatgccattcagactgaattttatattctgaataagacaagggactgccattcacttaaagcaaaatggctccaattccgtttatctatctatctatctatctatctatctatccatctatctatctatctatctataagtctcgctctgtcacccaggctggagtatctatctatttatttatgagataagtctcgctctgtcacccaggctggagtgcggtggtgcaatctccggctcactgcaacctctggcctcccacgttcaagtggatg

SEQ ID NO: 2639 - DNA, 400 bp, Homo sapiens
  misc_feature (1)..(400): n=a,t,g or c
ttttttcacaggatctacaaagtttattacagataaagtacagaaataaccaatctacaaagatcattatcataaagaacacgagaaaatgaaaacggagtctgtaggtatctgtgtttgttgtgcaatatcactcaaatgggtacaaatgagtttctcatatcaattccaaatatacacatacccttgtatataaaaaatgatattagccagttgtaatactcatttagcatcttgattattagtggcaatataattatcttaacatagggcatgtaacaggacaaatgagataaaataatgacaaccaagtaagttttatccagtccatttctaantgacaagaatccttattcaataccttatataggccactgacagatnttgagggctgtttgca

SEQ ID NO: 2640 - DNA, 322 bp, Homo sapiens
  misc_feature (1)..(322): n=a,t,g or c
tttttttttttttttttttttttttttgggtggggagtacggantttattttattgttctgcgtctgggtttggttccttggacgtcacggttcctggatgggggtgggtgggtcccactccctaagtcatggtcccacgggcctnttgggatttttttccaggttcaaagtgcactgagaaagcttcacagttttaatacttcctagatgctcaactgaggcaaagtgacaaaatggccctcccacccccgcccgccacaaaantaaaatcccaagcccctggnagctgctgctcagcccttatgaaaaaataatacaaac

SEQ ID NO: 2641 - DNA, 368 bp, Homo sapiens
  misc_feature (1)..(368): n=a,t,g or c
tttttttttgtgaaaaagctgcatgttttaatttaggaaatgagtagaagttcacaagcaacccagaataggtgccagcagtttgctccagtgggccacaccacagcagcagctcaggctctgcagaatcactgtgtccagtgcttcctgagatgttctttcagctgaggaatgggaaggcagcagctgctgggcactcatgacaacgaagggggcagcttcaaggagctcagggcatcccatcttcgggacagttacttcttaccagcctcttgtaccatcttcgattcacagcttnttgattctaggggngtattcttgtattnnaaagggattcccatgttttttttgtttttttaggggcnagg

SEQ ID NO: 2642 - DNA, 368 bp, Homo sapiens
tttttttttgcagggtacattatttattttcacttgaacatgggaaagaaagtgtcacactcccccttcccctttatagggggagtgtattttaatcagcaacctcttctccatccaccctgtgtatgtgtgtacacatataccaccacagttgggaggcatgactaggctgacccagtcttatctgttcctcctttgaagagggtttgacaaatgggaaaaaggaaggagccacatcaggcagaggtttcaagccatgggaatggaggaaaggcggcagagaggagcagcaccagaggccagggagagagtgggaaagggccacagcttgtttttaaaaaattctattaatttgggaaggaggggtg

SEQ ID NO: 2643 - DNA, 364 bp, Homo sapiens; identical to SEQ ID NO: 484

SEQ ID NO: 2644 - DNA, 309 bp, Homo sapiens
tttataatgaatgaatatatttattcaggtcactgctttttaagctattttctaagtatatattgatgaattattgttaaattgatattctttaatagaaactacaattactgacattaaatataaaacaaatattttcattagaatcatgcaaaatctaaacaaatttgtataaaataccacccaaaatattttttttctgtatatgacaagacacacatcagatcataagcaacaagaaaacaaaaaagatatgaaaaagatataaagacctccccctcaccacatttggattcatcatatctatta

SEQ ID NO: 2645 - DNA, 279 bp, Homo sapiens
tttccagttttagcatgcaactttattaacaacatgtaaataaaatctcaaaagaatacacatttcaatataaagcacagaagtatagcttactcaggatgaatagattcattatcaggtcacgttgcagaaataccaaaaatatctcaatttatatactatatagcacaataaaaatcagcacatgttcaggatctcaagattaattggtatccataaaattgcctccctcaatcaacatggaaaacataagtattgagtttataattacaatatgca

SEQ ID NO: 2646 - DNA, 186 bp, Homo sapiens
  misc_feature (1)..(186): n=a,t,g or c
anctccagtttatttttttaagactaagagcagagtatgaaagtcacagccaaagcacttgaaaaaggcccaggaggataggtgggaccacatagggtgagcagggcaaggtcctgggagatggttcccggctcagggctggaagggagggggcgctgttgttttacggtctccaaaagtgtctgt

SEQ ID NO: 2647 - DNA, 349 bp, Homo sapiens
atttctgaattctgaaggtctgctgggcttggcagggtgattctcattcttgtggtctcttatgaggtcagtggtggctagggctgaaaccatctcaaagccttcctcactcacatctcatgggtgatcccagctgttgctgaacctcatctgggactatcggccaaaacactcagaacttctccatgtgtctgggcttcctagaagacactgttattggtttttaagtagatcatagccaaagctagagtagcacctggacaagtcacatccacatttatggtatctccttctttgatttgataacttggtgatttatgtttctccctatgcattcctgtttgaaagc

SEQ ID NO: 2648 - DNA, 301 bp, Homo sapiens
  misc_feature (1)..(301): n=a,t,g or c
ggtttaattatgggaaaaagcactaaagttaggtaaatgattttgtttgtcatgcttctcttgacaggcctgtggggggagaatggaaacagagatgccccttggcntgnagntagacacagcttgcagtgcacaggcagaggctctgggtcagtgcaggaagcagagtcaccgccagtgccttgggatggggatcacagaaggtgacctgtggctgcatgagccactgtaggactctgacctcagtgggacaggatgacacaggcagctaggaattctgggcaggggcaggtnggcatta

SEQ ID NO: 2649 - DNA, 392 bp, Homo sapiens
agagatataacaaaaactttttttttttaaagaggatccacctggttcatgaaccctccctcactgctctctgcacatcacggccacacagcacctgcagggaggctgtggggaggtgtggagcaggtgcaacaggcagctactctcctggggggccacacggcggagagaggattcgatgcagcatgacgatcccttcctcccaggcatgacctcttctcagaacacgggaactgacaacactgcgagtggcaactcagcaggtgggcagagaagcagaaaggggccctcagcaccactaggccagctctcagaatcagaagagcagcctccagggagggagcagggctacagggacagcctacgggcagttggagcttctggtttgggca

SEQ ID NO: 2650 - DNA, 211 bp, Homo sapiens; identical to SEQ ID NO: 1909

SEQ ID NO: 2651 - DNA, 433 bp, Homo sapiens
tttttgccaatataagaatcttatttactgctttagtcaagaaggagatgttatttcacttgtgacttcctcccaagtgaatgagtatacaatttaacaaactaacacagttcagtttattaagttacaatctgtaaccacctaatcgtagctcagtgtatggtggatactagatataaacaagagtagggaagtctttggcacctgcatgatgcgtgccggcttttaaattcagaaagatgagaagctacaatgcaactttttttttaatctacagataccgccaaaagaagaaatgtttatcagattttgaatgacatagctgtaagttggcggttggcagctttccacataaaatttcatcagcaagtgaaacttgattacagcccaaactagacaaggcaattcaggtgcccggaccctgaagtccacg

SEQ ID NO: 2652 - DNA, 258 bp, Homo sapiens
  misc_feature (1)..(258): n=a,t,g or c
caatgaataaacatttattgagcaccggcaaatcccagacactacagaacacacagaaggcatggcccacgccgagggcccagcccttagcaaagctgccacgctgccaaaaatggtggcgcatnagctcaggcgcaggctgaggctggggcttggcgggcagtgcacttggaacggggtcctaaggcctctgccaggttccagctggggcaggggtcacgtcgcttcctgagagcagancaaataaataatggagag

SEQ ID NO: 2653 - DNA, 663 bp, Homo sapiens
  misc_feature (1)..(663): n=a,t,g or c
ttttttttttctcctgaacagatttattgtgagggtatgggaacgtgagatacatttgaattcccagttggaaacagtgaagaaatcagcaaatgtcttgtccctctcatttatttccacataataaacacctgtcatgggccaacccttgtgccgagctcagtgggcacagagctgaggagagaggccgacaggagctcccagcctgccaagcctcataacgtaagctgctctgtgttgagtctgctctgtgccccacgcgtcatttatgcaaatgctgctctagatcctcacgttagctgaatgaggcaggtactattgctctccctattccatgcaggaggaaactaaggctcagcgagacatatgccacgtccccatgggtccacagccaaaagctcagtggaattcaaatccactctgtctcctaagcttatgctctctcggccacataccctccccacccatgtatcgtaaggggcatctgtatattctggggtttactacccgcatggtaaagggntgtcagantattgctgaaatgccagtgtgtgctctcattgtaaatccatggctggattgggggnttactgaagcaagagcaaattgtgntcaaagatgatgtgtgggcaaaatgaatgncccggccgatttggccgggaa

SEQ ID NO: 2654 - DNA, 423 bp, Homo sapiens
  misc_feature (1)..(423): n=a,t,g or c
tccccatcaaattattttattaggttaattaaacagcttaaagatgattccttttgtgtggtacccttctagaaaatatttcaagtttttaagtgaacttccaatacataaaacaaaattactttagcatacacaaatttcagatcaaaatacaacactctgtttctgttttcttacagttataaaatccagtcaatacaaactacataaaanagataaaacactttcactgatccttggtacaagagaacagcatgatggcaaaatgttccccaagcacaggtcctgggtttgtgagaagggaccaaccccacaatatactgaagcatgtaaacaaagtgcgtgctacttaatttaggttaacaaatcctttttgcatcagtattacttgtaaaccataaagcaacttttaaaaagaaaggg

SEQ ID NO: 2655 - DNA, 375 bp, Homo sapiens
gggacggtgactcagaatctttggttgaggccttttttgctttcttcttcttttcttttttttctttgtctttttttctcttgtcggatttcttcttctccttcttgctctttgggttgctttgatctccaccttcaaccgtccccatccccttctgaagctcctcttctggctcgtccttggccccttggagccaagagaccccttccctttcttctccttgacatcaccacttgctttgtctctctttgctttccccttggaagtcgtggaggtcttttctggggaaacagaggcctccccaccttccccggcccccagcttcttcttcttcttgctcctgggggtcctggcagctggctggtctcccgataa

SEQ ID NO: 2656 - DNA, 488 bp, Homo sapiens
tttttgcttcttgctgtgttacctttattatattcctagtgtcactgacactagtttaaaaacagcctgcaacaagaatattctcatcaccagccaccttttccacctttcttctttttctgttgctgtttcttttttgttgctggagcccctgcaacaagaatattctcatcaccagccaccttttccacctttcttctttttctgttgctgtttcttttttgttgctggagcccctgcaggtttctggtgtcttgggggtatgatgttacttgtagaggcagatactgttgcagcactgccaggtcttggggaggtgggtgggctgctcacagttttactggcatccacttcagatgaagctcctgcagttgctccctgggtcccttttccaatctgatccttctttttacccttctttcttccccggtagtaagaacgttctcggattggcagcaactttctggatctggggtaatcctcgtgcc

SEQ ID NO: 2657 - DNA, 284 bp, Homo sapiens
  misc_feature (1)..(284): n=a,t,g or c
atgtcataaaatgggctttaatgttccctcttacaacatggtattactgcttacactggaactggcacacagctcccaaggttggtttactctgaggaatgaagctggtatcccccctggctgcagtgcantggagcggtcccaggcactgagctcagtataaactttggagtctaaatacccacatctcctgtagttcaccaactttgcagttctggaaccggcagtgcagattctgtgtatgccaagtaaaccagacactgttctgcctctttgtactaact

SEQ ID NO: 2658 - DNA, 297 bp, Homo sapiens
aaatgaatgtaacaagcatttattaaaaactgtgctgcacaaaacatgttagaaactagccaggtgctaggagtctaatcaaggcaggggcagggtaaaaacatgggaatattacatggacaagcttgtctagcatggcagtctataacccttgagggtttacataaaataaaggaacatttttgtggctcaggctccccagagttctctttatgtttgggcagagactgccccatcccttagtgatcccaccttagagccaggttttcaaagtcatttctcccagtatatctgtct

SEQ ID NO: 2659 - DNA, 316 bp, Homo sapiens
aaaattaataaaaatattttattgaatttcaggaacttggtacttttttaaaacttcaaatctttgcacacaaatcaccactatactttctagaatagtggaagttaggacttcaagattgtcacttatctccttgtgtcacacagcacagaaaccccaagtcctcacactgcccccaccccccttctggccatgactaccaactactctgttattctagcggaggacaatgacggaagtgggtagacgactgaaggagatcagctgtccaccgcgtactctactaaagtgagaggaggagcaaccgaggatcatg

SEQ ID NO: 2660 - DNA, 580 bp, Homo sapiens
  misc_feature (1)..(580): n=a,t,g or c
ttttttaaataaattttttattacaatgacaggaagactctggatacaaacacatttgctaatataatcactccactggttacctaggcctagacgtacaaaaggacacccatatctcatcaggagaaagacaattttgagtttctgggtgtagtaccaagtggttatgatcaccacgtacgtggtctatccagttaactgtgtggcaatttgctatttcaagtcctctcataacagaaattactgaaatatgtggaacaccagtcaatataaagaattcatttttaaacagactagtgaatttgtgtcataaacacacttgcgtatggatattaggagagcattgcttgaatatctctaaaactatttttaggaattaaaagctttcatagttaatggtatgatattggccttcagaattcatattgataaaagcaaaccttagtcatttaacaggaatgtttaaattttagagattctaacatgcgatgccgaaaaatcctaacatttccacttagtaatgtcagggttgtgccagttctaatttcccatagctagtaacatcagaaaatatntatca

SEQ ID NO: 2661 - DNA, 368 bp, Homo sapiens
  misc_feature (1)..(368): n=a,t,g or c
gcgaccgatttccaganccccctgctctgctgctctgcctgtccgcctatctgccattccatcatgtgtgtgcagacgtgcctgctccctggatgccagcctctcactgtctcctgtgctttttgccagcccaggcagtgactgacccgtgacccagcatgcaaagaagcctggagccaggggccagtggaaccagcttcctccaaggagatgacctttctgcccccaaggaaaccccttccagctgagcagggaatccggccggagaaggagcagcttaccgactgcgggtgttcaccacaggccaggccctaatatgcacccactangtttagctcagactcctctctacatattgaattggcaaa

SEQ ID NO: 2662 - DNA, 473 bp, Homo sapiens
  misc_feature (1)..(473): n=a,t,g or c
ccgataatgactttattttaacatatttaattacagacataaaatagctnnggaggggggtgagccccagcctagccccaccatgggntcatnaggaggggaggcgcagcggggccccctgctgaccctctctctgggggtcttcctatggcggggcctattgcttgagtgggggaggagccatgcaaatgaggggggcagagaagacggtgacacagcggcctccgtgagccacctcgtagccctcgnccttgacttcgtggctncggatgatatagtccaggttgttctcttccaagaaggccttggtgacgtcaggcccaaactgacagctcacgcccgnttgctgattcgagccgccgttctgttggctgtggatctgancaagaacaaggtcacacatggggccctgaatcttgggggttttcgattccgctcaaattttccggatgtcattcanggtganaccggtt

SEQ ID NO: 2663 - DNA, 554 bp, Homo sapiens
aagggggaatttgattgctatttggtattaaagagttttaagattcaaccacctggtacaacagcaggctctgaaggggaagccagacagggaacctagaggtacaagcaatgtctccccagctgtcagcctcaatgagaatcaccacccataaataagctaattattgacaagattataatctttcgaatatgttcaaaacaggtctgactagtgactatgagaatggagctatttagagttgatttaaaagaaaacactttattgttcagcaattaaaagttagccaaatatgtatttttctccataatttattgtgatgttatcaacatcaagtaaaatgctcattttcatcatttgcttctgttcatgttttcttgaacacgtcttcaattttccttccaaaatgctgcatgccacacctcaatacatgccgcgtgatcctagtagttttttcacaaccttctacaagtttttgggaaaacatctgttatgatgactttcatacaccttcacctcaaaggctttcttgcacctcggcagggcccagctcg

SEQ ID NO: 2664 - DNA, 353 bp, Homo sapiens
  misc_feature (1)..(353): n=a,t,g or c
gaagttataaaagcttgtttttctttattagaatacttttttcaattctgatttgtcacaatttagattctttttctaagaataagcagaaatttacaaaatttaatttttatttatacattcatccgttcaatacacatttcaagaaagctgtattgnaccccttnnagtnggtaagttccagggccaaagaaccaaaataaatccaaggagagagaccaacaaatgtatatttataacacagagtaataaaacacaaataaatgtggagttatttaagcatgtaagatggtacatgctctaccaaggtatgggggcttctctaagacacaagatcagattaaagtcttgaa

SEQ ID NO: 2665 - DNA, 514 bp, Homo sapiens
atttgcaaaattaaataaaaaaaaaaaacaggaacagaaaactagtccgaatcaggttccttcttctttcttctcgtcccttttggatgagtcccagactctgttttttctttgttgtgttcagtttgttgtgtcatccactctttttctagctgtttcagcatgtctggagtgaggagtccttgctgcaccaatctggaagcaagggacagctctcctgcatcggggctgggtggctcagtagctttactccctagagctttggtgccgcgtgtccttctagcttggctctttaaggttcctgacaatcgtgactggctccctgatggaaagccctccaaattcaacagcttatgcgtctcagacattttaatcaatttagtgatattgtgcacaccatcttggataataccatctagttctttctggagatctcgaataaggctggcatctggaaacatatccataaatcggtaacttagccacaagtaaagatccaagacatagggacagt

SEQ ID NO: 2666 - DNA, 437 bp, Homo sapiens
ttatattgataaacatttttattctaatattatagtaataattcaagtacaattttctttgaaaagtcaactctgttaaaacaaaacttgttaaatatctttcatcaaacataagcatattcttttcaatcccccacagcagtcagagccatgtagcagagttaagattttttttaagcctactacattttgttattgctaaaaaatctgaattagttgtcaaggtttcagaggcagtcattaattaacttttgaaagctctatcagatactctgacataaaatcatgaatccaggtatcggtgtctggcaacgatgtgtccactaagtagaccactactttccggtcccaagggttagcattttcaatgactgtctgcaccagtgccaccagaggtttcttctccacatgatttcgaaacaccatagaagcctcct

SEQ ID NO: 2667 - DNA, 246 bp, Homo sapiens
ttgcagtttcaccaaaattcctttatgtaagtaaccctctcaacagtgctaagaagtaagtattgacattttcattttgcagatgagaagcatggattctgggacgtcaggtctatgggccatccaggtcagaactctcttgacctcaccctgcaacgggtcctccaaggaccatgagccttgggggaggcgggaaccaggtctgattcaactccgtatgaccaggtgcagcacaatgtagggctc

SEQ ID NO: 2668 - DNA, 420 bp, Homo sapiens
ggttttatttcatgcttactcgggagccagaaataaaaccaacaacaaattcagagtgctcctcagccattctaaccgctgctctagtgtagtccccagtggccagggagccggtggagctcatttccgcaataaggaggcacccccgatgcaaaggcaggcccacttcttgcaggcctttcacaactcctgagcctggcaccacgtgagcatttactagatctgcccaggaagctattttaaagatacctccttcatactgctttttcactgtgtttcctatatctgcaaacttccggtcttcaaatatcaagaactcatggcattttgcaggagttatcaactccttcatcacatccagagtaaaatcattcaaaatatctacatgagtcttcagcatgcagatactaggtcctaaag

SEQ ID NO: 2669 - DNA, 562 bp, Homo sapiens
  misc_feature (1)..(562): n=a,t,g or c
tagatttctcatagatttatttctgcgtcatattatatatagatatatgcatatataccttttagcnaaaggagancaatctatatacccttcccttccccaccaaactcacaaaaggagattaaacccttccaggattgccatcaagcttcccgagatggccagggcaangaaagaatcatctctcaacatgttaagaaacggctgccattcttaggctctggggttgaagcagcagcattcccaggacccaagggccagagagaggaaaagaaatgactgtagtgtgacaggattctaggatgaacatgtccagtgactcctgggcatggcagactagctcccagaattctcagggtgtgagtaaaggtgggggccctatggctcttcagaggctgctcaataggtcaggggtagggtataggaactggggatcaggcatgcagggatggggtggcagaaaaaacgcctgtggggttatgctccagacagagcgacccccatcanggctacccactactcaatgacatgtaatgnacagggacagatgctgagctcctta

SEQ ID NO: 2670 - DNA, 429 bp, Homo sapiens; identical to SEQ ID NO: 14

SEQ ID NO: 2671 - DNA, 583 bp, Homo sapiens
  misc_feature (1)..(583): n=a,t,g or c
tctcccttgatttctggtttatttttacaccctctataaagtggtggatggccttgtcttcacacttcatttggtacagctgaaagttgccataccgcagatggagcagttgtttcgctacaggagtaagctctttactgaattccttttggaagtaatactctgcgtcttcatactgatctgctagagcatggaggctggcaagaatggaacagacacggaagagattatcattggcctcatcagctttcttcagatgagccacagcgtgtcctattagttccagtaactttcttttcccatacattccattctctcttagattcattacttggaagacttttgccctatagcagcacccaatttggcaatgcaggtaggcattgttttggtatgtattctaaagcctttttaagcagttcaatcgctttgtctggctcatcctttcctcgataaaacttgggctgcactgcgaagaacatctgttacacctggggctntctccaaggcttcntcaactaacttctctccntgngcgttcntcttcacnttcttcacgcatcttatgaagcttcagagncag

SEQ ID NO: 2672 - DNA, 440 bp, Homo sapiens
agttataattactttattaaccttttggtctttcaacatttagatagtctttcttaatatttccaggagagtacctcatttttattttgaaaaccattcagcacatttatcttatgtaacatgcagagatattatctatctgtatttttaaaattttcctgttactcattgatacatagtacttaattacatgttattccatgtacactgaaaacaatataggaaatatatacatctaagacttctactttgtacagtctttcattaaataagaatacttacacatacattttcagatatttctaccttcctgtatgtgtttggaattgtatgtaggtagccactgaaagaatttgggccccttgggaggatggcagtggaagtccatgaagtaaagagcattctttaaaaagcagatttgattgcataccttttagtta

SEQ ID NO: 2673 - DNA, 433 bp, Homo sapiens
  misc_feature (1)..(433): n=a,t,g or c
taatcatagacagcactgtatttcagtaggaaatatgcaaggaggaggagaaacaactgtcttgctgagggctagacgtgtgctctgaagaatggtgttccattttcagaagaccacatgacacacataatttctctactcaaaaggaaagatgcgtaaagtatacacatccacacaaagatgaagaagctaagaatgaattcctaatgtagttatctgtaacaggcatatgtgggaacacctggtcaggacttactttccccatctttggntaaggcaatataaaatcagatgaccaagttaactaaagtagttttgagctttgttctaactaaaacaaagtagtagttttacaatttttataatatacttaattgtactaaattaaatgttccataaagttcnctgggaagagaaggttaagaggataatt

SEQ ID NO: 2674 - DNA, 440 bp, Homo sapiens
acatttaaaacattttatgagggataaaatatagtctttttctatcagtatgttcacacttcctggcctctcattgggaagctgtaagatgtccttcaataagatcctgaacacgcgacagaataatctcattagagctgctgcaattttctggaccatatggtgggtctatagtcaggaccccagccacacagagagtccttggagcgtctccctgttcagtgatggggatgtggttcttctcaagccatttctttaggctgttctttctctcttccagatcctctgggctgtatgctttgcagtctccagacgtgaacaaatgcatcagcttctccctcactctatggtccccttcattcatagtttcaacagtctgcacagcatgtcccataattccggtcacagacatgctgccatcttcaaggaagttcacaagg

SEQ ID NO: 2675 - DNA, 361 bp, Homo sapiens
gaattttcaattagttaatttcataagctacagcagaggcgtggaccctgccctctccacacttgaagagataagcccctgggatccaagtcccagcaaggttggtgccacccatcttggtgaaagatgctgttgttcctgtggaaaccatcaccagaggtaggaagggctttgagcccaaaaggaaacaagagggcgtgaatccaggccatcctcaggggagggtgggagcccatcccaggcagagaggcctaagcctcagtgtgggccaaggctcaaaggtgctggcacaaggcttcccagggggagaatcagaaactcagcagtgaaagtccgcagaagggggaagaagcaggctgat

SEQ ID NO: 2676 - DNA, 339 bp, Homo sapiens
  misc_feature (1)..(339): n=a,t,g or c
gcggctctacttcctttattgaggtctcaagttccagcctccgcccgtctcgggacaagaccaggcggggttctgcacgcggccgcccgggcaagcccagcagatgccccgtcaggagtactcgcagngtggccgcagcctgcgggacagtgggagctgccttccagccacttcatgatgtgctgcaggtggccgccgtggctgcagccctggcaccacacgaagagacccttgactacgtggtggcagacggcacacatgctggcgcanggtggcacctttcgcagaccagccccggctgntcatgggccgcttncagtggctgcagttgacgtgcag

SEQ ID NO: 2677 - DNA, 210 bp, Homo sapiens
  misc_feature (1)..(210): n=a,t,g or c
gcattttcactgaagcatttattatgcaaaanaggaaggctttagcatgccagtataaattaaaacagtagaaaaaaagcagagcagagagcgttttccatccatggcctgtgccctgtaatgacgcagcagtatcctagtacattgacgggtttttcctgtcctgccactgtccgntgggcagttataggtcccaagtgttgggtcttc

SEQ ID NO: 2678 - DNA, 289 bp, Homo sapiens
tttaacagtcatgatttattattttattaataaaatcacagctttaaggcacaacgtttttaagccatgaagaaaaaccctcaagaaatgctttagtttgacatggaaccaacaatcttcatgggcaaccttcaaatccagacgcaaaaagatggtcatggagcaacctcatggaagaaaagcacagaggaattcatcatggtaccttgggcttttcatccaggatctgctgacgtatttccttgtgtttctctacgagtttttcttgccgtttactttgcgcttcttc

SEQ ID NO: 2679 - DNA, 418 bp, Homo sapiens
ttttttttttttttttagaatccaactggactttatttgacacagaatacaatgtggctgcgagaacagcaaatggcaaagacaaagcagaaaagacacagttctatctaatttataattaagtgacagaagggcaagtcattaaatgaatcacaaaacagttaagcttgatggaagaattctttttctggtgtccatactttgggaattcctattgtctgttgtccaacaggcacagctgttgtgttttgagccagtgagagagacagtgaagtgaaaagcacggttacaggctccccgtgcaacggtacacacttctgaagtggcagactcttggttagcttgacattcaatgcagatccatgctgtgattcctgcagatggcacagttattaaccacaacatcccaagcccagac

SEQ ID NO: 2680 - DNA, 402 bp, Homo sapiens
ttttttcagttgtcaaactactaacatctttattttgtcaagatatttaacaatattaaaaagttcagatttcttcatggtcatgtcttttaccagcttttcaaagattcattcagtagtagaaacagccaaatgctgctacaacgcagaataaactgtcattcatgaaaacatcatgagtatagttgtcagtgtcagcatcccagaaacagcgagaagccatgaatactccttcacctctttgttctccaatcactacttgcaccaccattttgtatcggtcaaatcccatttcttttaatttatctttaatgttttctgataaatgttttgtaagctgaggcatttcttctggagaatattcagcatttgccagttcctccttgagcacagcatggatac

SEQ ID NO: 2681 - DNA, 348 bp, Homo sapiens
cgtcgtccttgtcgcggctgcgggtgctggtggtcggggtggaggagccggcgtcgctgtctcgcttgcgcttccgtgatgatttcttctgccggacctcctcttcgatctcctccagcgtgccctcctcgatggccttcagggtcttgagccactgcttctccgtcagtgagtcgctgtagtccacctccttgcggtggcgggagcacggccgaacatcttctcctcctcctcctcacaggtcagccgctccacctccgcgtcgtccttgatgatccacgaggggagctcgtcctcctccatgaggcgcggcttccgcattgggggttgcgggccttcctcgcgcct

SEQ ID NO: 2682 - DNA, 141 bp, Homo sapiens
actattttgggtttagaaaaattcttttggattttattccaagtgtgatgggaagccttggggggttttaactagggaataatgtgatctggttcacattttcaaaagatcattctgctatatagaaaagtaatgaggcaa

SEQ ID NO: 2683 - DNA, 427 bp, Homo sapiens
tttgaagtttcaggactttactttttctgagttaatccaggtgcatgagacttttccatatacacggataggctttgtacggttccattttgggtcagtggaagaattttcacaacacaaatgacattataaagttgtcttctctggcctggtactggggaccactggtcaaagacaacgtgagacattgcggggacttcctggagctgcagcaaccacagcagagaacttgtaatcaattttttctgggagaacatagcagaggagtaagacaacatttatcctagcttcggataggatcctcttccatctaggcagatgggatccaagagacagcagagatcctggagagaggtgatagaagagggagacacaggcttggtgtattggatcagctgcagctggtgctccctggagcagcaggctg

SEQ ID NO: 2684 - DNA, 304 bp, Homo sapiens
gaaaaacaaactggtttttattctaaacacgtactagggcagcatgctggggggcctctcctgcctccagaggtgcccctgctccccactgtggccctctttagacagagtaggagctcgggctacccacatgcagcccagcccttagcacccaagggcctgcctgtgccccactctctgcctgggctagggaggcccaggaccctcggagtgggcaggcccaccctttccatgggtcaccagggtctcagtgcccacttgtcctccaaccaacagtgacacggcaccctccacacggcctgtg

SEQ ID NO: 2685 - DNA, 490 bp, Homo sapiens
ttttttttttaatcaatataaataattatattctgcttcagaatgaaaacatttccagaacattgtgggagcctcgcttgttcatcaacattacctgtttttatcaaatactgtcatttgtgcaacaaatgtcttttccccatcctcacgatttcattttcttctggctggaactcttcactgacatcaatattttcatggtttctccattaatcattccattaaactctcttcttcttggacgagtcactctaaatagcaacgagtaagacttcaccatgtggctgttactaggttcaaattcattactggaaactgcaagggacgggaaatttccaggttttgtttgattgaggtcaggattcaaaggcacctgctttttacctgtgggaacttgccttattggacaacatacatcctttctttttttgtggcaaactttcacaagcaggacttccagggtaacagaattttgttcattttctgagtt

SEQ ID NO: 2686 - DNA, 268 bp, Homo sapiens
ttttgaaaacttcacagttactttaatctgcacgggttccggggaactcctctgcccctccccgctccccttcaccagcctcccaccgacctggcgtccccaactcagcccaaggagctgtcagggattggaggcggctgggtcctccggcagaacactaagacgggcccccgggcggcccggctctgcccgggccgaaggcagcgacacgagatgcccgaccccgaggagcccactcccagtgcgggctgaggttcagcagccccgg

SEQ ID NO: 2687 - DNA, 178 bp, Homo sapiens
ttttggcgtgatgctgagtcacatttattaccagactttcctggccccatgctcacaggcactggtcactgagtcaggcatttgccagggctgtctgcttgggcgactgctgcaggaaagcaggctgaggccccagtgcccagtctgagccttagaaccggccctcaggagggctcag

SEQ ID NO: 2688 - DNA, 442 bp, Homo sapiens; identical to SEQ ID NO: 1611

SEQ ID NO: 2689 - DNA, 487 bp, Homo sapiens
ttttcaagaccatccaataatttactgtgatcccatctgtgcccgacaagcggccacagaggcctgggaggggagctaagggctggggttccggtggcatttgggatgttcaagacagtctgtgcacagcctccctgggagggtctgcagtcacctcggcccacggtcccggggtgactgggctccagcagcccttccttccttccttgcttccgtccttccttcctcctccttccgtctgcacctccttcctgcatccggcacctccatgtcctgagcttgtgctgcgtcaggagagcacacacttgcagctcatgcagccggggccactctcatcaggagggttcagcttccgcagcttgtgctgccggatctcacgcaccaacgtgtagaaggcatcctccactccctgccgggtcttggccgaggtctcgatgtaggggatgccgtagcttcgggcgaggtcctgagcctgccgagattccac

SEQ ID NO: 2690 - DNA, 320 bp, Homo sapiens
tttttttttttttaaattatttaagacatttactttatttttcttgtggccatccatttagtgaagaacatcagtgtattaagaaggtccctctttatcacatgatatttctaagcagatattcaggaatgctcagaagattccactttcagtctcctaagacataatttaaagtgggacttgaacagaaacaagtatcttcagactccagctgaaatcatagaagtagtttctgtttaaatcctgggaaaccttagataaggtatgtgaaactgaaaaaagatcaaatcagcacacacagataaagggtacaacagata

SEQ ID NO: 2691 - DNA, 439 bp, Homo sapiens
tctcttttgagacagagtctcactctctcacacaggctggagtgcagtggcacaatcttggctcactgcagcctcagcctcctgggttcaagcaattctcgtgcctcagcctcccaagtagctgggattacaggcacgtgccaccatgcccggctaatttttgatagagacggggtttcaccatgttggccaggctggtcttgaactcctgaccttaagtgatccgcccgcctcagcctcccaaagtgttgggattacaggcgtgacacacgcgcctggcctgaaggttacttttcttttcagtggtttggggcagggagttacacagcttaatagattaagaagaataaaatgctgaatgctatcatttctttctaacatatttagcattaataaaaagtgagtatttctgaggtcatcacaactgcctcccctcgtg

SEQ ID NO: 2692 - DNA, 372 bp, Homo sapiens
ttttcaagttgcacattttaatttacaatttttaccaataaaaaggattagtttacaaaaagggaagtcctttatacaaaataaggattttttttttccatttgtaaagagaatccactgtcatgttttgccttgtcaagtcaaaactcaaatagcttgttttggtaaaattattccagaaacataatccagacaaaatcaataacgtcatcagcttcctaaccatgtttaagaggaataacttcatgaacattttgccctgaactgaagagttctaaatacttgtaaacctttaggaaaaaatgactgctcgcaggcagctgactggtaagagggtacaccagagactccgggtcactcactgtcagaata

SEQ ID NO: 2693 - DNA, 422 bp, Homo sapiens
ttttttaaatttttaaatggttctttattcataaacttgatgcaagtttacaaaatttactgtacattgccaaataaatctgcaattaaaaataaaatccattaaacaaagcatgccaaatgtgcagctatcagtctgcttgccatcaggatattaaagaattcaacaatgtattcaagatttagccttaggcttaaggaactttactgatttaaagaattctgccttgtcacttgttatctgagcaactggcaatcagaactttatacaaatgtaatcaagtgaacaagaataccagaaaatctatttactgctctcttaaccaaaatggaatcaaaagaaattaaacacacacaatgtagaaatgacaagtctctcagatgtggtttacaaagttaaaaactgaatctcaaagctaatgc

SEQ ID NO: 2694 - DNA, 486 bp, Homo sapiens
gagacagggtcttgttctatcaccccaggctggagtgcagtggtgtgatctcagctcgctgcaggcttgacctcctgggcccaagtgatcctcctgcctggacctcccaaaagtgttgggattacaggcatgagccactgcatccagcttgcttctaattttcctacccaggctgttttaaacctagttctccagctaagtaaaatgtgcccaaatggaaaacatctaaatcttctgcagcccattcttcctgtgtctttgtgttgacaaacctctaatcttccatgtctttgtgttgacaaacctaaccttccatgtctttttgttgacaaacctctaaccttccatgtctttgtgttgacaaacctctccatgggtggtgcatctgaccctatcccaacatgccttaggacgctcatctccttgactgtctgccatcccctcccaaaactaagtggaggctctgtcttttcctcctagtttgag

SEQ ID NO: 2695 - DNA, 485 bp, Homo sapiens
gcaaaaaaaaaaacaaaaataagtgcattttatttaaacaacggaacaaacatcagagagcatcccctgcaaagcccccaccccagagcctgctgatggaagcggggctgcaggacgctctgccacaacggcagcatctccaactgcacaaagaccccttgctgccagggccgggcaccgaagcatccttgcctgcctgcctgaggagtccgtggaatcagggcaggggtggcacaggtagaaaagacagatggaaacaatgcccatgaatatacccaaagtgtcccaggaggataaaagccgtcatgaggaccagaagccaacccagtctttttttggcctcccggagaagctgtttttgagacctgagactccagctgaaatggctccctgaggagcccagggagcaggaggggtgttctgaggacagcccctgaggaaaacacagtgcctgcagagggacagcccccagcaccctccggcag

SEQ ID NO: 2696 - DNA, 450 bp, Homo sapiens
tttttttttttttttgatgcagggctgctttttatttttctaagctgaggcatgtgaaaattaatttccagttactagcaacaatatggtgttacaaacaaaagaagttgtacagcagatataatatagaattaaaacagaatagatttaacttatggaaaggcatgtcttttctcctgtttttcttgatttgctgaggaatggtggaagtaaggtggtctggcagaggacacgaactcacatttagaaatctctaatcccatccaaacctttgcctccataaaccgtctgagccaagtggttgttgctcctaattttagggatccttgggcatgaagatttcacagtcttcctggcagcttcttctaaagtttaatcatgcttaagttatgtttgagcctgagccgcccggaggattgaatccaagcaatgaagaaaaagcagcctgac

SEQ ID NO: 2697 - DNA, 410 bp, Homo sapiens
ttttttcaaaaagataattaacttttattattcattaaaaatgagctttctaaaatattagtaaatttcattttaagctctgtcttgaagtgctgataccactgaagtaacatttttcttctttcaattttttcttgtaaaattatagttttctctttttctaaaacagcagggagttccttccagttcttgataaagataaagggagcacccatggacttgagtaactgcagaggagcaccgtggctgacagatgtattcccacagttgccagctgtcatcacgtcttccaccacaggaatggagccataggagcaagcctcatagattcgatagcattctgtgtttactccgaccgggcacaatgtgagatcactctgaagcaaggcatcttggtaattcttaagact

SEQ ID NO: 2698 - DNA, 264 bp, Homo sapiens
aaaagccagttacttttattataatgaatgagaaatactatgacggagaagaggtttcacgkgactagattattcttggttcacacactatggtatcaaaattaattatggaaaaaaaaacccacattbgattacacacatttttattgagtttgtctgatgatagggvvacatttacaaaggagtaaatgttacgkaacttctcacggtatgtaagttagagctgggcagcaaacatggttaccaagrgtcsktctadttctt

SEQ ID NO: 2699 - DNA, 351 bp, Homo sapiens
  misc_feature (1)..(351): n=a,t,g or c
cagtcagbbcattcagctttattncagbgctggtttttggttcsctaagagctgcatgagtgctaggcttcavcacgtgactgggggccccttgggamctgggtactatgggcaggatgcccctgaaaagaactgaagacagaggaatcatacttctctttaatacctvtggggaaggcccaggctaaggatgagggcagggaccagtcccagtgccccctggggagagaagagggagamgcttgggcacaaactcccagtggbcctgcaaggctatcatccctggatcttgctggagtggacagtcttctgggccagggttgttctagcttktttctcactgtacctaat

SEQ ID NO: 2700 - DNA, 277 bp, Homo sapiens
  misc_feature (1)..(277): n=a,t,g or c
gagacagagtctcgctctgctgttaatttttgtatttttagtagagatggggtttcaccatgttggtcaggctggtctcgaactcctggcttcatgatccatctggcttggcctcccaaagtgctgggattacaggcgtgancaccgtgaccagctgaaccaagtctttttaaagtaacttctgcccaatcttgggcagagtttctgagcaaatctgtgctggtgagtcgcgaaacagcagccctggctctcttggtggtccggtgtgtggtggggt

SEQ ID NO: 2701 - DNA, 270 bp, Homo sapiens
ttttttttttaaggttgttggaaataatttttatttaacagatataaaaaaaattcttaacatttacaaattgtacaaagattggtagcttttatatttttttaaaaatgctatactaagagaaaaaacaaaagaccacaacaatattccaaattataggttgagagaatgtgactatgagaaagtatctaaccaactaaaaaaaatatgaaaccacttttgatgaagcaaaatgaataatgctagattaaaacagtgtgaatcacactt

SEQ ID NO: 2702 - DNA, 391 bp, Homo sapiens
  misc_feature (1)..(391): n=a,t,g or c
tttttttttcaaaggacaggacagtggttttatatatggcaaaatacttctcctaggggagtacagacaaatatagacagacagatgggggcacaggacaccagacagggnngncngaagggagggcagtggtgtcttctaatcagtaagtggaagctgcaccccacccccaggtgnagggtgggacattggcacaggaggtggcgagacaggcatgaggtgcccatccctgaggcgggcagcgngncaggccccagtcctttttgggcacantcggctctctctggcccagctgggatgntggggaggggcagggttgctgggctacagggatgccaaggcaaagggntgccccaggggagaggggntaccaaggcctctcctgggggga

SEQ ID NO: 2703 - DNA, 177 bp, Homo sapiens
  misc_feature (1)..(177): n=a,t,g or c
ggttgagaagtgtttattgtaaaantggagtttntaatgaaantaaaanattatttcataacattctgataccactacacctgagttcgatgccagcatggtttgaaagtgaagctgatacaagttttctaaaggatgttaaaaaactatagtatgaagantgtantaatatttnag

SEQ ID NO: 2704 - DNA, 405 bp, Homo sapiens
  misc_feature (1)..(405): n=a,t,g or c
tnanannatatgttgatgatgttttaatttctagaatattgtatgacatggaactattcagaattcctttaaaaaggaatctgtcttgattaataacattattaaggtactttcaggctttcccttaactccatcgagaaggaagagggagtatgtgagtacatgtgcatgtaatgggtcaggaggaacagaagcaaagaaggaagcacgtgggaaagtgagatgtccataaactgaaaaaccaatttacagaaagggcatctgatgtatttnctaaataagggccttgatcaggggtaaccaatcctctttgtaggcacattctacactgcccataaataaaggggtctctttaaattaacatttccagtattcatggaacagtccggaaatcctcttttcagg

SEQ ID NO: 2705 - DNA, 348 bp, Homo sapiens; identical to SEQ ID NO: 1398
  misc_feature (1)..(348): n=a,t,g or c

SEQ ID NO: 2706 - DNA, 566 bp, Homo sapiens
  misc_feature (1)..(566): n=a,t,g or c
caagtatatttactctttattgcattccttcatttgcattaaacaatattttttcaatacagttttggacaaaacacaaagacattaagctcatttaacaagagacataagttaacacaatgtgtgctgctttcatgaggaggaaagaggcaagatcttagaggaatccaggatactggccaccaggaatcacaggatctcacaatacaatccacttctttaaaagccacaaaataagctagggaagaaaacccaaaacaaagaagatatgacatccaagtctccaccaaaagtatacaaatggcaagatttgggagatgatctgctttctcacatgaggacaaataacagaggagccacacccaagtgccactgtgggccacaagcctcatgggtggcgtgtgaggtaagcaccttaggatggcttctaattgcttgtccttggcattttaaagcagcagttggggaagagagagggcacactccattaagtctcatcacccaattatgacctaatttaanttccnggctaagtccagtcagttggtaagaccaattcnccctcn

SEQ ID NO: 2707 - DNA, 433 bp, Homo sapiens
tcagggctagagaataagtttatacactgcctcgttaggtccaggggcccgcgcacgtggccaggcgggtggtcctgacgcttcaattcatttacaagtattggattccacgcctgctcctgtgcccgcagcttccccaataggccagcaatctcaataatgctttattaaagggcagattcatatgcggctcttgggggaatttttacaaatatcaaaggaactaatccagcatcctatatagaactctgcacactttgggggaggtccgtgaagcaggacaaagtgctctttacacagggaattgagtcggttcaaagtatctgctctgtggggaggacaccctaaagcattctacatacgtcacccctgctctcaggatgcacccagtgggctcgccggtcagggtggccttgcggtgtccacccccaca

SEQ ID NO: 2708 - DNA, 450 bp, Homo sapiens
  misc_feature (1)..(450): n=a,t,g or c
ctgagctgcacagtgtatttttctcagcagccaccagaggcacattcaccggtggcgcgtcctggtgggcctccgggtgccgtcaccaggcagcagcgcaccctccctcccgccacagtaggtctgtgcggcctgtccggccccgctgcgtggcgcaggcaattctcccaaacggctccactgggcgcctggtgctgggggcggcagttgaccacgggagggcgggacctcgccggggggcccaggacccctgaacacaagtcctccgagctggaggctactccagaaccacgggtgccgcccaccgcctccagggccgccttgatcttctccgcctcagctttggcgacattggcttttgaattnctggggcanggactccaccagttcttttgcctggacgaagttgatgcctggaatgtaagttctgatttcctgattaagcttcaa

SEQ ID NO: 2709 - DNA, 417 bp, Homo sapiens
gttttgttttgtttttgtttttgagatggagtcttgctctgtctcccaggctggagtgcagtggcatgaccttggctcatcacaacctccctgtcgcgggttcaagcgattctcctgttcagcctcccatgttgctgggactgcaggtgcataccaccacccctggctaatttttgtttttgtatttttagtaaagacgaggttgcaccatgttggcccggctggtctcaaactcctgacctcaggtgatccgcctgctttggcctcccaaaagtgctgggattacaggggtgagccaccgcccggcaagttatttaacttcttttgtgcctgagttttttttggctctaaaagtgctacactgaaataaagaatagtgaatataaacctttttcatgataacttacaaataacaag

SEQ ID NO: 2710 - DNA, 251 bp, Homo sapiens
gaaacatgattaattttaatgtttatccaccagcagaaaaaatttaatatgtaaatccaccagcagaaaaaaaattaccaaaactaacattttacagatttttagtatcaaagcacaatacatttttcatagaaacaaatatatcaccattataggtaccatgatatggcaatatttatatacaaggtcatttaccatttaaaaaaaaatcagtggcaatggtaatgtaatacattagttcatctttgttc

SEQ ID NO: 2711 - DNA, 271 bp, Homo sapiens
  misc_feature (1)..(271): n=a,t,g or c
ttttttttttttaagaataccactatttatttagcatttactatgtaccaggnacagggctaagagctttacatgaaataatcatttaaccctcattcgatcatttaatatctaataaggtagctagatatagacaaggaaatgtgttagtaacttgcccaagatcacaggnggngaaggtagtattcaaaacttcagaccncaagttcttaatgactacagtagatagaaacatggggnaagtacttacaatactttgatttgaaaaaga

SEQ ID NO: 2712 - DNA, 354 bp, Homo sapiens
  misc_feature (1)..(354): n=a,t,g or c
gngaacgtcaccggtttaccttcacgtggccattctcctgtccgttcgctttggaaggcncgaggcacagcgnctccccaggcctctccgcggcggcttctcccttcgctgcggtcttggagaactgggcacccatgctggcttcttcaacaaagaaactcaacagatccaagaggggaaaagaagagcctcgggttggtgtaacgacggggcgagcagcaagcagcggcggcggcaacaagcggcagggccacacacaccggagggagggggggttgggggttggtngaaaaggncaagaacagaacccattttaattacacttcccgattaaaaaattttttagttccgagg

SEQ ID NO: 2713 - DNA, 295 bp, Homo sapiens; identical to SEQ ID NO: 1185
  misc_feature (1)..(295): n=a,t,g or c

SEQ ID NO: 2714 - DNA, 452 bp, Homo sapiens
  misc_feature (1)..(452): n=a,t,g or c
aaaattgagcttttttattagaaagacaacagtacataatttaccccttgctaaaggtattcaataaaaaagtggagatatttttattcccaggtaattgtcacatacagtctttcttctctacttctgcttcattctctttgtgtcactttagtatgtgtacctcctgggtgctctctgtacattttttctcctctatacaagtctgtgccatggcttctgctgtcatttcttctgctttgctcttcaccgggntttcggctgtgcccgtttccttgtctccctttggcttgtaactaccaggggcttctggctccggcttctccgggctcctttcctccctggccgtggggtttctggctggctcccctcctttctttcagaggcctctcttctnggggggtaaggttaagggggtncgggaatttttgtcaggatcaggaagggtccca

SEQ ID NO: 2715 - DNA, 230 bp, Homo sapiens
  misc_feature (1)..(230): n=a,t,g or c
tnntattaangggaaagaagagggggagggtagaagaggtgggagcacaaaggcctctgagaaaatgtgtaagcttcctgtggggtcactgagcagggtgggccgggggagcctgaggaagggaagttaggtgactggaaacacaaggggaagaaaagaaaacagaaccagacacccaggccagggtgccaggnaagccactctggggagggccaagagggacgcctttc

SEQ ID NO: 2716 - DNA, 223 bp, Homo sapiens
cttaaacacacaggtgtttatttaattgttcatttgattgaatttttaagttcactttactacgtggatgagatgggtgcatattacagtaggctttcgctatgagcgctgccaccatgaggaatatcccagccctcagttctgcttccctttctgagtcccacaaaagccagatgtggacagccttgggttcccatcccagctggctgctccttctggggct

SEQ ID NO: 2717 - DNA, 379 bp, Homo sapiens
  misc_feature (1)..(379): n=a,t,g or c
gctcggcgtggggtgtgtgttgatgctgagtttggccacgcatctccctgggttagagactgcacagtgtcctcgccctggactgccacggggactcggtaggctggagagcatcagggttcgtcacgaacaccatgaggtcaaagggcattcctggtttgaagtacttgggtgtcttggtgaagtggatctggtagggagaggtcacgatggggatcccgctgcgctctgcctgcaccatgtcactgcctgagtgcaagatgacggtggcagacacgtacaaagacttccccaccagggcttcttctcgggggttctncancccntccancagtacctttcggctcagcacaaccttccccgagccatnctnaatcgg

SEQ ID NO: 2718 - DNA, 5608 bp, Homo sapiens
ctggtatcctggctgctctgcttcatcttcacggtgacagacgtcttccctcccgacagcacaaagtatggcttctatgctcgcacagatgccaggcaaggcgtgcttctggtagccccgtggtttaaggttccatacccatttcagtggggactgcccaccgtgtctgcggccggtgtcatcggcatgctcagtgccgtggtcgccagcatcatcgagtctattggtgactactacgcctgtgcacggctgtcctgtgccccacccccccccatccacgcaataaacaggggaattttcgtggaaggcctctcctgtgttcttgatggcatatttggtactgggaatggctctacttcatccagtcccaacattggagttttgggaattacaaaggtcggcagccgccgcgtgatacagtgcggagcagccctcatgctcgctctgggcatgatcgggaagttcagcgccctctttgcgtcccttccggatcctgtgctgggagccctgttctgcacgctctttggaatgatcacagctgttggcctctctaacctgcagttcattgatttaaattcttcccggaacctctttgtgcttggattttcgatcttctttgggctcgtccttccaagttacctcagacagaaccctctggtcacagggataacaggaatcgatcaagtgttgaacgtccttctcacaactgctatgtttgtagggggctgtgtggcttttatcctggataacaccatcccaggcactccagaggaaagaggaatccggaaatggaagaagggtgtgggcaaagggaacaaatcactcgacggcatggagtcgtacaatttgccatttggcatgaacattataaaaaaatacagatgcttcagctacttacccatcagcccaacctttgtgggctacacatggaaaggcctcaggaagagcgacaacagccggagttcagatgaagactcccaggccacgggatagcctttgctgtgccctgtggcctggccgcagtgaggcatgtatctgtagttccttgctgagtaacaagaagtaaaatacatgtttgtatatctacatttacattctgcgccccagagctaagacagactgcgaatcacttttctgctgtgagggtgatggtgcctgatgcggtgtctcgcctatttccttatttaagcccttaactccttgccctttgagagtgtccattgctggccatggtcactaaatttgaagttccagtcctccctttggagtggacatttaaaatctgcagccattccttgcttcagttcccttccaccacccagggctggctttcctataagccacctccagggtccaggggctttctctctctctccgaagcccctggacctgtttccttgtcatttgaccctcgtctgtgcccgcggagacctcctctgaccaaggggcactagtatgccttgcgctatcatgactgactggcccagtatgattctgttgtcgctgatctcccggaggaggaggctgttgacctgaaaacagtggcgtggctcccctgtgcccagatctggccatgggtgaggcctgcacagatgttgaatgaacatctgtttggggcattggagggaaaaggaaaggaccctgaagccaatatctgattctcggctgcaccttctcttggccaccctggccctgaccgggccagcacgtgcacactggcctcttttcatttcactagtggccgagacaccctctctggcatttatcactgttggccggtgtgatgagtatagagtgccacccaaggcaccagtcacacaagctgatgggcgtcttggctctgccgtcatgtggatgttattgtcgcgcgcgtctataattacaaggttttattcctatttaatgttattgactatagcagattttggaaatcagtgttttccatgtgaccctctttccttgcatccctattccttgtcccccacccactcttccccccatcaagaaaagaaccagcatttgtaaagctgtggacaccatcagggaagcttgttgtaacggcttttgaaggccagtaaccattgttgtggttgtgttttgtattgcttgataccatgaaagtgtaaatactgtaatgcctaatctatttatcaaaactgactactggaccggagcccagaaaccatgggtcaagttacacgtgaatttgttttgtgaagaagggaagctggggcaggtaacacgcagagccgccacgtggaacggtctgtccgccggtctgtcccgcttgccgggcttctgttgcaagtcttggcttaaggagacttcctgtgggttgccatgtcgcacgtccgttagatcttgattttacaggtgagggtggttgccaaaggtgataagaaaagcagccaacaggctccctctcacttaagagagttctaattaataacactaaattcttcctgagaaatgactcctcttggtttggtttgaagtttttcagtgaaggaaaaggcctgagataggaagcagtgccctcgcttcatgaggtggcacatcttcggtggccgttggcctggtcgagctttggtcagctgcgtgggtgcctgtctcctgtctccagcggcagggcatggttcttggcagcctggtgtccacacggtgcattcctgtccccctcggccccaggctggctcagctctccagtgctgcggcgctgtctttgcagcattgccatgtcaccgtagcccccttcactcttggaagtttggggcttcaaggtttattctggcaagaacacctcggagccactgcattgttttgccaaaaacttactgcagattaagtaaagaacttagatgctaaattacatctaattttgtatgtttttttaaatgtgtctttgatgcatactttagaagcacactggctcgcggtttccatccctcttgccttgggacactcttgaggctggcagccctcctgcaatgagttgctctcagttccttctgtttggattttgctcaacatctccagtttctctgctctgaaaaatggggaaaactgctaaacatcccagagatttgcaatcttctagctctccaggtgagcagaaagaccaaatatccaaataaaagcctgaaagccattggtgatccaggggcaccttctcttcagcttgactgggcgtcttccgctgcataacactcaaggtgtctgctctagtcatccagaaacccactcccttctgaagcccctccttgggccgggttgtatcaggaggattcaaccccgctaacatgtggggtgccctctgtaggccttcacacagggaaggaagccctaccctttcaactcctgttggaatgagagtttcctgttctgattccactgtggccaacccaataattctgtccgaggaggggtaagggaataggaggtggggagcaaagagggcagcctgactagatgcccctgctgaatctggtactttctgcacagccttgagtgattggagtcccctaatgactaataaacttgaacatgtaacacacacacacacacacacacacaccattttaggaagtggttctcctactggaaaatatgctacagaatgaaagtttgtaattgaaagaaaaagaatgtattcatctgcttcttgggtttaagcacacacctgaaggggagatattgggggacacggtggccactcgcggtctgtgtcatgacacttcccattcacatcattggcctgcgttgctggggctttgaaccaccaccccgtactttgttttgcctgtagagtgttgtaaaatattttggatgtgaatgtccttgcaggccggttagtctccagtttccacagagaccacctacccaccaccttcccaggtcacctgcctggtccctgaaagaaagcatttgtgtgggcaatcccaacatgaaatgtagacagcgtgaatacggacaggaggtgatgccatattcacagtgggggatggagggcccccacccctgcttcacagaataatgggaagtgactctagtctttgtaagcaattttcattctcattaggaagttaaatgtagattcacagatacatttactttcagaatcctcaagaggatttcaaatgctaacttttagtttcttgggattgatcaaggcaagagaagtggctttaaccatgccagccagaatgaagcatcatgggtcctgatggtttcccgttttcatggtaacaaattcgcacagaggttttgctttatgctgtagaataccgactttcatgatgacaacttggtttatgcatgaatattgcagtatttccatatagcaaaataacatttctacccaggataatagtcacagttttccagggagggaatgatataattttcatgacaatgtcatgtgatgatagaatttctccattgatgaatctctagtatgtgtgtatactttatttacccatacgtatattttatgaccatgagctaagttgttatttctttcattcatatccctgctgaaatattggtactagcaacttaaagttggcaagtctcatcttcagtaatacggatgccatgggagtggccaggccagattgaaggtgaatatggagcagtagcagaagcctcattccagaacccatctggccagagaagcagcagcatcctgggggatggccgtgcatggggtgtacactcgctataggcataggcccggcatggctgtcgctggacgccagctgtgcacacccagccacacctgctgcacgccgcgttagtgtgcggctccgggcctgagcattcgcaaagctcgcttctccagggagcctcctcttggctttggaaaagagcccagggacttaacgtgctgcctgttgtactctgtcccctcatgactttttagacacagggactaggacatcgaccaccctctgcccctcctgcagtcagaacccgagtagtgcaagaacggccacccggttttgccagcgttcagcgtctgcccatggacccataaggcacattagcgttgggggtctcttttcagcagcctcacagacattcccgtcctttctggttggtgttgactgtgtttcagcatcactctaccctcccatgtccttagcattgctgtgcgtgtttccaggcacttaggacacccttccccacgttgccatcttactgacagttcaaatgactctccttttttgttcgttagtaacaatcttcatttgacaccttaatacatttctgactgttcttaaaacagtggggatgcctatattttccttgagtttttgtgactgactttggctatatatacctttctggggttttgtttgttttttatttttattttgattaccgagggtatttggggtggggttgttttttgagatgtgtaattcttttatggagtttttaaaaagaattttcatattgtttttctaacatggcttcattaaacgtttaagtattttaaaaatatgtaatatttggaccagatgttgtgaataatagtagagataaagctattttattctgtatttttaaaactgttccgtacaaataaaagctctcctggacacag

SEQ ID NO: 2719 - DNA, 2625 bp, Homo sapiens
cttctcttgcacttgcggatgatgaactggaataacgatgaaagaaagcacatccgatctcaacattcacgtcctgccctataaccgattaattaattgatccccagctagactagtgttggagaaatcagcatgttaaaacaactgttgatgatagctgttggagtaaagttgcagtggaagctatggctgcaaaatcgttaaaatcttcaaggtgaactggcacaaaggttaatctcaagatgccgctagtgaaaagaaacatcgatcctaggcacttgtgccacacagcactgcctagaggcattaagaatgaactggaatgtgtaaccaatatttccttggcaaatataattagacaactaagtagcctaagtaaatatgctgaagatatatttggagaattattcaatgaagcacatagtttttccttcagagtcaactcattgcaagaacgtgtggaccgtttatctgttagtgttacacagcttgatccaaaggaagaagaattgtctttgcaagatataacaatgaggaaagctttccgaagttctacaattcaagaccagcagcttttcgatcgcaagactttgcctattccattacaggagacgtacgatgtttgtgaacagcctccacctctcaatatactcactccttatagagatgatggtaaagaaggtctgaagttttataccaatccttcgtatttctttgatctatggaaagaaaaaatgttgcaagatacagaggataagaggaaggaaaagaggaagcagaagcagaaaaatctagatcgtcctcatgaaccagaaaaagtgccaagagcacctcatgacaggcggcgagaatggcagaagctggcccaaggtccagagctggctgaagatgatgctaatctcttacataagcatattgaagttgctaatggcccagcctctcattttgaaacaagacctcagacatacgtggatcatatggatggatcttactcactttctgccttgccatttagtcagatgagtgagcttctgactagagctgaggaaagggtattagtcagaccacatgaaccacctccacctccaccaatgcatggagcaggagatgcaaaaccgatacccacctgtatcagttctgctacaggtttgatagaaaatcgccctcagtcaccagctacaggcagaacacctgtgtttgtgagccccactcccccacctcctccaccacctcttccatctgccttgtcaacttcctcattaagagcttcaatgacttcaactcctccccctccagtacctcccccacctccacctccagccactgctttgcaagctccagcagtaccaccacctccagctcctcttcagattgcccctggagttcttcacccagctcctcctccaattgcacctcctctagtacagccctctccaccagtagctagagctgccccagtatgtgagactgtaccagttcatccactcccacaaggtgaagttcaggggctgcctccacccccaccaccgcctcctctgcctccacctggcattcgaccatcatcacctgtcacagttacagctcttgctcatcctccctctgggctacatccaactccatctactgccccaggtccccatgttccattaatgcctccatctcctccatcacaagttatacctgcttctgagccaaagcgccatccatcaaccctacctgtaatcagtgatgccaggagtgtgctactggaagcaatacgaaaaggtattcagctacgcaaagtagaagagcagcgtgaacaggaagctaagcatgaacgcattgaaaacgatgttgccaccatcctgtctcgccgtattgctgttgaatatagtgattcggaagatgattcagaatttgatgaagtagattggttggagtaagaaaaatgcattgataaatattacaaaactgaatgcaaatgtcctttgtggtgcttgttccttgaaaatgtttggtcattctagtgttttgctttcttttccttataataaatgacccttttcctccataacttttgatttctaaggaaaatattagcatacatttcaaactaaatgttttacagtggcttatcttttttttccccctgaaaagactaatttggtcaaataaaccactaagtattaagcatggacagctgttgttagagtagcagattcagttttttgatatatcttaattgtgtactttgtgaattttaatttaaagaaagcaactgaaattgaaatcttgagggcagctgtatctactaatgagccttattccatttcctgatgttttaaaagaagaaacactgccttgattatacgaatacactcagaaagtacatttagcttgtagtgttgaattctcttaaaggaatgcttgaattttttcattattgttttattgtttttatatacttgccttatttgaatgtttagcagtatccccttcccacttatatattgtgtgatatgattttgcttgcctataggagttaaaaacttttccatgtgaaatactctgacttaaacatacatgtaacttacataactgttaagaataacagtctgatttaataaatggttcattttaaaagtt

SEQ ID NO: 2720 - DNA, 1685 bp, Homo sapiens; identical to SEQ ID NO: 1200

SEQ ID NO: 2721 - DNA, 2136 bp, Homo sapiens; identical to SEQ ID NO: 2415

SEQ ID NO: 2722 - DNA, 1507 bp, Homo sapiens
ggctgccgcacaatcccgggttgtccgggtcctgtcaatgtcacgttctgccattactgcaatagccacatctgtgtgtcacggcccaccctgtcgccagcttcatcatgccctcatgcctcatgggaaaggtggacgttcctcagtcagtgggattgtggccactgtgtttggagcaacaggattcctggggcgatatgttgtcaaccaccttggacgcatggggtcacaggtaatcataccctatcggtgtgataaatatgacatcatgcaccttcgtcccatgggtgacctgggccagcttctgtttctggaatgggacgcgagagataaagattctatccgacgagtagtacaacacagcaatgtggtcatcaatcttattggacgagactgggaaaccaaaaactttgattttgaggatgtttttgtgaagattccccaagcaattgctcaactgtccaaggaagctggagttgaaaaattcattcatgtttcacatctgaatgcgaatattaaaagctcttctagatatttgagaaataaggctgttggagagaaagtagtgagagatgcatttccggaagccattatcgtaaagccgtcggacatctttggaagagaggatagattccttaattcttttgcaagtatgcatcggtttggtcctataccccttggttccttgggctggaagacagttaaacaaccagtatatgtcgtagatgtatccaaaggaattgttaatgcagttaaggatcctgatgccaatgggaaatcctttgctttcgttggtcccagtcggtacctccttttccacctggtgaagtacatctttgctgtggctcacagattgttcctcccattccccttgccgctttttgcctatcgatgggtagcaagagtctttgaaataagcccatttgagccctggataacaagggataaagtggagcggatgcacatcacagacatgaaattgcctcacctgcctggcttagaagaccttggtattcaggcaacaccactggaactcaaggccattgaggtgctgcggcgtcatcgcacttaccgctggctgtctgctgaaattgaggatgtgaagccggccaagaccgtcaacatttagtgcctcctgagcagctcttggttttggcgtcttttgggtcggcccatgtggtttgagcacccagccaggcggtctctttagaggatcctgtacacagttccactattaaaacatttcaggttgaattctgcagtattttcttccttgatttacaaaatgagaaatgtagtcacttagaacttgagcatgatttttgttaaacatatttaataatgatatatatactatttattctctgaaatgccagagagtttgaattttcctatgacaaaccacttctagcatacgttctagaagacaaggaccctttttaatgtcaaagtattgtaaagaccccaagtgatatgtgattgttttttaatttccattaaatgagag

(The sequence listing continues in the following parts.)

1. A process for screening a plurality of chemical compounds for anti-neoplastic activity identifying a gene modulating agent comprising:
(a) contacting a compound with one or more cells expressing a gene encoding an RNA also encoded by a nucleotide sequence selected from SEQ ID NO: 1-8447, and
(b) determining a change in expression of at least one said gene due to said contacting,
wherein an increase in the expression of the determined genes whose expression is elevated in a non-cancerous cell over that in a cancerous cell of the same tissue type and a decrease in the expression of the determined genes whose expression is increased in a cancerous cell over that in a non-cancerous cell of the same tissue type
is indicative of anti-neoplastic activity.

2. A process for determining the cancerous status of a test cell, comprising determining expression in said test cell of at least one gene that includes one of the nucleotide sequences selected from the sequences of SEQ ID NOS: 1-8447, or a nucleotide sequence that is at least 95% identical thereto, and then comparing said expression to expression of said at least one gene in at least one cell known to be non-cancerous whereby a difference in said expression indicates that said cell is cancerous.

3. A process for treating cancer comprising contacting a cancerous cell with an agent having activity against an expression product encoded by a gene sequence selected from the group consisting of SEQ ID NO: 1-8447.

4. The process of claim 3 wherein said cancer is selected from the group consisting of colon cancer, lung cancer, ovarian cancer, pancreatic cancer, thyroid cancer, stomach cancer, prostate cancer, kidney cancer, esophageal cancer and breast cancer.

5. A method for identifying a compound as an anti-neoplastic agent, comprising:
(a) contacting a test compound with a gene product encoded by a polynucleotide of SEQ ID NO: 1-8447,
(b) determining a change in a biological activity of said gene product due to said contacting,
wherein a change in activity identifies said test compound as an agent having antineoplastic activity.

6. The method of claim 5 wherein said gene product is a polypeptide.

7. The method of claim 6 wherein said biological activity is an enzyme activity.

8. The method of claim 6 wherein said test compound is a substrate analog that blocks the active site of said polypeptide.

9. The method of claim 6 wherein said polypeptide is a cell-surface polypeptide.

10. The method of claim 6 wherein said polypeptide is a receptor and the test compound causes a change in biological activity by blocking binding of a ligand to said receptor.

11. An antibody that binds to a polypeptide comprising an amino acid sequence encoded by a polynucleotide having a sequence of SEQ ID NO: 1-8447.

12. An immunoconjugate comprising an affinity portion and an anti-cancer portion wherein said affinity portion is an antibody of claim 11.

13. The immunoconjugate of claim 12 wherein said anti-cancer portion is a cytotoxic agent.

14. The immunoconjugate of claim 13 wherein said cytotoxic agent is an agent that induces cell death.

15. The immunoconjugate of claim 13 wherein said cytotoxic agent is an agent that blocks the cell cycle.

16. The immunoconjugate of claim 13 wherein said cytotoxic agent is an apoptosis-inducing agent.

17. A process for treating cancer comprising contacting a cancerous cell in vivo with an agent having activity against an expression product encoded by a gene sequence selected from the group consisting of polynucleotide sequences of SEQ ID NO: 1-8447.

18. The process of claim 17 wherein said agent is an antibody.

19. The process of claim 17 wherein said agent is an immunoconjugate of claim 31.

20. The process of claim 17 wherein said agent is an immunoconjugate of claim 32.
